United States Patent Application Publication US 2011/0183924 A1 - sequence listing, part 136

SEQ ID NO: 366247 - DNA, 6345 bp, Homo sapiens
cctcttcccggttcgccctcacctcccgcttccgtcctcctcccccgcgccagggggcgccgctcaccgcagggccccacggcggaccagcgcgtgccggggactgtcccggagacccccgcacccggcacctgcactgtccctcgcccaccgcgtgcccgcggactctgctcccggcttctccagaacatccctctatgcgggcgggaccctcccacctcggaggttctcctgggaccaccactccgccggggggccgcccagagtgccaagcgtccgatccggcgccgcccaagtgcagcccaaggacccgctcccgctccgcaccctggcaggctgcctagccaggactgcgcacctgcgccctggggcggagtccttaccccaaccccagcttcactgcacatagccgagcccgacgggcctcctcccatctccatcctggacacctggcggagcccgtgctgagagcctccgccagctcccatctgttccccgaggagggcggggggctcaggctggagccagagcggtagatgggcacagactccccctccccccggcccctcaggccgggggtgaccttgccccctggagccctcaccatgaataccaaggacaccaccgaggttgctgaaaacagccaccacctgaagatctttctccccaagaagctgctggagtgtcttcctcgctgcccgctgctgcctccagagaggctacggtggaatacaaatgaggagattgcatcctacctgatcacctttgagaagcatgatgagtggctgtcttgtgccccaaagacaaggcctcagaatggctccatcatcctctacaatcgcaagaaggtgaaatatcggaaggatggttacctctggaagaagcggaaggatgggaagaccacccgagaggaccacatgaagctgaaggtccagggcatggagcctggcagtgtctctatggctgctacgttcactcttccatcgtccccacattccatcggcgctgctactggctgctccagaaccctgacatcgtccttgtgcactacctgaacgtcccagccctggaggactgtggaaagggctgcagccccatcttttgttccatcagcagcgaccgtcgagagtggctgaagtggtcccgggaggagttgttgggacagctgaagcccatgtttcatggcatcaagtggagctgcgggaatggaacagaagagttctctgtagaacacctggtgcagcagattttggacacccacccaaccaagcctgctccccgaacccacgcctgtctctgcagtggggggcttggttctgggagccttacccacaaatgcagcagcacgaaacaccgcatcatctctcccaaagtggagccccgagctttaaccctgacctctatcccccaccctcaccccccagagcctcctccactgatagccccacttcccccagagctccccaaggcacacacctccccatcttcttcctcttcttcctcctcatcaggttttgcagagcccctagaaatcagacctagccctcccacttctcgagggggttcttcaagaggaggcactgctatcctcctcctgacaggactggagcagcgggctggaggcttgacgcccaccaggcacttggctccacaggctgatcctaggccttccatgagtttggcagtggttgtaggcactgagccttctgccccaccagctcctcccagtcctgcctttgaccctgatcgttttctcaacagcccccagaggggccagacatatggaggggggcagggagtaagcccagacttccccgaggcagaggccgctcataccccctgttctgccctagagcctgctgctgccctggagccccaggcagctgctcggggtcccccaccacagtcagtagcaggtgggagaagaggaaactgcttcttcatccaagatgatgacagtggggaggagctcaagggtcacggggctgccccacccataccttcaccccctccctcacccccaccctcacctgcccccttggagccgtcaagcagggtaggaagaggagaggccttgtttggaggacctgttggggccagtgaactggagcccttcagtctttcatcattcccagaccttatgggagaactcatcagtgacgaagctccaagcatccctgctccgaccccccagctgtctcctgctcttagcaccatcacagacttctccccagagtggtcctacccagagggtggggtcaaggtgctcatcacaggtccttggaccgaagccgccgagcattactcctgtgtctttgatcacatcgcagtgccagcctcacttgtccagcctggtgtcttacgctgctactgtcccgcccatgaggtagggctggtgtctttgcaggtggcagggcgggaggggcccctttctgcttctgtgctctttgagtatcgagcccgccgattcctgtctctgcctagtactcaacttgactggctgtcactggacgacaaccagttccggatgtccatactagagcgactggagcagatggagaagcggatggcagagatcgcagcagctgggcaggtgccttgccagggtcctgatgctcctccagttcaggatgaaggccaggggcctgggttcgaagcacgggtagtggtcttggtagaaagcatgatcccacgctccacctggaagggtcctgaacgtctggcccatggaagccccttccggggcatgagccttctgcacctggctgctgcccagggctatgcccgcctcatcgagaccctgagccagtggcggagtgtggagactggaagcttggacttagagcaggaggttgacccgctcaacgtggatcatttctcttgcacccctctgatgtgggcttgtgccctgggacacctggaagctgctgtgctccttttccgttggaaccgacaggcactgagcattcccgactctctgggccgtctgccattgtctgtggctcattcccggggtcatgtgcgccttgcccgctgccttgaggaactacagagacaggagccttcggtggagcccccatttgccctatcgccaccctcctccagcccagacactggtctgagcagcgtctcctcgccctcggagctgtcggatggcaccttttccgtcacgtcagcctattctagtgccccagatggcagtcccccccctgcacctctgccagcctctgagatgactatggaggacatggccccaggccagctttcctctggtgtcccagaagcccccctactcctcatggactatgaggctaccaactccaaggggcccctctcctcccttcctgccctcccaccagcttcagatgatggggctgctccggaggacgctgacagcccacaggctgtggatgtgatcccggtggacatgatctcactagccaagcagatcatcgaagccacaccggagcggattaaacgagaggacttcgtggggctgcccgaggctggagcctcaatgcgggagcggacaggggctgtggggctcagtgagaccatgtcctggctggccagctacctggagaatgtggaccatttccccagctcaacccctcccagcgaactgccctttgagcgaggtcgcctggctgtcccttcagcaccctcctgggcagagtttctctctgcatccaccagtggcaagatggaaagtgattttgccctgctgacactatcagatcacgagcagcgggaactgtatgaggctgcccgagtcatccagacggccttccgaaagtacaagggccggcggctgaaggagcagcaggaggtagcagcagctgtaatccagcgctgttaccggaagtacaagcagtttgcactctataagaagatgacccaggcggccatcctgatccagagcaagttccgaagctactatgaacagaagcgatttcagcagagccgccgagcggctgtgctcatccagcagcactaccgctcctaccgccgcaggcccggccctccccaccggacttcggccaccctgcctgcccgcaacaaaggctcctttctcaccaagaagcaggaccaggcagcccggaagatcatgagattcctgcggcgctgccgacacaggatgagggaactgaagcagaaccaggagctggaagggcttccccagccgggactggccacatgacctggccaccgcctttctcaccaccctgggggcgcctcgtgcagtcttaacagggagagggctttctggggcagggggagcccctgtcggcagctttcctgttcacctttgttggagccctctgtaggcctcctccctcctccccacgccttgctcccacacccctctcctcgtccctcctggtcgtgccccgtctcttttggtcctggctccagaaaacccgcgccccacatacctgcatcttccgctgtgacctccggagccctgcctgcccctgctccccagctcctcctgcctgcacccgactcggccccctcctgacttgccttatttatttgttcgacgcgtctctgaatgtatccgcctcggttcccaccactgccttcgctgcgcacgcccctcgtgtttcagggctgaccgtgtccccacccgactccgcatgtttgcgtctgtttcctccctctctggccctgtcttaccccatcacccgactctggccactgacctcagggccgaaggggaggtggtgtacataggaacgcgttgcggagtccgccccgtcccccgaggggaggggtcttgtacatactgtaacatacagagtatagtgaagaatctatttaaggcgccgcggggagggctgcacggccgggcttgtggttctctagcgcggcgggggcctcctgccggctccacgggcactttctacttgtgcatgggcttggtttatacgaattgccattaaacatcgctgcaccagccagcctccggcctctgtctgcgggggcggggcggggcctaggccagctggaggccgccatgcaccgcgggcctgggatctgcgcccaggccaggcgggcccagggttttccgcctccgacgtgtttccggccttaaaggcattccgcccttccctttaagacgcaccgccccctctcagtcactcccaagatggcggacctactgggctccatcctgagctccatggagaagccacccagcctcggtgaccaggagactcggcgcaaggcccgagaacaggccgcccgcctgaagaaactacaagagcaagagaaacaacagaaagtggagtttcgtaaaaggatggagaaggaggtgtcagatttcattcaagacagtgggcagatcaagaaaaagtttcagccaatgaacaagatcgagaggagcatactacatgatgtggtggaagtggctggcctgacatccttctcctttggggaagatgatgactgtcgctatgtcatgatcttcaaaaaggagtttgcaccctcagatgaagagctagactcttaccgtcgtggagaggaatgggacccccagaaggctgaggagaagcggaagctgaaggagctggcccagaggcaagaggaggaggcagcccagcaggggcctgtggtggtgagccctgccagcgactacaaggacaagtacagccacctcatcggcaagggagcagccaaagacgcagcccacatgctacaggccaataagacctacggctgtggtgaggccacagtgcggctgggggtggctgggagaggagcataggatgcggcaggagggcagtggaggctgaggtacggatttctaggcccgccctaccctcctctctgcccctagtgcccgtggccaataagagggacacacgctccattgaagaggctatgaatgagatcagagccaagaagcgtctgcggcagagtggggaagagttgccgccaacctcctaggcgccccgcccagctccctttgacccctggggcagggcagggggcagggagagacaaggctgctgctattagagcccatcctggagccccacctctgaaccacctcctaccagctgtccctcaggctgggggaaaacaggtgtttgatttgtcaccgttggagcttggatatgtgcgtggcatgtgtgtgtgtgtgtgagagtgtgaatgcacaggtgggtatttaatctgtattattccccgttcttggaattttcttccccatggggctggggtactttacattcaataaatactgtttaacccaaaaaaaaacaccaacacaaaaaagcaacaccgacaaacaaacaaaacgagaaaaaacacacgtgcacaaccaaaaaaacaacaacc

SEQ ID NO: 366248 - DNA, 4606 bp, Homo sapiens
cctcttcccggttcgccctcacctcccgcttccgtcctcctcccccgcgccagggggcgccgctcaccgcagggccccacggcggaccagcgcgtgccggggactgtcccggagacccccgcacccggcacctgcactgtccctcgcccaccgcgtgcccgcggactctgctcccggcttctccagaacatccctctatgcgggcgggaccctcccacctcggaggttctcctgggaccaccactccgccggggggccgcccagagtgccaagcgtccgatccggcgccgcccaagtgcagcccaaggacccgctcccgctccgcaccctggcaggctgcctagccaggactgcgcacctgcgccctggggcggagtccttaccccaaccccagcttcactgcacatagccgagcccgacgggcctcctcccatctccatcctggacacctggcggagcccgtgctgagagcctccgccagctcccatctgttccccgaggagggcggggggctcaggctggagccagagcggtagatgggcacagactccccctccccccggcccctcaggccgggggtgaccttgccccctggagccctcaccatgaataccaaggacaccaccgaggttgctgaaaacagccaccacctgaagatctttctccccaagaagctgctggagtgtcttcctcgctgcccgctgctgcctccagagaggctacggtggaatacaaatgaggagattgcatcctacctgatcacctttgagaagcatgatgagtggctgtcttgtgccccaaagacaaggcctcagaatggctccatcatcctctacaatcgcaagaaggtgaaatatcggaaggatggttacctctggaagaagcggaaggatgggaagaccacccgagaggaccacatgaagctgaaggtccagggcatggagcctggcagtgtctctatggctgctacgttcactcttccatcgtccccacattccatcggcgctgctactggctgctccagaaccctgacatcgtccttgtgcactacctgaacgtcccagccctggaggactgtggaaagggctgcagccccatcttttgttccatcagcagcgaccgtcgagagtggctgaagtggtcccgggaggagttgttgggacagctgaagcccatgtttcatggcatcaagtggagctgcgggaatggaacagaagagttctctgtagaacacctggtgcagcagattttggacacccacccaaccaagcctgctccccgaacccacgcctgtctctgcagtggggggcttggttctgggagccttacccacaaatgcagcagcacgaaacaccgcatcatctctcccaaagtggagccccgagctttaaccctgacctctatcccccaccctcaccccccagagcctcctccactgatagccccacttcccccagagctccccaaggcacacacctccccatcttcttcctcttcttcctcctcatcaggttttgcagagcccctagaaatcagacctagccctcccacttctcgagggggttcttcaagaggaggcactgctatcctcctcctgacaggactggagcagcgggctggaggcttgacgcccaccaggcacttggctccacaggctgatcctaggccttccatgagtttggcagtggttgtaggcactgagccttctgccccaccagctcctcccagtcctgcctttgaccctgatcgttttctcaacagcccccagaggggccagacatatggaggggggcagggagtaagcccagacttccccgaggcagaggccgctcataccccctgttctgccctagagcctgctgctgccctggagccccaggcagctgctcggggtcccccaccacagtcagtagcaggtgggagaagaggaaactgcttcttcatccaagatgatgacagtggggaggagctcaagggtcacggggctgccccacccataccttcaccccctccctcacccccaccctcacctgcccccttggagccgtcaagcagggtaggaagaggagaggccttgtttggaggacctgttggggccagtgaactggagcccttcagtctttcatcattcccagaccttatgggagaactcatcagtgacgaagctccaagcatccctgctccgaccccccagctgtctcctgctcttagcaccatcacagacttctccccagagtggtcctacccagagggtggggtcaaggtgctcatcacaggtccttggaccgaagccgccgagcattactcctgtgtctttgatcacatcgcagtgccagcctcacttgtccagcctggtgtcttacgctgctactgtcccgcccatgaggtagggctggtgtctttgcaggtggcagggcgggaggggcccctttctgcttctgtgctctttgagtatcgagcccgccgattcctgtctctgcctagtactcaacttgactggctgtcactggacgacaaccagttccggatgtccatactagagcgactggagcagatggagaagcggatggcagagatcgcagcagctgggcaggtgccttgccagggtcctgatgctcctccagttcaggatgaaggccaggggcctgggttcgaagcacgggtagtggtcttggtagaaagcatgatcccacgctccacctggaagggtcctgaacgtctggcccatggaagccccttccggggcatgagccttctgcacctggctgctgcccagggctatgcccgcctcatcgagaccctgagccagtggcggagtgtggagactggaagcttggacttagagcaggaggttgacccgctcaacgtggatcatttctcttgcacccctctgatgtgggcttgtgccctgggacacctggaagctgctgtgctccttttccgttggaaccgacaggcactgagcattcccgactctctgggccgtctgccattgtctgtggctcattcccggggtcatgtgcgccttgcccgctgccttgaggaactacagagacaggagccttcggtggagcccccatttgccctatcgccaccctcctccagcccagacactggtctgagcagcgtctcctcgccctcggagctgtcggatggcaccttttccgtcacgtcagcctattctagtgccccagatggcagtcccccccctgcacctctgccagcctctgagatgactatggaggacatggccccaggccagctttcctctggtgtcccagaagcccccctactcctcatggactatgaggctaccaactccaaggggcccctctcctcccttcctgccctcccaccagcttcagatgatggggctgctccggaggacgctgacagcccacaggctgtggatgtgatcccggtggacatgatctcactagccaagcagatcatcgaagccacaccggagcggattaaacgagaggacttcgtggggctgcccgaggctggagcctcaatgcgggagcggacaggggctgtggggctcagtgagaccatgtcctggctggccagctacctggagaatgtggaccatttccccagctcaacccctcccagcgaactgccctttgagcgaggtcgcctggctgtcccttcagcaccctcctgggcagagtttctctctgcatccaccagtggcaagatggaaagtgattttgccctgctgacactatcagatcacgagcagcgggaactgtatgaggctgcccgagtcatccagacggccttccgaaagtacaagggccggcggctgaaggagcagcaggaggtagcagcagctgtaatccagcgctgttaccggaagtacaagcagtttgcactctataagaagatgacccaggcggccatcctgatccagagcaagttccgaagctactatgaacagaagcgatttcagcagagccgccgagcggctgtgctcatccagcagcactaccgctcctaccgccgcaggcccggccctccccaccggacttcggccaccctgcctgcccgcaacaaaggctcctttctcaccaagaagcaggaccaggcagcccggaagatcatgagattcctgcggcgctgccgacacaggatgagggaactgaagcagaaccaggagctggaagggcttccccagccgggactggccacatgacctggccaccgcctttctcaccaccctgggggcgcctcgtgcagtcttaacagggagagggctttctggggcagggggagcccctgtcggcagctttcctgttcacctttgttggagccctctgtaggcctcctccctcctccccacgccttgctcccacacccctctcctcgtccctcctggtcgtgccccgtctcttttggtcctggctccagaaaacccgcgccccacatactgtaacatacagagtatagtgaagaatctatttaaggcgccgcggggagggctgcacggccgggcttgtggttctctagcgcggcgggggcctcctgccggctccacgggcactttctacttgtgcatgggcttggtttatacgaattgccattaaacatcgctgcacca

SEQ ID NO: 366249 - DNA, 4079 bp, Homo sapiens
cctcttcccggttcgccctcacctcccgcttccgtcctcctcccccgcgccagggggcgccgctcaccgcagggccccacggcggaccagcgcgtgccggggactgtcccggagacccccgcacccggcacctgcactgtccctcgcccaccgcgtgcccgcggactctgctcccggcttctccagaacatccctctatgcgggcgggaccctcccacctcggaggttctcctgggaccaccactccgccggggggccgcccagagtgccaagcgtccgatccggcgccgcccaagtgcagcccaaggacccgctcccgctccgcaccctggcaggctgcctagccaggactgcgcacctgcgccctggggcggagtccttaccccaaccccagcttcactgcacatagccgagcccgacgggcctcctcccatctccatcctggacacctggcggagcccgtgctgagagcctccgccagctcccatctgttccccgaggagggcggggggctcaggctggagccagagcggtagatgggcacagactccccctccccccggcccctcaggccgggggtgaccttgccccctggagccctcaccatgaataccaaggacaccaccgaggttgctgaaaacagccaccacctgaagatctttctccccaagaagctgctggagtgtcttcctcgctgcccgctgctgcctccagagaggctacggtggaatacaaatgaggagattgcatcctacctgatcacctttgagaagcatgatgagtggctgtcttgtgccccaaagacaaggcctcagaatggctccatcatcctctacaatcgcaagaaggtgaaatatcggaaggatggttacctctggaagaagcggaaggatgggaagaccacccgagaggaccacatgaagctgaaggtccagggcatggagcctggcagtgtctctatggctgctacgttcactcttccatcgtccccacattccatcggcgctgctactggctgctccagaaccctgacatcgtccttgtgcactacctgaacgtcccagccctggaggactgtggaaagggctgcagccccatcttttgttccatcagcagcgaccgtcgagagtggctgaagtggtcccgggaggagttgttgggacagctgaagcccatgtttcatggcatcaagtggagctgcgggaatggaacagaagagttctctgtagaacacctggtgcagcagattttggacacccacccaaccaagcctgctccccgaacccacgcctgtctctgcagtggggggcttggttctgggagccttacccacaaatgcagcagcacgaaacaccgcatcatctctcccaaagtggagccccgagctttaaccctgacctctatcccccaccctcaccccccagagcctcctccactgatagccccacttcccccagagctccccaaggcacacacctccccatcttcttcctcttcttcctcctcatcaggttttgcagagcccctagaaatcagacctagccctcccacttctcgagggggttcttcaagaggaggcactgctatcctcctcctgacaggactggagcagcgggctggaggcttgacgcccaccaggcacttggctccacaggctgatcctaggccttccatgagtttggcagtggttgtaggcactgagccttctgccccaccagctcctcccagtcctgcctttgaccctgatcgttttctcaacagcccccagaggggccagacatatggaggggggcagggagtaagcccagacttccccgaggcagaggccgctcataccccctgttctgccctagagcctgctgctgccctggagccccaggcagctgctcggggtcccccaccacagtcagtagcaggtgggagaagaggaaactgcttcttcatccaagatgatgacagtggggaggagctcaagggtcacggggctgccccacccataccttcaccccctccctcacccccaccctcacctgcccccttggagccgtcaagcagggtaggaagaggagaggccttgtttggaggacctgttggggccagtgaactggagcccttcagtctttcatcattcccagaccttatgggagaactcatcagtgacgaagctccaagcatccctgctccgaccccccagctgtctcctgctcttagcaccatcacagacttctccccagagtggtcctacccagagggtggggtcaaggtgctcatcacaggtccttggaccgaagccgccgagcattactcctgtgtctttgatcacatcgcagtgccagcctcacttgtccagcctggtgtcttacgctgctactgtcccgcccatgaggtagggctggtgtctttgcaggtggcagggcgggaggggcccctttctgcttctgtgctctttgagtatcgagcccgccgattcctgtctctgcctagtactcaacttgactggctgtcactggacgacaaccagttccggatgtccatactagagcgactggagcagatggagaagcggatggcagagatcgcagcagctgggcaggtgccttgccagggtcctgatgctcctccagttcaggatgaaggccaggggcctgggttcgaagcacgggtagtggtcttggtagaaagcatgatcccacgctccacctggaagggtcctgaacgtctggcccatggaagccccttccggggcatgagccttctgcacctggctgctgcccagggctatgcccgcctcatcgagaccctgagccagtggcggagtgtggagactggaagcttggacttagagcaggaggttgacccgctcaacgtggatcatttctcttgcacccctctgatgtgggcttgtgccctgggacacctggaagctgctgtgctccttttccgttggaaccgacaggcactgagcattcccgactctctgggccgtctgccattgtctgtggctcattcccggggtcatgtgcgccttgcccgctgccttgaggaactacagagacaggagccttcggtggagcccccatttgccctatcgccaccctcctccagcccagacactggtctgagcagcgtctcctcgccctcggagctgtcggatggcaccttttccgtcacgtcagcctattctagtgccccagatggcagtcccccccctgcacctctgccagcctctgagatgactatggaggacatggccccaggccagctttcctctggtgtcccagaagcccccctactcctcatggactatgaggctaccaactccaaggggcccctctcctcccttcctgccctcccaccagcttcagatgatggggctgctccggaggacgctgacagcccacaggctgtggatgtgatcccggtggacatgatctcactagccaagcagatcatcgaagccacaccggagcggattaaacgagaggacttcgtggggctgcccgaggctggagcctcaatgcgggagcggacaggggctgtggggctcagtgagaccatgtcctggctggccagctacctggagaatgtggaccatttccccagctcaacccctcccagcgaactgccctttgagcgaggtcgcctggctgtcccttcagcaccctcctgggcagagtttctctctgcatccaccagtggcaagatggaaagtgattttgccctgctgacactatcagatcacgagcagcgggaactgtatgaggctgcccgagtcatccagacggccttccgaaagtacaagggccggcggctgaaggagcagcaggaggtagcagcagctgtaatccagcgctgttaccggaagtacaagcaggtgagacccttctccctcaaaagtgtaaccagcaacccaccaacccacacccacgcctaaccattccagaatgttgccagagccctaactccccttctctctccacaagctgacctggattgcacttaaggtattaggcatgagctctgagtgtgaggtctgtgatgattcagtctttccttgagtgtgtgggttacagagagtc

SEQ ID NO: 366250 - DNA, 2754 bp, Homo sapiens
  misc_feature (2709)..(2709): n is a, c, g, or t
  misc_feature (2716)..(2716): n is a, c, g, or t
  misc_feature (2720)..(2720): n is a, c, g, or t
cctcttcccggttcgccctcacctcccgcttccgtcctcctcccccgcgccagggggcgccgctcaccgcagggccccacggcggaccagcgcgtgccggggactgtcccggagacccccgcacccggcacctgcactgtccctcgcccaccgcgtgcccgcggactctgctcccggcttctccagaacatccctctatgcgggcgggaccctcccacctcggaggttctcctgggaccaccactccgccggggggccgcccagagtgccaagcgtccgatccggcgccgcccaagtgcagcccaaggacccgctcccgctccgcaccctggcaggctgcctagccaggactgcgcacctgcgccctggggcggagtccttaccccaaccccagcttcactgcacatagccgagcccgacgggcctcctcccatctccatcctggacacctggcggagcccgtgctgagagcctccgccagctcccatctgttccccgaggagggcggggggctcaggctggagccagagcggtagatgggcacagactccccctccccccggcccctcaggccgggggtgaccttgccccctggagccctcaccatgaataccaaggacaccaccgaggttgctgaaaacagccaccacctgaagatctttctccccaagaagctgctggagtgtcttcctcgctgcccgctgctgcctccagagaggctacggtggaatacaaatgaggagattgcatcctacctgatcacctttgagaagcatgatgagtggctgtcttgtgccccaaagacaaggcctcagaatggctccatcatcctctacaatcgcaagaaggtgaaatatcggaaggatggttacctctggaagaagcggaaggatgggaagaccacccgagaggaccacatgaagctgaaggtccagggcatggagcctggcagtgtctctatggctgctacgttcactcttccatcgtccccacattccatcggcgctgctactggctgctccagaaccctgacatcgtccttgtgcactacctgaacgtcccagccctggaggactgtggaaagggctgcagccccatcttttgttccatcagcagcgaccgtcgagagtggctgaagtggtcccgggaggagttgttgggacagctgaagcccatgtttcatggcatcaagtggagctgcgggaatggaacagaagagttctctgtagaacacctggtgcagcagattttggacacccacccaaccaagcctgctccccgaacccacgcctgtctctgcagtggggggcttggttctgggagccttacccacaaatgcagcagcacgaaacaccgcatcatctctcccaaagtggagccccgagctttaaccctgacctctatcccccaccctcaccccccagagcctcctccactgatagccccacttcccccagagctccccaaggcacacacctccccatcttcttcctcttcttcctcctcatcaggttttgcagagcccctagaaatcagacctagccctcccacttctcgagggggttcttcaagaggaggcactgctatcctcctcctgacaggactggagcagcgggctggaggcttgacgcccaccaggcacttggctccacaggctgatcctaggccttccatgagtttggcagtggttgtaggcactgagccttctgccccaccagctcctcccagtcctgcctttgaccctgatcgttttctcaacagcccccagaggggccagacatatggaggggggcagggagtaagcccagacttccccgaggcagaggccgctcataccccctgttctgccctagagcctgctgctgccctggagccccaggcagctgctcggggtcccccaccacagtcagtagcaggtgggagaagaggaaactgcttcttcatccaagatgatgacagtggggaggagctcaagggtcacggggctgccccacccataccttcaccccctccctcacccccaccctcacctgcccccttggagccgtcaagcagggtaggaagaggagaggccttgtttggaggacctgttggggccagtgaactggagcccttcagtctttcatcattcccagaccttatgggagaactcatcagtgacgaagctccaagcatccctgctccgaccccccagctgtctcctgctcttagcaccatcacagacttctccccagagtggtcctacccagagggtggggtcaaggtgctcatcacaggtccttggaccgaagccgccgagcattactcctgtgtctttgatcacatcgcagtgccagcctcacttgtccagcctggtgtcttacgctgctactgtcccgcccatgaggtagggctggtgtctttgcaggtggcagggcgggaggggcccctttctgcttctgtgctctttgagtatcgagcccgccgattcctgtctctgcctagtactcaacttgactggctgtcactggacgacaaccagttccggatgtccatactagagcgactggagcagatggagaagcggatggcagagatcgcagcagctgggcaggtgccttgccagggtcctgatgctcctccagttcaggagtgtggagactggaagcttggacttagagcaggaggttgacccgctcaacgtggatcatttctcttgcacccctctgntgtgggnttgngcctgggacactatggaagctctgagcttattat

SEQ ID NO: 366251 - DNA, 2303 bp, Homo sapiens
aagttctgaacttgtgaggcatctgggcctccccagaagacatttaacacagaaagcacagccctactaactagtattcttacctgtctcttcaagaatttcagaccaatcgaccgtcctgtctctttaaggcttaggaagagcagtgtggctgcccctttaaggaggcgttgcaacaaaccatattggacagacgatgggggcgacccatcgggacccgacgggcctctgactccagcaatacagcgaatcagcggctttcgggaatacatttttcggaaaaagacttcttcctcggttttctgctctgcacacgttgaaattttccccagtttttcctgcagatcgggagtcgagcaatgcctacccccgcgctcccgcaccagttgggcgctcccggatgatgccctacccctttggatccacgtggtctgcaacctggtgcgagcagcccgggctacagggttgcctgaggtgtgggtcccaggatggaggagccccaggccggcgatgctgctcggttctcttgtccccccaactttaccgcgaagcccccagcctcagagtcccctcgtttctccttggaggcgctgacgggtccagatacggagctgtggcttattcaggcccctgcagactttgccccagaatgcttcaatgggcggcatgtgcctctctctggctcccagatcgtcaagggcaaattggcaggcaagcggcaccgctatcgagtcctcagcagctgtccccaagctggagaagcgaccctgctggccccctcaacggaggcaggaggtggactcacctgtgcctcagccccccagggcaccctaaggatccttgagggtccccagcaatccctgtcagggagccctctgcagcccatcccagcaagtcccccaccacagatccctcctggcctgaggcctcggttctgtgcctttgggggcaacccaccagtcacagggcctaggtcagccttggcccccaacctgctcacctcagggaagaagaaaaaggagatgcaggtgacagaggccccagtcactcaggaggcagtgaatgggcacggggccctggaggtggacatggctttggggtcgccagaaatggatgtgcggaagaagaagaagaaaaaaaatcagcagctgaaagaaccagaggcagcagggcctgtggggacagagcccacagtggagacactggagcctctgggagtgctgttcccgtccaccaccaagaagaggaagaagcccaaagggaaagaaaccttcgagccagaagacaagacagtgaagcaggaacagattaacactgagcctctagaagacacagtcctgtccccgaccaaaaagagaaagaggcaaaaggggacggaagggatggagccagaggagggggtgacagttgagtctcagccacaggtgaaggtggagccactggaggaagccatccctctgccccctacgaagaagaggaaaaaagaaaagggacagatggcaatgatggagccagggacggaggcgatggagccagtggagccggagatgaagcctctggagtccccaggggggaccatggcgcctcaacagccagaaggagcgaagcctcaggcccaggcagctctggcagctcccaaaaagaagacgaagaaagaaaaacagcaagatgccacagtggagccagagacagaggtggtggggcctgagctgccggatgaccttgagcctcaggcagctcccacatccaccaagaagaagaagaagaagaaagagagaggtcacacagtgactgagccaattcagccactagagcctgaactgccaggggagggacagcctgaagccagggcaactccgggatccaccaagaagaggaagaagcagagtcaggaaagccggatgccagagacagtgccccaagaggagatgccagggccgccactgaattcagagtctggggaggaggctcccacaggccgggacaagaagcggaagcagcagcagcagcagcctgtgtagtctgcccccgggaaactgaggaactaaagaaagctgaaggtgcccacctgggccaccagaaggtgacacccccagaatccctccccagagactgcaccagcgcagccagcaggagcctggcctgggaggacgatttattattacactgggggtttccttggcagctggggtcatcagggtactttcaagaagggctcgtgcaggacatcaaacagcctccgggcctggatgggagggagaaaaaaatgaggaaccagtcattaaaggagctgtttcctgggt

SEQ ID NO: 366252 - DNA, 3606 bp, Homo sapiens
gtggtaatggtatatatttttgtaaaaatttggttttttatttggaagatgatatagtagtagtgtgatgttttttttattatggttttagtttttgttgtttttttttttgtatgatgatttttgttttgggagtactggggtgtttggttttttttattttatttttttttcacagtgaaagaaacaagtttattggaaactactcctttacagagtagagtgtcctcagaaagcagggggagaaacccacagccctttgttagtatttctacttataagaaactataaggaactatagttaaacttggagtgtgcagataagctcactaaaggtaggggctattggtgttatccacgaccattaatcctgcaacctaagcttgctcatttatgttatatttaagtaatgggggctgcattcttaggacatttggacattctgcaggcttggtggaacatgttctgtatggccataaatattctgtaattataattggtggtcagcctgggatgtggttattttcaggccataagcatgaaccttgtaagtgcctagctactcactttaagatggagtcactctagtcatgttttattaaaaaccagaggccagccaggcgcagtggctggtgcctgtaatcccatcctttgggaggccgaggcgagcagatcacttgaggtcaggagttcaagaccagcctggccaacatagtgaaattgtctctactaaaaatacaaaaattggctgggcgtggtggcaggtgcctgtaatcccagctacttgagaggctgaggcaggagaatcgcttgaacccaggaggtggacattgcagtgagccgagatcatgccactgcactccagcctaggcaacagagcaagactctctcaaaaaaaaacaaaaaaaaaatcaaaaaaccttccctctcctgttccacttaagcctctgccctccctgtttctctctgtagcttcaatgggcggcatgtgcctctctctggctcccagatcgtcaagggcaaattggcaggcaagcggcaccgctatcgagtcctcagcagctgtccccaagctggagaagcgaccctgctggccccctcaacggaggcaggaggtggactcacctgtgcctcagccccccagggcaccctaaggatccttgagggtccccagcaatccctgtcagggagccctctgcagcccatcccagcaagtcccccaccacagatccctcctggcctgaggcctcggttctgtgcctttgggggcaacccaccagtcacagggcctaggtcagccttggcccccaacctgctcacctcagggaagaagaaaaaggagatgcaggtgacagaggccccagtcactcaggaggcagtgaatgggcacggggccctggaggtggacatggctttggggtcgccagaaatggatgtgcggaagaagaagaagaaaaaaaatcagcagctgaaagaaccagaggcagcagggcctgtggggacagagcccacagtggagacactggagcctctgggagtgctgttcccgtccaccaccaagaagaggaagaagcccaaagggaaagaaaccttcgagccagaagacaagacagtgaagcaggaacagattaacactgagcctctagaagacacagtcctgtccccgaccaaaaagagaaagaggcaaaaggggacggaagggatggagccagaggagggggtgacagttgagtctcagccacaggtgaaggtggagccactggaggaagccatccctctgccccctacgaagaagaggaaaaaagaaaagggacagatggcaatgatggagccagggacggaggcgatggagccagtggagccggagatgaagcctctggagtccccaggggggaccatggcgcctcaacagccagaaggagcgaagcctcaggcccaggcagctctggcagctcccaaaaagaagacgaagaaagaaaaacagcaagatgccacagtggagccagagacagaggtggtggggcctgagctgccggatgaccttgagcctcaggcagctcccacatccaccaagaagaagaagaagaagaaagagagaggtcacacagtgactgagccaattcagccactagagcctgaactgccaggggagggacagcctgaagccagggcaactccgggatccaccaagaagaggaagaagcagagtcaggaaagccggatgccagagacagtgccccaagaggagatgccagggccgccactgaattcagagtctggggaggaggctcccacaggccgggacaagaagcggaagcagcagcagcagcagcctgtgtagtctgcccccgggaaactgaggaactaaagaaagctgaaggtgcccacctgggccaccagaaggtgacacccccagaatccctccccagagactgcaccagcgcagccagcaggagcctggcctgggaggacgatttattattacactgggggtttccttggcagctggggtcatcagggtactttcaagaagggctcgtgcaggacatcaaacagcctccgggcctggatgggagggagaaaaaaatgaggaaccagtcattaaaggagctgtttcctgggtaaatctagagtggggttttggttctttattttcccctataccctcaagcatttatccattgagttacaaacaatccagttacaatctttttaagttattattattattattattttttttttttttgagatggagtctcgctctgtcgcccaggttggagtgcagtggcgcaatctcggctcactgcaagctccgcctcccgggttcacgccattctcctgcctcagcctcctgagtagctgggactacaggcccctgcccagctaattttttgtatttttttttagtagagatggggtttcaccacgttagccaggatggtctcgatctcctgacctcctgatgcgcctgcctcagcctcccagtgctgggattataggtgtgagccactgcgcctggctaagttattattatttttttgagacagtctcctggtgtcacccaggctggagtgcagtggtgtgatcttggctcactgcaacctccgcctcctgggttccaacgattctcctgcctcagcctcccgagtagctgggcctaaaggtgcccaccactatacccggctaatttttgtatttttagtagagacaggggtttcaccatattggccaggctggtctcgaactcctgacctcgtgatccacctgccttgacctcccaaagtgctaggataacaggtgtgagccaccgcaccctgccaagttattttaaaatgtaccattattattgactatagtcacctggttgtgttatcaaatagtatgtcttattcattctttctttgtgtgtgtgtgtgtgtgtgtgtgtgtgtgtggtacccattaaccttccccatctccctgccagcccctaactaccctccccagcctccaggaactatccatccactcttatctccatgagttcaattgttttgatttttagatacacaaataaataagaacatgcaatgtttgtctttctgtgcctggcttatttcactt

SEQ ID NO: 366253 - DNA, 3754 bp, Homo sapiens
aagttctgaacttgtgaggcatctgggcctccccagaagacatttaacacagaaagcacagccctactaactagtattcttacctgtctcttcaagaatttcagaccaatcgaccgtcctgtctctttaaggcttaggaagagcagtgtggctgcccctttaaggaggcgttgcaacaaaccatattggacagacgatgggggcgacccatcgggacccgacgggcctctgactccagcaatacagcgaatcagcggctttcgggaatacatttttcggaaaaagacttcttcctcggttttctgctctgcacacgttgaaattttccccagtttttcctgcagatcgggagtcgagcaatgcctacccccgcgctcccgcaccagttgggcgctcccggatgatgccctacccctttggatccacgtggtctgcaacctggtgcgagcagcccgggctacagggttgcctgaggtgtgggtcccaggatggaggagccccaggccggcggtgagggtgcgggttgacggggtgcggagggtgcgttggtggaaggagaaaggggcgtccgagagggttcgggcggaaaaggaggcgtacctgcaagcaggacttgcgaagagcgtgcattcccagtgggcgaacgggaattcgaacggagagagggttatcttgtggggggctacccgtggagagcaaggcgcccccaggggttggatcggtgaaattgaggtcgcccctggggaacaggtgggcagaaaggagaaaccaggttgaggggactggagtgctcacgaggttaagaccaatggaccgataggcgcgccctgcaagattggaccggcaaggaggtgtcagtcgaccccatttccccttctgctgcagatgctgctcggttctcttgtccccccaactttaccgcgaagcccccagcctcagagtcccctcgtttctccttggaggcgctgacgggtccagatacggagctgtggcttattcaggcccctgcagactttgccccagaatggtgagtggtcttgttgacggaaaagagggtcccggtccagaccccaagagcgggttcttgaatttgtcacaggaaagaattagaggtgagtcacttcaatgggcggcatgtgcctctctctggctcccagatcgtcaagggcaaattggcaggcaagcggcaccgctatcgagtcctcagcagctgtccccaagctggagaagcgaccctgctggccccctcaacggaggcaggaggtggactcacctgtgcctcagccccccagggcaccctaaggatccttgagggtccccagcaatccctgtcagggagccctctgcagcccatcccagcaagtcccccaccacagatccctcctggcctgaggcctcggttctgtgcctttgggggcaacccaccagtcacagggcctaggtcagccttggcccccaacctgctcacctcagggaagaagaaaaaggagatgcaggtgacagaggccccagtcactcaggaggcagtgaatgggcacggggccctggaggtggacatggctttggggtcgccagaaatggatgtgcggaagaagaagaagaaaaaaaatcagcagctgaaagaaccagaggcagcagggcctgtggggacagagcccacagtggagacactggagcctctgggagtgctgttcccgtccaccaccaagaagaggaagaagcccaaagggaaagaaaccttcgagccagaagacaagacagtgaagcaggaacagattaacactgagcctctagaagacacagtcctgtccccgaccaaaaagagaaagaggcaaaaggggacggaagggatggagccagaggagggggtgacagttgagtctcagccacaggtgaaggtggagccactggaggaagccatccctctgccccctacgaagaagaggaaaaaagaaaagggacagatggcaatgatggagccagggacggaggcgatggagccagtggagccggagatgaagcctctggagtccccaggggggaccatggcgcctcaacagccagaaggagcgaagcctcaggcccaggcagctctggcagctcccaaaaagaagacgaagaaagaaaaacagcaagatgccacagtggagccagagacagaggtggtggggcctgagctgccggatgaccttgagcctcaggcagctcccacatccaccaagaagaagaagaagaagaaagagagaggtcacacagtgactgagccaattcagccactagagcctgaactgccaggggagggacagcctgaagccagggcaactccgggatccaccaagaagaggaagaagcagagtcaggaaagccggatgccagagacagtgccccaagaggagatgccagggccgccactgaattcagagtctggggaggaggctcccacaggccgggacaagaagcggaagcagcagcagcagcagcctgtgtagtctgcccccgggaaactgaggaactaaagaaagctgaaggtgcccacctgggccaccagaaggtgacacccccagaatccctccccagagactgcaccagcgcagccagcaggagcctggcctgggaggacgatttattattacactgggggtttccttggcagctggggtcatcagggtactttcaagaagggctcgtgcaggacatcaaacagcctccgggcctggatgggagggagaaaaaaatgaggaaccagtcattaaaggagctgtttcctgggtaaatctagagtggggttttggttctttattttcccctataccctcaagcatttatccattgagttacaaacaatccagttacaatctttttaagttattattattattattattttttttttttttgagatggagtctcgctctgtcgcccaggttggagtgcagtggcgcaatctcggctcactgcaagctccgcctcccgggttcacgccattctcctgcctcagcctcctgagtagctgggactacaggcccctgcccagctaattttttgtatttttttttagtagagatggggtttcaccacgttagccaggatggtctcgatctcctgacctcctgatgcgcctgcctcagcctcccagtgctgggattataggtgtgagccactgcgcctggctaagttattattatttttttgagacagtctcctggtgtcacccaggctggagtgcagtggtgtgatcttggctcactgcaacctccgcctcctgggttccaacgattctcctgcctcagcctcccgagtagctgggcctaaaggtgcccaccactatacccggctaatttttgtatttttagtagagacaggggtttcaccatattggccaggctggtctcgaactcctgacctcgtgatccacctgccttgacctcccaaagtgctaggataacaggtgtgagccaccgcaccctgccaagttattttaaaatgtaccattattattgactatagtcacctggttgtgttatcaaatagtatgtcttattcattctttctttgtgtgtgtgtgtgtgtgtgtgtgtgtgtgtggtacccattaaccttccccatctccctgccagcccctaactaccctccccagcctccaggaactatccatccactcttatctccatgagttcaattgttttgatttttagatacacaaataaataagaacatgcaatgtttgtctttctgtgcctggcttatttcactt

SEQ ID NO: 366254 - DNA, 3286 bp, Homo sapiens
aagttctgaacttgtgaggcatctgggcctccccagaagacatttaacacagaaagcacagccctactaactagtattcttacctgtctcttcaagaatttcagaccaatcgaccgtcctgtctctttaaggcttaggaagagcagtgtggctgcccctttaaggaggcgttgcaacaaaccatattggacagacgatgggggcgacccatcgggacccgacgggcctctgactccagcaatacagcgaatcagcggctttcgggaatacatttttcggaaaaagacttcttcctcggttttctgctctgcacacgttgaaattttccccagtttttcctgcagatcgggagtcgagcaatgcctacccccgcgctcccgcaccagttgggcgctcccggatgatgccctacccctttggatccacgtggtctgcaacctggtgcgagcagcccgggctacagggttgcctgaggtgtgggtcccaggatggaggagccccaggccggcgatgctgctcggttctcttgtccccccaactttaccgcgaagcccccagcctcagagtcccctcgtttctccttggaggcgctgacgggtccagatacggagctgtggcttattcaggcccctgcagactttgccccagaatgcttcaatgggcggcatgtgcctctctctggctcccagatcgtcaagggcaaattggcaggcaagcggcaccgctatcgagtcctcagcagctgtccccaagctggagaagcgaccctgctggccccctcaacggaggcaggaggtggactcacctgtgcctcagccccccagggcaccctaaggatccttgagggtccccagcaatccctgtcagggagccctctgcagcccatcccagcaagtcccccaccacagatccctcctggcctgaggcctcggttctgtgcctttgggggcaacccaccagtcacagggcctaggtcagccttggcccccaacctgctcacctcagggaagaagaaaaaggagatgcaggtgacagaggccccagtcactcaggaggcagtgaatgggcacggggccctggaggtggacatggctttggggtcgccagaaatggatgtgcggaagaagaagaagaaaaaaaatcagcagctgaaagaaccagaggcagcagggcctgtggggacagagcccacagtggagacactggagcctctgggagtgctgttcccgtccaccaccaagaagaggaagaagcccaaagggaaagaaaccttcgagccagaagacaagacagtgaagcaggaacagattaacactgagcctctagaagacacagtcctgtccccgaccaaaaagagaaagaggcaaaaggggacggaagggatggagccagaggagggggtgacagttgagtctcagccacaggtgaaggtggagccactggaggaagccatccctctgccccctacgaagaagaggaaaaaagaaaagggacagatggcaatgatggagccagggacggaggcgatggagccagtggagccggagatgaagcctctggagtccccaggggggaccatggcgcctcaacagccagaaggagcgaagcctcaggcccaggcagctctggcagctcccaaaaagaagacgaagaaagaaaaacagcaagatgccacagtggagccagagacagaggtggtggggcctgagctgccggatgaccttgagcctcaggcagctcccacatccaccaagaagaagaagaagaagaaagagagaggtcacacagtgactgagccaattcagccactagagcctgaactgccaggggagggacagcctgaagccagggcaactccgggatccaccaagaagaggaagaagcagagtcaggaaagccggatgccagagacagtgccccaagaggagatgccagggccgccactgaattcagagtctggggaggaggctcccacaggccgggacaagaagcggaagcagcagcagcagcagcctgtgtagtctgcccccgggaaactgaggaactaaagaaagctgaaggtgcccacctgggccaccagaaggtgacacccccagaatccctccccagagactgcaccagcgcagccagcaggagcctggcctgggaggacgatttattattacactgggggtttccttggcagctggggtcatcagggtactttcaagaagggctcgtgcaggacatcaaacagcctccgggcctggatgggagggagaaaaaaatgaggaaccagtcattaaaggagctgtttcctgggtaaatctagagtggggttttggttctttattttcccctataccctcaagcatttatccattgagttacaaacaatccagttacaatctttttaagttattattattattattattttttttttttttgagatggagtctcgctctgtcgcccaggttggagtgcagtggcgcaatctcggctcactgcaagctccgcctcccgggttcacgccattctcctgcctcagcctcctgagtagctgggactacaggcccctgcccagctaattttttgtatttttttttagtagagatggggtttcaccacgttagccaggatggtctcgatctcctgacctcctgatgcgcctgcctcagcctcccagtgctgggattataggtgtgagccactgcgcctggctaagttattattatttttttgagacagtctcctggtgtcacccaggctggagtgcagtggtgtgatcttggctcactgcaacctccgcctcctgggttccaacgattctcctgcctcagcctcccgagtagctgggcctaaaggtgcccaccactatacccggctaatttttgtatttttagtagagacaggggtttcaccatattggccaggctggtctcgaactcctgacctcgtgatccacctgccttgacctcccaaagtgctaggataacaggtgtgagccaccgcaccctgccaagttattttaaaatgtaccattattattgactatagtcacctggttgtgttatcaaatagtatgtcttattcattctttctttgtgtgtgtgtgtgtgtgtgtgtgtgtgtgtggtacccattaaccttccccatctccctgccagcccctaactaccctccccagcctccaggaactatccatccactcttatctccatgagttcaattgttttgatttttagatacacaaataaataagaacatgcaatgtttgtctttctgtgcctggcttatttcactt

SEQ ID NO: 366255 - DNA, 3661 bp, Homo sapiens
aagttctgaacttgtgaggcatctgggcctccccagaagacatttaacacagaaagcacagccctactaactagtattcttacctgtctcttcaagaatttcagaccaatcgaccgtcctgtctctttaaggcttaggaagagcagtgtggctgcccctttaaggaggcgttgcaacaaaccatattggacagacgatgggggcgacccatcgggacccgacgggcctctgactccagcaatacagcgaatcagcggctttcgggaatacatttttcggaaaaagacttcttcctcggttttctgctctgcacacgttgaaattttccccagtttttcctgcagatcgggagtcgagcaatgcctacccccgcgctcccgcaccagttgggcgctcccggatgatgccctacccctttggatccacgtggtctgcaacctggtgcgagcagcccgggctacagggttgcctgaggtgtgggtcccaggatggaggagccccaggccggcggtgagggtgcgggttgacggggtgcggagggtgcgttggtggaaggagaaaggggcgtccgagagggttcgggcggaaaaggaggcgtacctgcaagcaggacttgcgaagagcgtgcattcccagtgggcgaacgggaattcgaacggagagagggttatcttgtggggggctacccgtggagagcaaggcgcccccaggggttggatcggtgaaattgaggtcgcccctggggaacaggtgggcagaaaggagaaaccaggttgaggggactggagtgctcacgaggttaagaccaatggaccgataggcgcgccctgcaagattggaccggcaaggaggtgtcagtcgaccccatttccccttctgctgcagatgctgctcggttctcttgtccccccaactttaccgcgaagcccccagcctcagagtcccctcgtttctccttggaggcgctgacgggtccagatacggagctgtggcttattcaggcccctgcagactttgccccagaatgcttcaatgggcggcatgtgcctctctctggctcccagatcgtcaagggcaaattggcaggcaagcggcaccgctatcgagtcctcagcagctgtccccaagctggagaagcgaccctgctggccccctcaacggaggcaggaggtggactcacctgtgcctcagccccccagggcaccctaaggatccttgagggtccccagcaatccctgtcagggagccctctgcagcccatcccagcaagtcccccaccacagatccctcctggcctgaggcctcggttctgtgcctttgggggcaacccaccagtcacagggcctaggtcagccttggcccccaacctgctcacctcagggaagaagaaaaaggagatgcaggtgacagaggccccagtcactcaggaggcagtgaatgggcacggggccctggaggtggacatggctttggggtcgccagaaatggatgtgcggaagaagaagaagaaaaaaaatcagcagctgaaagaaccagaggcagcagggcctgtggggacagagcccacagtggagacactggagcctctgggagtgctgttcccgtccaccaccaagaagaggaagaagcccaaagggaaagaaaccttcgagccagaagacaagacagtgaagcaggaacagattaacactgagcctctagaagacacagtcctgtccccgaccaaaaagagaaagaggcaaaaggggacggaagggatggagccagaggagggggtgacagttgagtctcagccacaggtgaaggtggagccactggaggaagccatccctctgccccctacgaagaagaggaaaaaagaaaagggacagatggcaatgatggagccagggacggaggcgatggagccagtggagccggagatgaagcctctggagtccccaggggggaccatggcgcctcaacagccagaaggagcgaagcctcaggcccaggcagctctggcagctcccaaaaagaagacgaagaaagaaaaacagcaagatgccacagtggagccagagacagaggtggtggggcctgagctgccggatgaccttgagcctcaggcagctcccacatccaccaagaagaagaagaagaagaaagagagaggtcacacagtgactgagccaattcagccactagagcctgaactgccaggggagggacagcctgaagccagggcaactccgggatccaccaagaagaggaagaagcagagtcaggaaagccggatgccagagacagtgccccaagaggagatgccagggccgccactgaattcagagtctggggaggaggctcccacaggccgggacaagaagcggaagcagcagcagcagcagcctgtgtagtctgcccccgggaaactgaggaactaaagaaagctgaaggtgcccacctgggccaccagaaggtgacacccccagaatccctccccagagactgcaccagcgcagccagcaggagcctggcctgggaggacgatttattattacactgggggtttccttggcagctggggtcatcagggtactttcaagaagggctcgtgcaggacatcaaacagcctccgggcctggatgggagggagaaaaaaatgaggaaccagtcattaaaggagctgtttcctgggtaaatctagagtggggttttggttctttattttcccctataccctcaagcatttatccattgagttacaaacaatccagttacaatctttttaagttattattattattattattttttttttttttgagatggagtctcgctctgtcgcccaggttggagtgcagtggcgcaatctcggctcactgcaagctccgcctcccgggttcacgccattctcctgcctcagcctcctgagtagctgggactacaggcccctgcccagctaattttttgtatttttttttagtagagatggggtttcaccacgttagccaggatggtctcgatctcctgacctcctgatgcgcctgcctcagcctcccagtgctgggattataggtgtgagccactgcgcctggctaagttattattatttttttgagacagtctcctggtgtcacccaggctggagtgcagtggtgtgatcttggctcactgcaacctccgcctcctgggttccaacgattctcctgcctcagcctcccgagtagctgggcctaaaggtgcccaccactatacccggctaatttttgtatttttagtagagacaggggtttcaccatattggccaggctggtctcgaactcctgacctcgtgatccacctgccttgacctcccaaagtgctaggataacaggtgtgagccaccgcaccctgccaagttattttaaaatgtaccattattattgactatagtcacctggttgtgttatcaaatagtatgtcttattcattctttctttgtgtgtgtgtgtgtgtgtgtgtgtgtgtgtggtacccattaaccttccccatctccctgccagcccctaactaccctccccagcctccaggaactatccatccactcttatctccatgagttcaattgttttgatttttagatacacaaataaataagaacatgcaatgtttgtctttctgtgcctggcttatttcactt

SEQ ID NO: 366256 - DNA, 2961 bp, Homo sapiens
gtcaggtggaggatccctttccctcccgccctgcttttgctaggggaggggggtgccctgagcctgagtcgcagccagcctgggagctgggccatgttggccgcagatggccccctggtgaaggttcccgttggctttgggaagtagacaacgggtctgcctcacggggctgaggtgggactggaggatttcgagggcagaactctgggaaggaaagaaaggcttaggacccaaccagcattccccctggcactgcgggggcctggccagctcatggcgttccctgagcctgttccccaactgtgaaagggggtgatgatcttcacctcccggcatcctgagcggccaagcaggttgggggcgcctgccccccactaggccaagtggagggggtccctccgtccaatgggcctggccagggccctacgccgcctcagcggcgccctggattcgggagacagccgggcgggcgatgaagaggaggccgggcccgggttgtgccgcaacgggtgggcgccggcaccggtgcagtcacccgtgggccggcgccgcggtcgcttcgtcaagaaagacgggcactgcaacgtgcgtttcgtaaacctgggtggccagggcgcgcgctacctgagcgacctgttcaccacatgcgtggacgtgcgctggcgctggatgtgcctgctcttctcctgctccttcctcgcctcctggctgctcttcggcctggccttctggctcattgcctcgctgcacggcgacctggccgccccgccaccgcccgcgccctgcttctcacacgtggccagcttcctggccgccttcctcttcgcgctggagacgcagacgtccatcggctacggcgtgcgcagcgtcaccgaggagtgcccggccgctgtggccgccgtggtgctgcagtgcattgccggctgcgtgctcgacgccttcgtcgtgggtgctgtcatggccaagatggccaaacccaagaagcgcaacgagacgctggtcttcagcgagaacgccgtcgtggcgctgcgcgaccaccgcctctgcctcatgtggcgcgtcggcaacctgcgccgcagccacctggtcgaggcccacgtgcgtgcccagctgctgcagccccgtgtgaccccagagggtgagtacatcccgctggaccaccaggatgtggatgtgggctttgatggaggcaccgatcgtatcttcctcgtgtcccccatcaccatcgtccatgagatcgactctgccagtcctctgtatgagctaggacgtgccgagctggccagggctgactttgagctggtggtcattctcgaggggatggttgaggccacagccatgaccacacagtgtcgctcgtcctacctccctggtgaactgctctggggccatcgttttgagccagttctcttccagcgtggctcccagtatgaggtcgactatcgccacttccatcgcacttatgaggtcccagggacaccggtctgcagtgctaaggagctggatgaacgggcagagcaggcttcccacagcctcaagtctagtttccccggctctctgactgcattttgttatgagaatgaacttgctctgagctgctgccaggaggaagatgaggacgatgagactgaggaagggaatggggtggaaacagaagatggggctgctagcccccgagttctcacaccaaccctggcgctgaccctgcctccatgatgcaaactgatgtccccttccccgtgtatgcccccttccccaaggtagcaagatggagggatggggctctctcctgggatgggggcaggtgttcctgaataccgacaggcctgctgggtaaatgactaggtggtaaggttctgccatgcctggtgacccaccatggacatactggaccttaattcctctgcttctgtgctccctcctgagaaccctttatgagcctgattcctcagtctcaccagaattctggatcacccaagaggaaaagactggcagttctagattcctctatatggggagacctggattgttgaccagggtgagaagccaatggtatagactgcctctggggaagcaagttggcagttcttgaacagcatcagatatcaagagtttgtaggtctggattcacctaagattcaagggagtgttgcttctcaactcagccaactgagtagcaaatcatttgttctagaccacctaaggagggaaggttatggaatgccccaagtattcaagatcatcttgattgaccaaagaccaaaaaaaaaaaaaagacctgtggttccagaaagctcattagttgagattctgtgagtctaggttgaccacagaggcaagcactggtgagtctaggacagattttacgtggagagttgaactactccagaaactaaagagtaatgtttctagaatgcacaaaacattattagtctgtgggtttagaaagactgaagtgacagattaagagttcttgatattagataactccaacttctggctgtagagcacccagccaagagaataagcagtgctttgaaaggatccactgggtgggttgtttttttttaaagtgccattctagaatgtccaaagggaatcaggattctgtggctgtagactgatcacagagtcaaggaagcagtggcaattctagatatctgagattttgctggttccagtttgcccaatggagttgagaatctcaatgattctagatgacttcttgtggttctgtaatgccaaaaggaatgaaggctccagggatacagagttgtccattaccaaagcctggaagttctcatcacctccaggtggactgcttggcagtgctaggaggtggactcaggacttcagaagcaacatttctggcctgacctggaaggtgaaggtgaaggtgagaccctgtagggcacagggctaattagtggacaagggaagggggaggcccaggctcgtgcc

SEQ ID NO: 366257 - DNA, 3991 bp, Homo sapiens
tgcaactccgagcgtgagtccaggctaaggggacgccggccggggaagaggcgcggcgggagaagcgaccgcagcgggagcccggccaccgagggctgccggcactaggcgcagagccgccagcgctcggaagcccgcggggtgcgggagcgggaacagacttcttttgtagaattatcctatggaatgatattttcataatgagtcaacaaggttacgtggctacacctccgtattctcagcctcagcctggaataggcctttctccacctcattatgggcactatggggatccgtcgcacacagcatctccaacaggtatgatgaagccagcagggcctttgggggccaccgccactaggggaatgttgcctccgggtcccccacctcctggaccccatcagtttggtcagaatggagctcatgccactggtcaccctccccaaagatttccaggccctccacctgtcaacaatgtggcatcctcacatgcaccataccaaccctctgcacaatcttcttatccaggtcctatatccacttcatctgtcacccagctgggcagccagctcagtgctatgcaaatcaacagctatggttcaggcatggctcctccaagccagggaccccctggccctctgtcagccacatcattgcagactcctccacgacctccacagccttccattttgcagcctggatctcaagttcttccaccaccacccaccacactcaatggtcctggtgcctcacctttgcctctaccaatgtacagaccagatgggctctctgggcctcctcctccaaatgcccagtaccagcccccacctcttccaggccagaccttgggtgctggatatcctccgcagcaggccaactctggtccccagatggcaggcgcacaactgtcttacccaggaggcttccctggaggtcctgcacagatggctggtccgccacagccccagaagaagctggatcctgactctatccctagcccaatccaggtgattgagaatgatagagccagcagaggaggacaagtttatgccaccaacaccagaggccagatccctcccctggtcactacagattgcatgatacaagaccaaggaaatgccagtcctcgattcatccgttgtacaacatactgttttccatgcacgtcagatatggctaagcaagctcagattccattagctgctgtcatcaagccctttgccaccattccttcaaatgagagtcccctttacttggtaaatcacggcgagagtggaccagtcagatgcaacaggtgcaaggcctacatgtgcccatttatgcagttcatcgaaggaggaaggagatatcagtgtggattttgcaactgtgtgaatgatgttccaccattctatttccaacatctggaccacattggaagaagactggaccactatgagaaaccagagttatctctaggatcttatgaatatgttgccactttggattattgcagaaagagtaagcctcccaacccaccagcctttatcttcatgattgatgtttcatatagtaacataaagaatggacttgtcaagctcatatgtgaagaactgaagaccatgctggaaaaaattccaaaggaagagcaagaagagacgtctgcaattcgagtgggttttatcacatataacaaagttctccatttctttaatgtgaagagtaatctggcccagcctcagatgatggtggtgactgatgttggagaagtctttgttcctttgttggatggtttccttgtcaactatcaagaatcccaatctgtgattcataatttgttggaccagattccagacatgtttgcagactctaatgaaaatgagactgtctttgctcctgtcatccaggctggcatggaagcactaaaggcagcagactgtcctgggaagctgttcatcttccattcttccttgccaactgctgaagcaccagggaagctcaaaaacagagatgacaaaaaactggttaatacagacaaagagaagatacttttccagccccaaacaaatgtctatgactcattggccaaggactgcgtggctcacggctgctctgtgacactcttcctctttcctagtcagtatgtggacgtggcctcgctggggctggttcctcagctcactggaggaaccctttacaaatacaacaatttccagatgcacttggatagacaacaatttttgaacgacctcagaaatgatattgaaaagaaaataggctttgatgctattatgagggttcgtaccagcacaggtttcagagccactgatttctttggtggaatcttgatgaacaacaccaccgatgtagaaatggctgccatcgattgtgacaaggcagtgaccgtggagttcaagcacgatgacaaactcagtgaagacagtggagccttaatccagtgtgctgtgctttacacgacaatcagtggtcaaagaagacttcggattcacaatcttggcttaaactgcagctctcagctagctgatctttataagagctgtgagacagatgctcttatcaacttctttgccaagtcagcttttaaagcagttctccaccagcctttgaaggtcatccgggaaattctagttaatcagactgcccatatgttggcatgttaccggaagaattgtgcaagtccttctgcagcaagccagcttattctaccagattccatgaaagtattgccagtgtacatgaattgcttgttgaaaaactgtgtactactcagcagaccagagatctcaactgatgaacgagcataccagagacagctggtcatgaccatgggtgtggctgactctcagcttttcttctacccacaacttctgcccatacacacgttagatgtcaagagtacaatgttacctgctgccgttcgttgctctgagtcccgtctttcagaagaaggaatattcttactggctaatggtctacacatgttcctgtggttgggagtaagcagcccaccagaactgatccaaggaatatttaatgtgccatcttttgcacatatcaacacagatatgacattgctgcctgaagtgggaaacccatactctcaacaactcagaatgataatgggtattatccaacaaaagaggccatattcaatgaagctcacaattgtaaagcagcgagaacaaccagaaatggttttccgacagttcctggtagaagacaaaggactttacggaggctcttcttatgtggatttcctttgttgtgttcacaaggagatctgtcagctgcttaattaattgaaacttctctgtcattgatgttgcatttccaaggagataatctccttcttggtgcctaattttctagatgataataggctagttttgatttcttgctcattttcagaataactttccaggaagagatggcatttagaacttcagctttggtgctcaggtataaagccaattaaggtacaattgtaccataaagggaacaatctgtttctgattgcacagtttctaatttttaaaactgatgtggtttgcatttcataaaaggcaaagtttacagaaccataaacattctcaattttctttatgctagacatataaattatttttcaaactgtatagatttggggtaaaaagttgtctcagttcctctcccaattgcaatgagaaaaaaaagcttaatttttacattatacttaattttctaaaaccatgtaactccattgaacacatttttcaacttaaggtctgcatagcagacttttaataaccttgggatttatctggtagaacaatatgtgttctacatttttttcataattatatattgtgtatgttaaaactattttccagttgttttgtctgtaaaactgtctttatcaatatgcttaatggttctttgtacaattttgaaagtttctacctgtatataatggatgttaaccagtatcaataaatcacttcgtataatctta

SEQ ID NO: 366258 - DNA, 2969 bp, Homo sapiens
  misc_feature (64)..(64): n is a, c, g, or t
  misc_feature (132)..(132): n is a, c, g, or t
  misc_feature (164)..(164): n is a, c, g, or t
  misc_feature (1960)..(1960): n is a, c, g, or t
atcatttaattatcataacccaattatgaagtagatatactattattccatattcagctaaaanaaaaaaacactgagaaaaagacagggtaagtaatttgcccagggtcacacacctgctaaaagacaganctgggattgcatcctaagcagtgagtgggtantgctgataacagctacaccagactgctgtagcactagataaaataaaaacaactgctgctctttgaatgcctactctgtgccagttactgtgtgctctaggtgttttacatgggttaccagttaatccttacatccttacaagttcagaagcaaataatgtttcagtcttacagatgaagctcagggaattgttctcagtaaagatcaagcgtatgaaacaaaaaattgtctttttcagcttattctaccagattccatgaaagtattgccagtgtacatgaattgcttgttgaaaaactgtgtactactcagcagaccagagatctcaactgatgaacgagcataccagagacagctggtcatgaccatgggtgtggctgactctcagcttttcttctacccacaacttctgcccatacacacgttagatgtcaagagtacaatgttacctgctgccgttcgttgctctgagtcccgtctttcagaagaaggaatattcttactggctaatggtctacacatgttcctgtggttgggagtaagcagcccaccagaactgatccaaggaatatttaatgtgccatcttttgcacatatcaacacagatatggtaagtattattttcattgcttttgtggtaatatgaaaaatataaattcgtaaatgtttttatttatgtgcagtcaaatattacagaaagaaaaataataaggcatatatttctgtatatgaaagaaataatttcatgttttgatcaatatcaattagctggtataaagttatttgtatagagtactttcaaacaactaaaatatgtgactttaatagaaaatgctaacacttccagatcattaactatgtgccagtctctgtactctaaatacttaaatataccatttcagttaattgtcataacaaatcagtgagatggatatggtctcaacattttacagaggaatcagttgaggcttggagacaagttccttcaggtagtaaagtggcagagatgggaactgaattcagttcttatgctctggactcatccctggtgctgaactgcatactcagaagaatgtagaaatctttcataagtgtttggctacagactaaatcagattactgagttaacaaataataattccataaaaagagactatacacccctctgttgcaataacaacaaaagaaattgtgagtttgatgttaaattaatacaaatgactattttaaagtatcttaggaaaacccagcttataatttgtacaagagtcaacatttattgcaaacgttatttgtagaccattgttgtgtgagcatcactgccgatggctattgtttgactctgatagtggattccagtagagctcagcagatagttagtttcctgaaggctcacttacattgtggcaagatggcttaagtctagttgttgaacccaattgtatgaagtacagtttatcaatatatatagcatcttgcagaaagaggcaagattaaaattcaaggccatgacaggtgatcagtttagagagctgcatattcatgaggaatgtcaaaagtgtatttttaagagaattcaggggcatcaatattccagttagagattggttttaagatgaagatttagaaattgatatctgcatatgtttgaaattaagaaatgattataaatgcaatttaaaaaaataaaattcagtaggcaaagaactatgagtctgaagaatgtttatataaaagttaaggaagcttcctcttgtaatatattgacatagtaaatgctgaatgcatagttgcngaactgaacatccacaggaaatagccagtgtctctaccacaaggcagcagattggtaggtctgtgcttatatcagcatactggtatttccttgactttcatcaacaaaatgaaacaaagttaaaaaccaaatgtaagctactttctttttagaggcagctggcactttaaaacacatacatgaagaatacttacgttgtttgttgaataaatagatctaccataatatgccacataatgcatataggggatgggagtgtgaatgtaaataatgaattttttgctttccttactcctgtgaaaaacattgaccataaacttttcctgacacttgaggtttatggtgaaacattctaactcacatgttctctggccaactcacagtgatgcattggctgttggcatcttcttgctgagaagcaaacattagcattttactctgtcttaacggaagaaatgtaagtcaaaatccttcatatcacctggatgccacgtgcagctggattggcctgtagaccactaaccagatttctgggctatctaagacgctgcattccctttgagaaatcaacatttggtagtttgttttaatgccggaacagtagtacttggatggaattttccatccactgaaggaacaaagtacattcttttctctcgcaacatagccttgaatcttgaaaagggatcaaactttcacaggaagttgtttgcataaaacatatactattgtctcttggtatccatggggaattggttccagaatactctataaattaacagatgctgaagtccctcatataaaatggcatggtatttgcatataacttgtacatatacccccatatattttaaatcatctctagattacttataacaccagctgggcacggtggctcacacctataatcccagcactttgggaggctgaagcgggaggattgcttgagtgcaggcgttcaagaccagcctgggcaacatagtgagaccctctctctatcaaaaaaaaa

SEQ ID NO: 366259 - DNA, 572 bp, Homo sapiens
atgttctcttcagaaaatctaactgtaaacttggtactttcctacagttcacttgtgaaaaataatatctatgaagatggagagattcctaaaggaattccactattttaccatagagcccaaagtttccttgacccaagcaagaccatcaaggagctatctggattgtatgatactggacctcagtagaactacttttactgaattgctggagccaaaactaggctgcagcaagagaaggcaattagggtacaaaatctaaggaagctgtcattctgaggatcatatgatagatgctgggttaagacatatggctgggcatggtggctcatgcctgtaatcccagccctttgagaggccaaggcaggtggatcacttgaggtcaggagttcaagaccagcctgggcaacatggtgaaaccccacatctactaaaaatacaaaaacagctgggcgtggtggcatggacctctaatcccagttacttaggaggctgaggcaggagaatagcttgaacccaggaggtggacgttgcagtgagccgagatcatgccactcgactccagcgtgggc

SEQ ID NO: 366260 - DNA, 1156 bp, Homo sapiens
attttatttttcatactaagtctagaaatctatttttttctagaatcttatatagaaaatatagaaatcttatatttacagcacatctcaatttggatgagccacattttaaatgctcaatagtatgtgtgtctggctgttgtactggacagcacaggtctagagaatcatgatgagcaaaggacaggagttctccctgttttccctgtgtgttaacctctctagcatctctccaatctaccccctttccacctccactgctctaattcagaacctgatcatctcccacccagacacttcaaaccacttcctatctagtgtccctcatctcacgaatgtattgtacatactgctgccacttaactctctcatttcattcttctgcaccttcactggatcacatttcctacagaaacccaaactcattatgatgataatttgtcccttttagaagaagcctgtgataatttacatgccagccataattgtatctctggtacatggcacatgtattccagtatggaacactttctagccctacccctatcctttaaggctcaggggacagttactatcactgtgaagcctttcccgtaacactctgcttaggtttcatttttgccacttaaaattgtatgtcttaggttttggggtttcggggtccatgcctctttccactctagatatcaggcactttcccatcatcctccatagcctcacacataatgggcattcaataatgtttgccaaaattgaaatagacaaaattgacccattttcaaataatgtttataaccaggggctgttactgttttgttttttttttctttccgacagttcctggtagaagacaaaggactttacggaggctcttcttatgtggatttcctttgttgtgttcacaaggagatctgtcagctgcttaattaattgaaacttctctgtcattgatgttgcatttccaaggagataatctccttcttggtgcctaattttctagatgataataggctagttttgatttcttgctcattttcagaataactttccaggaagaatgtgttttgaattcggttggtgtcaagttaaagcactaaggcaatggcctaaagggaactgtctgtgtggttttattttacaggggttgttttcaaga

SEQ ID NO: 366261 - DNA, 4013 bp, Homo sapiens
tgcaactccgagcgtgagtccaggctaaggggacgccggccggggaagaggcgcggcgggagaagcgaccgcagcgggagcccggccaccgagggctgccggcactaggcgcagagccgccagcgctcggaagcccgcggggtgcgggagcgggaacagacttcttttgtagaattatcctatggaatgatattttcataatgagtcaacaaggttacgtggctacacctccgtattctcagcctcagcctggaataggcctttctccacctcattatgggcactatggggatccgtcgcacacagcatctccaacaggtatgatgaagccagcagggcctttgggggccaccgccactaggggaatgttgcctccgggtcccccacctcctggaccccatcagtttggtcagaatggagctcatgccactggtcaccctccccaaagatttccaggccctccacctgtcaacaatgtggcatcctcacatgcaccataccaaccctctgcacaatcttcttatccaggtcctatatccacttcatctgtcacccagctgggcagccagctcagtgctatgcaaatcaacagctatggttcaggcatggctcctccaagccagggaccccctggccctctgtcagccacatcattgcagactcctccacgacctccacagccttccattttgcagcctggatctcaagttcttccaccaccacccaccacactcaatggtcctggtgcctcacctttgcctctaccaatgtacagaccagatgggctctctgggcctcctcctccaaatgcccagtaccagcccccacctcttccaggccagaccttgggtgctggatatcctccgcagcaggccaactctggtccccagatggcaggcgcacaactgtcttacccaggaggcttccctggaggtcctgcacagatggctggtccgccacagccccagaagaagctggatcctgactctatccctagcccaatccaggtgattgagaatgatagagccagcagaggaggacaagtttatgccaccaacaccagaggccagatccctcccctggtcactacagattgcatgatacaagaccaaggaaatgccagtcctcgattcatccgttgtacaacatactgttttccatgcacgtcagatatggctaagcaagctcagattccattagctgctgtcatcaagccctttgccaccattccttcaaatgagagtcccctttacttggtaaatcacggcgagagtggaccagtcagatgcaacaggtgcaaggcctacatgtgcccatttatgcagttcatcgaaggaggaaggagatatcagtgtggattttgcaactgtgtgaatgatgttccaccattctatttccaacatctggaccacattggaagaagactggaccactatgagaaaccagagttatctctaggatcttatgaatatgttgccactttggattattgcagaaagagtaagcctcccaacccaccagcctttatcttcatgattgatgtttcatatagtaacataaagaatggacttgtcaagctcatatgtgaagaactgaagaccatgctggaaaaaattccaaaggaagagcaagaagagacgtctgcaattcgagtgggttttatcacatataacaaagttctccatttctttaatgtgaagagtaatctggcccagcctcagatgatggtggtgactgatgttggagaagtctttgttcctttgttggatggtttccttgtcaactatcaagaatcccaatctgtgattcataatttgttggaccagattccagacatgtttgcagactctaatgaaaatgagactgtctttgctcctgtcatccaggctggcatggaagcactaaaggcagcagactgtcctgggaagctgttcatcttccattcttccttgccaactgctgaagcaccagggaagctcaaaaacagagatgacaaaaaactggttaatacagacaaagagaagatacttttccagccccaaacaaatgtctatgactcattggccaaggactgcgtggctcacggctgctctgtgacactcttcctctttcctagtcagtatgtggacgtggcctcgctggggctggttcctcagctcactggaggaaccctttacaaatacaacaatttccagatgcacttggatagacaacaatttttgaacgacctcagaaatgatattgaaaagaaaataggctttgatgctattatgagggttcgtaccagcacaggtttcagagccactgatttctttggtggaatcttgatgaacaacaccaccgatgtagaaatggctgccatcgattgtgacaaggcagtgaccgtggagttcaagcacgatgacaaactcagtgaagacagtggagccttaatccagtgtgctgtgctttacacgacaatcagtggtcaaagaagacttcggattcacaatcttggcttaaactgcagctctcagctagctgatctttataagagctgtgagacagatgctcttatcaacttctttgccaagtcagcttttaaagcagttctccaccagcctttgaaggtcatccgggaaattctagttaatcagactgcccatatgttggcatgttaccggaagaattgtgcaagtccttctgcagcaagccagcttattctaccagattccatgaaagtattgccagtgtacatgaattgcttgttgaaaaactgtgtactactcagcagaccagagatctcaactgatgaacgagcataccagagacagctggtcatgaccatgggtgtggctgactctcagcttttcttctacccacaacttctgcccatacacacgttagatgtcaagagtacaatgttacctgctgccgttcgttgctctgagtcccgtctttcagaagaaggaatattcttactggctaatggtctacacatgttcctgtggttgggagtaagcagcccaccagaactgatccaaggaatatttaatgtgccatcttttgcacatatcaacacagatatgacattgctgcctgaagtgggaaacccatactctcaacaactcagaatgataatgggtattatccaacaaaagaggccatattcaatgaagctcacaattgtaaagcagcgagaacaaccagaaatggttttccgacagttcctggtagaagacaaaggactttacggaggctcttcttatgtggatttcctttgttgtgttcacaaggagatctgtcagctgcttaattaattgaaacttctctgtcattgatgttgcatttccaaggagataatctccttcttggtgcctaattttctagatgataataggctagttttgatttcttgctcattttcagaataactttccaggaagagatggcatttagaacttcagctttggtgctcaggtataaagccaattaaggtacaattgtaccataaagggaacaatctgtttctgattgcacagtttctaatttttaaaactgatgtggtttgcatttcataaaaggcaaagtttacagaaccataaacattctcaattttctttatgctagacatataaattatttttcaaactgtatagatttggggtaaaaagttgtctcagttcctctcccaattgcaatgagaaaaaaaagcttaatttttacattatacttaattttctaaaaccatgtaactccattgaacacatttttcaacttaaggtctgcatagcagacttttaataaccttgggatttatctggtagaacaatatgtgttctacatttttttcataattatatattgtgtatgttaaaactattttccagttgttttgtctgtaaaactgtctttatcaatatgcttaatggttctttgtacaattttgaaagtttctacctgtatataatggatgttaaccagtatcaataaatcacttcgtataatcttaaaaaaaagtcgacgcggccggc

SEQ ID NO: 366262 - DNA, 1850 bp, Homo sapiens
ccactttgacaaaatggctaatatccagaaatttaccaatacaacactttccagatgcacttggatagacaacaatttttgaacgacctcagaaatgatattgaaaagaaaataggctttgatgctattatgagggttcgtaccagcacaggtttcagagccactgatttctttggtggaatcttgatgaacaacaccaccgatgtagaaatggctgccatcgattgtgacaaggcagtgaccgtggagttcaagcacgatgacaaactcagtgaagacagtggagccttaatccagtgtgctgtgctttacacgacaatcagtggtcaaagaagacttcggattcacaatcttggcttaaactgcagctctcagctagctgatctttataagagctgtgagacagatgctcttatcaacttctttgccaagtcagcttttaaagcagttctccaccagcctttgaaggtcatccgggaaattctagttaatcagactgcccatatgttggcatgttaccggaagaattgtgcaagtccttctgcagcaagccagcttattctaccagattccatgaaagtattgccagtgtacatgaattgcttgttgaaaaactgtgtactactcagcagaccagagatctcaactgatgaacgagcataccagagacagctggtcatgaccatgggtgtggctgactctcagcttttcttctacccacaacttctgcccatacacacgttagatgtcaagagtacaatgttacctgctgccgttcgttgctctgagtcccgtctttcagaagaaggaatattcttactggctaatggtctacacatgttcctgtggttgggagtaagcagcccaccagaactgatccaaggaatatttaatgtgccatcttttgcacatatcaacacagatatgacattgctgcctgaagtgggaaacccatactctcaacaactcagaatgataatgggtattatccaacaaaagaggccatattcaatgaagctcacaattgtaaagcagcgagaacaaccagaaatggttttccgacagttcctggtagaagacaaaggactttacggaggctcttcttatgtggatttcctttgttgtgttcacaaggagatctgtcagctgcttaattaattgaaacttctctgtcattgatgttgcatttccaaggagataatctccttcttggtgcctaattttctagatgataataggctagttttgatttcttgctcattttcagaataactttccaggaagagatggcatttagaacttcagctttggtgctcaggtataaagccaattaaggtacaattgtaccataaagggaacaatctgtttctgattgcacagtttctaatttttaaaactgatgtggtttgcatttcataaaaggcaaagtttacagaaccataaacattctcaattttctttatgctagacatataaattatttttcaaactgtatagatttggggtaaaaagttgtctcagttcctctcccaattgcaatgagaaaaaaaagcttaatttttacattatacttaattttctaaaaccatgtaactccattgaacacatttttcaacttaaggtctgcatagcagacttttaataaccttgggatttatctggtagaacaatatgtgttctacatttttttcataattatatattgtgtatgttaaaactattttccagttgttttgtctgtaaaactgtctttatcaatatgcttaatggttctttgtacaattttgaaagtttctacctgtatataatggatgttaaccagtatcaataaatcacttcgtataatctta

SEQ ID NO: 366263 - DNA, 1965 bp, Homo sapiens
gtaccttctgggtgccgtctgagtgaaatttaggaatatgatgcttagacccttattatggtgcatgatcatgccctctgacacattgggttaatggacagagacgatctctaatgttagactcaacttgcttatccataccatgataactatgcaatagaatgggcccaaggtggaattttctttggctttccttgagaaattctacactaaagtttggacaaggtagcaatccagcccgtaagaattcaggacatctaaaaatgacgaattggcctgtctttttttctgtgtgtacaattctaatattctgaaggtaaatctggcccatataaccttttgctgtaggtaggcccatgttctccattagttagatcatcatatttagtcaagaggagaccattagcaaatgacttgaacagatttaaatgctattactcttgctgggtggtctgaagataatagcaacttgcttcttttttgtttgattatttgaagagatcagtgtctgagctaaaactcatgtccttttcattgttttgtgactgtagcttttaaagcagttctccaccagcctttgaaggtcatccgggaaattctagttaatcagactgcccatatgttggcatgttaccggaagaattgtgcaagtccttctgcagcaagccagcttattctaccagattccatgaaagtattgccagtgtacatgaattgcttgttgaaaaactgtgtactactcagcagaccagagatctcaactgatgaacgagcataccagagacagctggtcatgaccatgggtgtggctgactctcagcttttcttctacccacaacttctgcccatacacacgttagatgtcaagagtacaatgttacctgctgccgttcgttgctctgagtcccgtctttcagaagaaggaatattcttactggctaatggtctacacatgttcctgtggttgggagtaagcagcccaccagaactgatccaaggaatatttaatgtgccatcttttgcacatatcaacacagatatgacattgctgcctgaagtgggaaacccatactctcaacaactcagaatgataatgggtattatccaacaaaagaggccatattcaatgaagctcacaattgtaaagcagcgagaacaaccagaaatggttttccgacagttcctggtagaagacaaaggactttacggaggctcttcttatgtggatttcctttgttgtgttcacaaggagatctgtcagctgcttaattaattgaaacttctctgtcattgatgttgcatttccaaggagataatctccttcttggtgcctaattttctagatgataataggctagttttgatttcttgctcattttcagaataactttccaggaagagatggcatttagaacttcagctttggtgctcaggtataaagccaattaaggtacaattgtaccataaagggaacaatctgtttctgattgcacagtttctaatttttaaaactgatgtggtttgcatttcataaaaggcaaagtttacagaaccataaacattctcaattttctttatgctagacatataaattatttttcaaactgtatagatttggggtaaaaagttgtctcagttcctctcccaattgcaatgagaaaaaaaagcttaatttttacattatacttaattttctaaaaccatgtaactccattgaacacatttttcaacttaaggtctgcatagcagacttttaataaccttgggatttatctggtagaacaatatgtgttctacatttttttcataattatatattgtgtatgttaaaactattttccagttgttttgtctgtaaaactgtctttatcaatatgcttaatggttctttgtacaattttgaaagtttctacctgtatataatggatgttaaccagtatcaataaatcacttcgtataatctta

SEQ ID NO: 366264 - DNA, 1440 bp, Homo sapiens
aagcagtgctatcaacgcagagtggtcttttaaagcagttctccaccagcctttgaaggtcatccgggaaattctagttaatcagactgcccatatgttggcatgttaccggaagaattgtgcaagtccttctgcagcaagccagcttattctaccagattccatgaaagtattgccagtgtacatgaattgcttgttgaaaaactgtgtactactcagcagaccagagatctcaactgatgaacgagcataccagagacagctggtcatgaccatgggtgtggctgactctcagcttttcttctacccacaacttctgcccatacacacgttagatgtcaagagtacaatgttacctgctgccgttcgttgctctgagtcccgtctttcagaagaaggaatattcttactggctaatggtctacacatgttcctgtggttgggagtaagcagcccaccagaactgatccaaggaatatttaatgtgccatcttttgcacatatcaacacagatatgacattgctgcctgaagtgggaaacccatactctcaacaactcagaatgataatgggtattatccaacaaaagaggccatattcaatgaagctcacaattgtaaagcagcgagaacaaccagaaatggttttccgacagttcctggtagaagacaaaggactttacggaggctcttcttatgtggatttcctttgttgtgttcacaaggagatctgtcagctgcttaattaattgaaacttctctgtcattgatgttgcatttccaaggagataatctccttcttggtgcctaattttctagatgataataggctagttttgatttcttgctcattttcagaataactttccaggaagagatggcatttagaacttcagctttggtgctcaggtataaagccaattaaggtacaattgtaccataaagggaacaatctgtttctgattgcacagtttctaatttttaaaactgatgtggtttgcatttcataaaaggcaaagtttacagaaccataaacattctcaattttctttatgctagacatataaattatttttcaaactgtatagatttggggtaaaaagttgtctcagttcctctcccaattgcaatgagaaaaaaaagcttaatttttacattatacttaattttctaaaaccatgtaactccattgaacacatttttcaacttaaggtctgcatagcagacttttaataaccttgggatttatctggtagaacaatatgtgttctacatttttttcataattatatattgtgtatgttaaaactattttccagttgttttgtctgtaaaactgtctttatcaatatgcttaatggttctttgtacaattttgaaagtttctacctgtatataatggatgttaaccagtatcaataaatcacttcgtataatctta

SEQ ID NO: 366265 - DNA, 1120 bp, Homo sapiens
attgtcttctgtcaattatgggaatgggtgccaataatttttagtgcattttccccacagttttggttttcaggtaatgaactacaccaatgttcaagtacatggttttatgtttttaacattatgataatctcatattgctacttctatctaaatgttataaactgtactaaaactttgattttcttaaatctaagacattgctgcctgaagtgggaaacccatactctcaacaactcagaatgataatgggtattatccaacaaaagaggccatattcaatgaagctcacaattgtaaagcagcgagaacaaccagaaatggttttccgacagttcctggtagaagacaaaggactttacggaggctcttcttatgtggatttcctttgttgtgttcacaaggagatctgtcagctgcttaattaattgaaacttctctgtcattgatgttgcatttccaaggagataatctccttcttggtgcctaattttctagatgataataggctagttttgatttcttgctcattttcagaataactttccaggaagagatggcatttagaacttcagctttggtgctcaggtataaagccaattaaggtacaattgtaccataaagggaacaatctgtttctgattgcacagtttctaatttttaaaactgatgtggtttgcatttcataaaaggcaaagtttacagaaccataaacattctcaattttctttatgctagacatataaattatttttcaaactgtatagatttggggtaaaaagttgtctcagttcctctcccaattgcaatgagaaaaaaaagcttaatttttacattatacttaattttctaaaaccatgtaactccattgaacacatttttcaacttaaggtctgcatagcagacttttaataaccttgggatttatctggtagaacaatatgtgttctacatttttttcataattatatattgtgtatgttaaaactattttccagttgttttgtctgtaaaactgtctttatcaatatgcttaatggttctttgtacaattttgaaagtttctacctgtatataatggatgttaaccagtatcaataaatcacttcgtataatctta

SEQ ID NO: 366266 - DNA, 1660 bp, Homo sapiens
attttatttttcatactaagtctagaaatctatttttttctagaatcttatatagaaaatatagaaatcttatatttacagcacatctcaatttggatgagccacattttaaatgctcaatagtatgtgtgtctggctgttgtactggacagcacaggtctagagaatcatgatgagcaaaggacaggagttctccctgttttccctgtgtgttaacctctctagcatctctccaatctaccccctttccacctccactgctctaattcagaacctgatcatctcccacccagacacttcaaaccacttcctatctagtgtccctcatctcacgaatgtattgtacatactgctgccacttaactctctcatttcattcttctgcaccttcactggatcacatttcctacagaaacccaaactcattatgatgataatttgtcccttttagaagaagcctgtgataatttacatgccagccataattgtatctctggtacatggcacatgtattccagtatggaacactttctagccctacccctatcctttaaggctcaggggacagttactatcactgtgaagcctttcccgtaacactctgcttaggtttcatttttgccacttaaaattgtatgtcttaggttttggggtttcggggtccatgcctctttccactctagatatcaggcactttcccatcatcctccatagcctcacacataatgggcattcaataatgtttgccaaaattgaaatagacaaaattgacccattttcaaataatgtttataaccaggggctgttactgttttgttttttttttcctcacaattgtaaagcagcgagaacaaccagaaatggttttccgacagttcctggtagaagacaaaggactttacggaggctcttcttatgtggatttcctttgttgtgttcacaaggagatctgtcagctgcttaattaattgaaacttctctgtcattgatgttgcatttccaaggagataatctccttcttggtgcctaattttctagatgataataggctagttttgatttcttgctcattttcagaataactttccaggaagagatggcatttagaacttcagctttggtgctcaggtataaagccaattaaggtacaattgtaccataaagggaacaatctgtttctgattgcacagtttctaatttttaaaactgatgtggtttgcatttcataaaaggcaaagtttacagaaccataaacattctcaattttctttatgctagacatataaattatttttcaaactgtatagatttggggtaaaaagttgtctcagttcctctcccaattgcaatgagaaaaaaaagcttaatttttacattatacttaattttctaaaaccatgtaactccattgaacacatttttcaacttaaggtctgcatagcagacttttaataaccttgggatttatctggtagaacaatatgtgttctacatttttttcataattatatattgtgtatgttaaaactattttccagttgttttgtctgtaaaactgtctttatcaatatgcttaatggttctttgtacaattttgaaagtttctacctgtatataatggatgttaaccagtatcaataaatcacttcgtataatctta

SEQ ID NO: 366267 - DNA, 3284 bp, Homo sapiens
tgcaactccgagcgtgagtccaggctaaggggacgccggccggggaagaggcgcggcgggagaagcgaccgcagcgggagcccggccaccgagggctgccggcactaggcgcagagccgccagcgctcggaagcccgcggggtgcgggagcgggaacagacttcttttgtagaattatcctatggaatgatattttcataatgagtcaacaaggttacgtggctacacctccgtattctcagcctcagcctggaataggcctttctccacctcattatgggcactatggggatccgtcgcacacagcatctccaacaggtatgatgaagccagcagggcctttgggggccaccgccactaggggaatgttgcctccgggtcccccacctcctggaccccatcagtttggtcagaatggagctcatgccactggtcaccctccccaaagatttccaggccctccacctgtcaacaatgtggcatcctcacatgcaccataccaaccctctgcacaatcttcttatccaggtcctatatccacttcatctgtcacccagctgggcagccagctcagtgctatgcaaatcaacagctatggttcaggcatggctcctccaagccagggaccccctggccctctgtcagccacatcattgcagactcctccacgacctccacagccttccattttgcagcctggatctcaagttcttccaccaccacccaccacactcaatggtcctggtgcctcacctttgcctctaccaatgtacagaccagatgggctctctgggcctcctcctccaaatgcccagtaccagcccccacctcttccaggccagaccttgggtgctggatatcctccgcagcaggccaactctggtccccagatggcaggcgcacaactgtcttacccaggaggcttccctggaggtcctgcacagatggctggtccgccacagccccagaagaagctggatcctgactctatccctagcccaatccaggtgattgagaatgatagagccagcagaggaggacaagtttatgccaccaacaccagaggccagatccctcccctggtcactacagattgcatgatacaagaccaaggaaatgccagtcctcgattcatccgttgtacaacatactgttttccatgcacgtcagatatggctaagcaagctcagattccattagctgctgtcatcaagccctttgccaccattccttcaaatgagagtcccctttacttggtaaatcacggcgagagtggaccagtcagatgcaacaggtgcaaggcctacatgtgcccatttatgcagttcatcgaaggaggaaggagatatcagtgtggattttgcaactgtgtgaatgatgttccaccattctatttccaacatctggaccacattggaagaagactggaccactatgagaaaccagagttatctctaggatcttatgaatatgttgccactttggattattgcagaaagagtaagcctcccaacccaccagcctttatcttcatgattgatgtttcatatagtaacataaagaatggacttgtcaagctcatatgtgaagaactgaagaccatgctggaaaaaattccaaaggaagagcaagaagagacgtctgcaattcgagtgggttttatcacatataacaaagttctccatttctttaatgtgaagagtaatctggcccagcctcagatgatggtggtgactgatgttggagaagtctttgttcctttgttggatggtttccttgtcaactatcaagaatcccaatctgtgattcataatttgttggaccagattccagacatgtttgcagactctaatgaaaatgagactgtctttgctcctgtcatccaggctggcatggaagcactaaaggcagcagactgtcctgggaagctgttcatcttccattcttccttgccaactgctgaagcaccagggaagctcaaaaacagagatgacaaaaaactggttaatacagacaaagagaagatacttttccagccccaaacaaatgtctatgactcattggccaaggactgcgtggctcacggctgctctgtgacactcttcctctttcctagtcagtatgtggacgtggcctcgctggggctggttcctcagctcactggaggaaccctttacaaatacaacaatttccagatgcacttggatagacaacaatttttgaacgacctcagaaatgatattgaaaagaaaataggctttgatgctattatgagggttcgtaccagcacaggtttcagagccactgatttctttggtggaatcttgatgaacaacaccaccgatgtagaaatggctgccatcgattgtgacaaggcagtgaccgtggagttcaagcacgatgacaaactcagtgaagacagtggagccttaatccagtgtgctgtgctttacacgacaatcagtggtcaaagaagacttcggattcacaatcttggcttaaactgcagctctcagctagctgatctttataagagctgtgagacagatgctcttatcaacttctttgccaagtcagcttttaaagcagttctccaccagcctttgaaggtcatccgggaaattctagttaatcagactgcccatatgttggcatgttaccggaagaattgtgcaagtccttctgcagcaagccagcttattctaccagattccatgaaagtattgccagtgtacatgaattgcttgttgaaaaactgtgtactactcagcagaccagagatctcaactgatgaacgagcataccagagacagctggtcatgaccatgggtgtggctgactctcagcttttcttctacccacaacttctgcccatacacacgttagatgtcaagagtacaatgttacctgctgccgttcgttgctctgagtcccgtctttcagaagaaggaatattcttactggctaatggtctacacatgttcctgtggttgggagtaagcagcccaccagaactgatccaaggaatatttaatgtgccatcttttgcacatatcaacacagatatgacattgctgcctgaagtgggaaacccatactctcaacaactcagaatgataatgggtattatccaacaaaagaggccatattcaatgaaggtaagaaagcaattttatttttccctttattcaaatgttaaaaatttcattaaagacttaacatgcacaccctatatttttatgacgtgatctttgattttaaaaactcacaccatcacaaatcta

SEQ ID NO: 366268 - DNA, 636 bp, Homo sapiens
tgagagaccgtgttgcaatgaagctcacaattgtaaagcagcgagaacaaccagaaatggttttccgacagttcctggtagaagacaaaggactttacggaggctcttcttatgtggatttcctttgttgtgttcacaaggagatctgtcagctgcttaattaattgaaacttctctgtcattgatgttgcatttccaaggagataatctccttcttggtgcctaattttctagatgataataggctagttttgatttcttgctcattttcagaataactttccaggaagagatggcatttagaacttcagctttggtgttgcaatgagaaaaaaaagcttaatttttacattatacttaattttctaaaaccatgtaactccattgaacacatttttcaacttaaggtctgcatagcagacttttaataaccttgggatttatctggtagaacaatatgtgttctacatttttttcataattatatattgtgtatgttaaaactattttccagttgttttgtctgtaaaactgtctttatcaatatgcttaatggttctttgtacaattttgaaagtttctacctgtatataatggatgttaaccagtatcaataaatcacttcgtataatctta

SEQ ID NO: 366269 - DNA, 797 bp, Homo sapiens
gcggccgcctactactactaaattcgcggccgcgtcgacgggggtgtgaatgtaaataatgaattttttgctttccttactcctgtgaaaaacattgaccataaacttttcctgacacttgaggtttatggtgaaacattctaactcacatgttctctggccaactcacagtgatgcattggctgttggcatcttcttgctgagaagcaaacattagcattttactctgtcttaacggaagaaatgtaagtcaaaatccttcatatcacctggatgccacgtgcagctggattggcctgtagaccactaaccagatttctgggctatctaagacgctgcattccctttgagaaatcaacatttggtagtttgttttaatgccggaacagtagtacttggatggaattttccatccactgaaggaacaaagtacattcttttctctcgcaacatagccttgaatcttgaaaagggatcaaactttcacaggaagttgtttgcataaaacatatactattgtctcttggtatccatggggaattggttccagaatactctataaattaacagatgctgaagtccctcatataaaatggcatggtatttgcatataacttgtacatatacccccatatattttaaatcatctctagattacttataacaccagctgggcacggtggctcacacctataatcccagcactttgggaggctgaagcgggaggattgcttgagtgcaggcgttcaagaccagcctgggcaacatagtgagaccctctctctatcaaaaaaaaa

SEQ ID NO: 366270 - DNA, 3090 bp, Homo sapiens
tgcaactccgagcgtgagtccaggctaaggggacgccggccggggaagaggcgcggcgggagaagcgaccgcagcgggagcccggccaccgagggctgccggcactaggcgcagagccgccagcgctcggaagcccgcggggtgcgggagcgggaacagacttcttttgtagaattatcctatggaatgatattttcataatgagtcaacaaggttacgtggctacacctccgtattctcagcctcagcctggaataggcctttctccacctcattatgggcactatggggatccgtcgcacacagcatctccaacaggtatgatgaagccagcagggcctttgggggccaccgccactaggggaatgttgcctccgggtcccccacctcctggaccccatcagtttggtcagaatggagctcatgccactggtcaccctccccaaagatttccaggccctccacctgtcaacaatgtggcatcctcacatgcaccataccaaccctctgcacaatcttcttatccaggtcctatatccacttcatctgtcacccagctgggcagccagctcagtgctatgcaaatcaacagctatggttcaggcatggctcctccaagccagggaccccctggccctctgtcagccacatcattgcagactcctccacgacctccacagccttccattttgcagcctggatctcaagttcttccaccaccacccaccacactcaatggtcctggtgcctcacctttgcctctaccaatgtacagaccagatgggctctctgggcctcctcctccaaatgcccagtaccagcccccacctcttccaggccagaccttgggtgctggatatcctccgcagcaggccaactctggtccccagatggcaggcgcacaactgtcttacccaggaggcttccctggaggtcctgcacagatggctggtccgccacagccccagaagaagctggatcctgactctatccctagcccaatccaggtgattgagaatgatagagccagcagaggaggacaagtttatgccaccaacaccagaggccagatccctcccctggtcactacagattgcatgatacaagaccaaggaaatgccagtcctcgattcatccgttgtacaacatactgttttccatgcacgtcagatatggctaagcaagctcagattccattagctgctgtcatcaagccctttgccaccattccttcaaatgagagtcccctttacttggtaaatcacggcgagagtggaccagtcagatgcaacaggtgcaaggcctacatgtgcccatttatgcagttcatcgaaggaggaaggagatatcagtgtggattttgcaactgtgtgaatgatgttccaccattctatttccaacatctggaccacattggaagaagactggaccactatgagaaaccagagttatctctaggatcttatgaatatgttgccactttggattattgcagaaagagtaagcctcccaacccaccagcctttatcttcatgattgatgtttcatatagtaacataaagaatggacttgtcaagctcatatgtgaagaactgaagaccatgctggaaaaaattccaaaggaagagcaagaagagacgtctgcaattcgagtgggttttatcacatataacaaagttctccatttctttaatgtgaagagtaatctggcccagcctcagatgatggtggtgactgatgttggagaagtctttgttcctttgttggatggtttccttgtcaactatcaagaatcccaatctgtgattcataatttgttggaccagattccagacatgtttgcagactctaatgaaaatgagactgtctttgctcctgtcatccaggctggcatggaagcactaaaggcagcagactgtcctgggaagctgttcatcttccattcttccttgccaactgctgaagcaccagggaagctcaaaaacagagatgacaaaaaactggttaatacagacaaagagaagatacttttccagccccaaacaaatgtctatgactcattggccaaggactgcgtggctcacggctgctctgtgacactcttcctctttcctagtcagtatgtggacgtggcctcgctggggctggttcctcagctcactggaggaaccctttacaaatacaacaatttccagatgcacttggatagacaacaatttttgaacgacctcagaaatgatattgaaaagaaaataggctttgatgctattatgagggttcgtaccagcacaggtttcagagccactgatttctttggtggaatcttgatgaacaacaccaccgatgtagaaatggctgccatcgattgtgacaaggcagtgaccgtggagttcaagcacgatgacaaactcagtgaagacagtggagccttaatccagtgtgctgtgctttacacgacaatcagtggtcaaagaagacttcggattcacaatcttggcttaaactgcagctctcagctagctgatctttataagagctgtgagacagatgctcttatcaacttctttgccaagtcagcttttaaagcagttctccaccagcctttgaaggtcatccgggaaattctagttaatcagactgcccatatgttggcatgttaccggaagaattgtgcaagtccttctgcagcaagccaggtgagctacctatggcacatagatgttaaagtgttacaaacgactactcatttcttcagcacatagctatagaaggcttatgatgttgcaggcacttagatgctgttacagtaaacagtgtagctgagaagattaagaatgcaatttgggggggctgtggtttttttttttatagccaacatttaaaaatgtgaacaaaaaaaatggatgtgcatattcagttgaactacttttactgaattgctggagccaaaactaggctgcagcaagagaaggcaattagggtacaaaatctaaggaagctgtcattctgaggatcatatgatagatgctgggttaagacatatggctgggcatggtggctcatgccttaatcccaccctttgagggctca

SEQ ID NO: 366271 - DNA, 3008 bp, Homo sapiens
tgcaactccgagcgtgagtccaggctaaggggacgccggccggggaagaggcgcggcgggagaagcgaccgcagcgggagcccggccaccgagggctgccggcactaggcgcagagccgccagcgctcggaagcccgcggggtgcgggagcgggaacagacttcttttgtagaattatcctatggaatgatattttcataatgagtcaacaaggttacgtggctacacctccgtattctcagcctcagcctggaataggcctttctccacctcattatgggcactatggggatccgtcgcacacagcatctccaacaggtatgatgaagccagcagggcctttgggggccaccgccactaggggaatgttgcctccgggtcccccacctcctggaccccatcagtttggtcagaatggagctcatgccactggtcaccctccccaaagatttccaggccctccacctgtcaacaatgtggcatcctcacatgcaccataccaaccctctgcacaatcttcttatccaggtcctatatccacttcatctgtcacccagctgggcagccagctcagtgctatgcaaatcaacagctatggttcaggcatggctcctccaagccagggaccccctggccctctgtcagccacatcattgcagactcctccacgacctccacagccttccattttgcagcctggatctcaagttcttccaccaccacccaccacactcaatggtcctggtgcctcacctttgcctctaccaatgtacagaccagatgggctctctgggcctcctcctccaaatgcccagtaccagcccccacctcttccaggccagaccttgggtgctggatatcctccgcagcaggccaactctggtccccagatggcaggcgcacaactgtcttacccaggaggcttccctggaggtcctgcacagatggctggtccgccacagccccagaagaagctggatcctgactctatccctagcccaatccaggtgattgagaatgatagagccagcagaggaggacaagtttatgccaccaacaccagaggccagatccctcccctggtcactacagattgcatgatacaagaccaaggaaatgccagtcctcgattcatccgttgtacaacatactgttttccatgcacgtcagatatggctaagcaagctcagattccattagctgctgtcatcaagccctttgccaccattccttcaaatgagagtcccctttacttggtaaatcacggcgagagtggaccagtcagatgcaacaggtgcaaggcctacatgtgcccatttatgcagttcatcgaaggaggaaggagatatcagtgtggattttgcaactgtgtgaatgatgttccaccattctatttccaacatctggaccacattggaagaagactggaccactatgagaaaccagagttatctctaggatcttatgaatatgttgccactttggattattgcagaaagagtaagcctcccaacccaccagcctttatcttcatgattgatgtttcatatagtaacataaagaatggacttgtcaagctcatatgtgaagaactgaagaccatgctggaaaaaattccaaaggaagagcaagaagagacgtctgcaattcgagtgggttttatcacatataacaaagttctccatttctttaatgtgaagagtaatctggcccagcctcagatgatggtggtgactgatgttggagaagtctttgttcctttgttggatggtttccttgtcaactatcaagaatcccaatctgtgattcataatttgttggaccagattccagacatgtttgcagactctaatgaaaatgagactgtctttgctcctgtcatccaggctggcatggaagcactaaaggcagcagactgtcctgggaagctgttcatcttccattcttccttgccaactgctgaagcaccagggaagctcaaaaacagagatgacaaaaaactggttaatacagacaaagagaagatacttttccagccccaaacaaatgtctatgactcattggccaaggactgcgtggctcacggctgctctgtgacactcttcctctttcctagtcagtatgtggacgtggcctcgctggggctggttcctcagctcactggaggaaccctttacaaatacaacaatttccagatgcacttggatagacaacaatttttgaacgacctcagaaatgatattgaaaagaaaataggctttgatgctattatgagggttcgtaccagcacaggtttcagagccactgatttctttggtggaatcttgatgaacaacaccaccgatgtagaaatggctgccatcgattgtgacaaggcagtgaccgtggagttcaagcacgatgacaaactcagtgaagacagtggagccttaatccagtgtgctgtgctttacacgacaatcagtggtcaaagaagacttcggattcacaatcttggcttaaactgcagctctcagctagctgatctttataagagctgtgagacagatgctcttatcaacttctttgccaagtcagcttttaaagcagttctccaccagcctttgaaggtcatccgggaaattctagttaatcagactgcccatatgttggcatgttaccggaagaattgtgcaagtccttctgcagcaagccagttcacttgtgaaaaataatatctatgaagatggagagattcctaaaggaattccactattttaccatagagcccaaagtttccttgacccaagcaagaccatcaaggagctatctggattgtatgatactggacctcagtagaactacttttactgaattgctggagccaaaactaggctgcagcaagagaaggcaattagggtacaaaatctaaggaagctgtcattctgaggatcatatgatagatgctgggttaagacatatggctgggcatggtggctcatgccttaatcccaccctttgagggctca

SEQ ID NO: 366272 - DNA, 2462 bp, Homo sapiens
cccgccggacctgccaggaggtgggctggcgcggagggagggccctgtcccctgtccctttaaggaggagggccaaacgccggcctagagtgcggcgtagcccccacccgccgtgccctcaccccagagcagctgcagcctcagccggccgcccctccgccagccaagtccgccgctctgacccccggcagcaagtcgccaccatggtgaagatcgtgacagttaagacccaggcgtaccaggaccagaagccgggcacgagcgggctgcggaagcgggtgaaggtgttccagagcagcgccaactacgcggagaacttcatccagagtatcatctccaccgtggagccggcgcagcggcaggaggccacgctggtggtgggcggggacggccggttctacatgaaggaggccatccagctcatcgctcgcatcgctgccgccaacgggatcggtcgcttggttatcggacagaatggaatcctctccacccctgctgtatcctgcatcattagaaaaatcaaagccattggtgggatcattctgacagccagtcacaacccagggggccccaatggagattttggaatcaaattcaatatttctaatggaggtcctgctccagaagcaataactgataaaattttccaaatcagcaagacaattgaagaatatgcagtttgccctgacctgaaagtagaccttggtgttctgggaaagcagcagtttgacttggaaaataagttcaaacccttcacagtggaaattgtggattcggtagaagcttatgctacaatgctgagaagcatctttgatttcagtgcactgaaagaactactttctgggccaaaccgactgaagatccgtattgatgctatgcatggagttgtgggaccgtatgtaaagaagatcctctgtgaagaactcggtgcccctgcgaactcggcagttaactgcgttcctctggaggactttggaggccaccaccctgaccccaacctcacctatgcagctgacctggtggagaccatgaagtcaggagagcatgattttggggctgcctttgatggagatggggatcgaaacatgattctgggcaagcatgggttctttgtgaacccttcagactctgtggctgtcattgctgccaacatcttcagcattccgtatttccagcagactggggtccgcggctttgcacggagcatgcccacgagtggtgctctggaccgggtggctagtgctacaaagattgctttgtatgagaccccaactggctggaagttttttgggaatttgatggacgcgagcaaactgtccctttgtggggaggagagcttcgggaccggttctgaccacatccgtgagaaagatggactgtgggctgtccttgcctggctctccatcctagccacccgcaagcagagtgtggaggacattctcaaagatcattggcaaaagtatggccggaatttcttcaccaggtatgattacgaggaggtggaagctgagggcgcaaacaaaatgatgaaggacttggaggccctgatgtttgatcgctcctttgtggggaagcagttctcagcaaatgacaaagtttacactgtggagaaggccgataactttgaatacagcgacccagtggatggaagcatttcaagaaatcagggcttgcgcctcattttcacagatggttctcgaatcgtcttccgactgagcggcactgggagtgccggggccaccattcggctgtacatcgatagctatgagaaggacgttgccaagattaaccaggacccccaggtcatgttggccccccttatttccattgctctgaaagtgtcccagctgcaggagaggacgggacgcactgcacccactgtcatcacctaagaagacaggcctgatgtggtacgtccctccacccccggacccatccaagtcatctgattgaagagcatgacagaaacaaaatgtattcaccaagcattttaggatttgactttttcactaaccagttgacgagcagtgcatttacaaggcactgccaaacaagatgcccttgggagctgtgagggaaagaggacctgcgggcttagatcaatctcaattccttttcatgccctcctgcattgctgctgcgtgggtatttgtctccttagccatcaggtacagtttacactacaatgtaagctataggtggagcatcagcagtgagtgaggccattcttcatccttaggatgtggcaatgaaatgatggtgcaagttcctttctcttttgtgaatctttccccccatttcctgtttacatgtaacccaacaaaatgcaatttctagtgccttctgtccaatcagttctttcctctgagtgagacgtacttggctacagatttctgccttgttttgcgacattgtcccattcacacagatattttgggataataaaggaaaataagctacaa

SEQ ID NO: 366273 - DNA, 707 bp, Homo sapiens
  misc_feature (37)..(37): n is a, c, g, or t
gctagtgggcgggtgttgaatcggacgaggcagatancaggacccaggtcatgttggccccccttatttccattgctctgaaagtgtcccagctgcaggagaggacgggacgcactgcacccactgtcatcacctaagaagacaggcctgatgtggtacgtccctccacccccggacccatccaagtcatctgattgaagagcatgacagaaacaaaatgtattcaccaagcattttaggatttgactttttcactaaccagttgacgagcagtgcatttacaaggcactgccaaacaagatgcccttgggagctgtgagggaaagaggacctgcgggcttagatcaatctcaattccttttcatgccctcctgcattgctgctgcgtgggtatttgtctccttagccatcaggtacagtttacactacaatgtaagctataggtggagcatcagcagtgagtgaggccattcttcatccttaggatgtggcaatgaaatgatggtgcaagttcctttctcttttgtgaatctttccccccatttcctgtttacatgtaacccaacaaaatgcaatttctagtgccttctgtccaatcagttctttcctctgagtgagacgtacttggctacagatttctgccttgttttgcgacattgtcccattcacacagatattttgggataataaaggaaaataagctacaa

SEQ ID NO: 366274 - DNA, 312 bp, Homo sapiens
cacactagaacggcgctgttgtataaccacccactgctgccggtgacatgcgtgaggggccagtgagtgaggccattcttcatccttaggatgtggcaatgaaatgatggtgcaagttcctttctcttttgtgaatctttccccccatttcctgtttacatgtaacccaacaaaatgcaatttctagtgccttctgtccaatcagttctttcctctgagtgagacgtacttggctacagatttctgccttgttttgcgacattgtcccattcacacagatattttgggataataaaggaaaataagctacaa

SEQ ID NO: 366275 - DNA, 1642 bp, Homo sapiens
tcctgaggctgggattacaggtgcccaccacaacacccggctaatttttgtatttttagtagagatggggtttcaccatgttggccaggctggtcttgaactcttgacctcaggtgatgcacccaccttggcctcccaaagtgctgggattccaggagtgagccaccatgcccccaacctcacctatgcagctgacctggtggagaccatgaagtcaggagagcatgattttggggctgcctttgatggagatggggatcgaaacatgattctgggcaagcatgggttctttgtgaacccttcagactctgtggctgtcattgctgccaacatcttcagcattccgtatttccagcagactggggtccgcggctttgcacggagcatgcccacgagtggtgctctggaccgggtggctagtgctacaaagattgctttgtatgagaccccaactggctggaagttttttgggaatttgatggacgcgagcaaactgtccctttgtggggaggagagcttcgggaccggttctgaccacatccgtgagaaagatggactgtgggctgtccttgcctggctctccatcctagccacccgcaagcagagtgtggaggacattctcaaagatcattggcaaaagtatggccggaatttcttcaccaggtatgattacgaggaggtggaagctgagggcgcaaacaaaatgatgaaggacttggaggccctgatgtttgatcgctcctttgtggggaagcagttctcagcaaatgacaaagtttacactgtggagaaggccgataactttgaatacagcgacccagtggatggaagcatttcaagaaatcagggcttgcgcctcattttcacagatggttctcgaatcgtcttccgactgagcggcactgggagtgccggggccaccattcggctgtacatcgatagctatgagaaggacgttgccaagattaaccaggacccccaggtcatgttggccccccttatttccattgctctgaaagtgtcccagctgcaggagaggacgggacgcactgcacccactgtcatcacctaagaagacaggcctgatgtggtacgtccctccacccccggacccatccaagtcatctgattgaagagcatgacagaaacaaaatgtattcaccaagcattttaggatttgactttttcactaaccagttgacgagcagtgcatttacaaggcactgccaaacaagatgcccttgggagctgtgagggaaagaggacctgcgggcttagatcaatctcaattccttttcatgccctcctgcattgctgctgcgtgggtatttgtctccttagccatcaggtacagtttacactacaatgtaagctataggtggagcatcagcagtgagtgaggccattcttcatccttaggatgtggcaatgaaatgatggtgcaagttcctttctcttttgtgaatctttccccccatttcctgtttacatgtaacccaacaaaatgcaatttctagtgccttctgtccaatcagttctttcctctgagtgagacgtacttggctacagatttctgccttgttttgcgacattgtcccattcacacagatattttgggataataaaggaaaataagctacaa

SEQ ID NO: 366276 - DNA, 1756 bp, Homo sapiens
ctgttgcgaggagtgagactttaagcgaagaacgtctcccattgctttaccgtctcatttattcacagaaatggaaatgttcctggtggtactaagcataattggcgcagaggagtctgaatggttcatcagaccatcattggtcttggaggcctagactggaacacgtcactttctgaaatgtagatgaataaggttcaaccccaaatggagggtattttcagtctgtggaactgatcagccctgagagagggtcggcagttaaccaatcaaatgtaggcttatcaagtcaaactaaaggagcttaagtggaagacatgaaaagtcaggagtgaccttagcaggtaaaggtaatggtgatggagatggggatcgaaacatgattctgggcaagcatgggttctttgtgaacccttcagactctgtggctgtcattgctgccaacatcttcagcattccgtatttccagcagactggggtccgcggctttgcacggagcatgcccacgagtggtgctctggaccgggtggctagtgctacaaagattgctttgtatgagaccccaactggctggaagttttttgggaatttgatggacgcgagcaaactgtccctttgtggggaggagagcttcgggaccggttctgaccacatccgtgagaaagatggactgtgggctgtccttgcctggctctccatcctagccacccgcaagcagagtgtggaggacattctcaaagatcattggcaaaagtatggccggaatttcttcaccaggtatgattacgaggaggtggaagctgagggcgcaaacaaaatgatgaaggacttggaggccctgatgtttgatcgctcctttgtggggaagcagttctcagcaaatgacaaagtttacactgtggagaaggccgataactttgaatacagcgacccagtggatggaagcatttcaagaaatcagggcttgcgcctcattttcacagatggttctcgaatcgtcttccgactgagcggcactgggagtgccggggccaccattcggctgtacatcgatagctatgagaaggacgttgccaagattaaccaggacccccaggtcatgttggccccccttatttccattgctctgaaagtgtcccagctgcaggagaggacgggacgcactgcacccactgtcatcacctaagaagacaggcctgatgtggtacgtccctccacccccggacccatccaagtcatctgattgaagagcatgacagaaacaaaatgtattcaccaagcattttaggatttgactttttcactaaccagttgacgagcagtgcatttacaaggcactgccaaacaagatgcccttgggagctgtgagggaaagaggacctgcgggcttagatcaatctcaattccttttcatgccctcctgcattgctgctgcgtgggtatttgtctccttagccatcaggtacagtttacactacaatgtaagctataggtggagcatcagcagtgagtgaggccattcttcatccttaggatgtggcaatgaaatgatggtgcaagttcctttctcttttgtgaatctttccccccatttcctgtttacatgtaacccaacaaaatgcaatttctagtgccttctgtccaatcagttctttcctctgagtgagacgtacttggctacagatttctgccttgttttgcgacattgtcccattcacacagatattttgggataataaaggaaaataagctacaa

SEQ ID NO: 366277 - DNA, 2408 bp, Homo sapiens
cccgccggacctgccaggaggtgggctggcgcggagggagggccctgtcccctgtccctttaaggaggagggccaaacgccggcctagagtgcggcgtagcccccacccgccgtgccctcaccccagagcagctgcagcctcagccggccgcccctccgccagccaagtccgccgctctgacccccggcagcaagtcgccaccatggtgaagatcgtgacagttaagacccaggcgtaccaggaccagaagccgggcacgagcgggctgcggaagcgggtgaaggtgttccagagcagcgccaactacgcggagaacttcatccagagtatcatctccaccgtggagccggcgcagcggcaggaggccacgctggtggtgggcggggacggccggttctacatgaaggaggccatccagctcatcgctcgcatcgctgccgccaacgggatcggtcgcttggttatcggacagaatggaatcctctccacccctgctgtatcctgcatcattagaaaaatcaaagccattggtgggatcattctgacagccagtcacaacccagggggccccaatggagattttggaatcaaattcaatatttctaatggaggtcctgctccagaagcaataactgataaaattttccaaatcagcaagacaattgaagaatatgcagtttgccctgacctgaaagtagaccttggtgttctgggaaagcagcagtttgacttggaaaataagttcaaacccttcacagtggaaattgtggattcggtagaagcttatgctacaatgctgagaagcatctttgatttcagtgcactgaaagaactactttctgggccaaaccgactgaagatccgtattgatgctatgcatggagttgtgggaccgtatgtaaagaagatcctctgtgaagaactcggtgcccctgcgaactcggcagttaactgcgttcctctggaggactttggaggccaccaccctgaccccaacctcacctatgcagctgacctggtggagaccatgaagtcaggagagcatgattttggggctgcctttgatggagatggggatcgaaacatgattctgggcaagcatgggttctttgtgaacccttcagactctgtggctgtcattgctgccaacatcttcagcattccgtatttccagcagactggggtccgcggctttgcacggagcatgcccacgagtggtgctctggaccgggtggctagtgctacaaagattgctttgtatgagaccccaactggctggaagttttttgggaatttgatggacgcgagcaaactgtccctttgtggggaggagagcttcgggaccggttctgaccacatccgtgagaaagatggactgtgggctgtccttgcctggctctccatcctagccacccgcaagcagagtgtggaggacattctcaaagatcattggcaaaagtatggccggaatttcttcaccaggtatgattacgaggaggtggaagctgagggcgcaaacaaaatgatgaaggacttggaggccctgatgtttgatcgctcctttgtggggaagcagttctcagcaaatgacaaagtttacactgtggagaaggccgataactttgaatacagcgacccagtggatggaagcatttcaagaaatcagggcttgcgcctcattttcacagatggttctcgaatcgtcttccgactgagcggcactgggagtgccggggccaccattcggctgtacatcgatagctatgagaaggacgttgccaagattaaccaggacccccaggtcatgttggccccccttatttccattgctctgaaagtgtcccagctgcaggagaggacgggacgcactgcacccactgtcatcacctaagaagacaggcctgatgtggtacgtccctccacccccggacccatccaagtcatctgattgaagagcatgacagaaacaacagtgcatttacaaggcactgccaaacaagatgcccttgggagctgtgagggaaagaggacctgcgggcttagatcaatctcaattccttttcatgccctcctgcattgctgctgcgtgggtatttgtctccttagccatcaggtacagtttacactacaatgtaagctataggtggagcatcagcagtgagtgaggccattcttcatccttaggatgtggcaatgaaatgatggtgcaagttcctttctcttttgtgaatctttccccccatttcctgtttacatgtaacccaacaaaatgcaatttctagtgccttctgtccaatcagttctttcctctgagtgagacgtacttggctacagatttctgccttgttttgcgacattgtcccattcacacagatattttgggataataaaggaaaataagctacaa

SEQ ID NO: 366278 - DNA, 1732 bp, Homo sapiens
cccgccggacctgccaggaggtgggctggcgcggagggagggccctgtcccctgtccctttaaggaggagggccaaacgccggcctagagtgcggcgtagcccccacccgccgtgccctcaccccagagcagctgcagcctcagccggccgcccctccgccagccaagtccgccgctctgacccccggcagcaagtcgccaccatggtgaagatcgtgacagttaagacccaggcgtaccaggaccagaagccgggcacgagcgggctgcggaagcgggtgaaggtgttccagagcagcgccaactacgcggagaacttcatccagagtatcatctccaccgtggagccggcgcagcggcaggaggccacgctggtggtgggcggggacggccggttctacatgaaggaggccatccagctcatcgctcgcatcgctgccgccaacgggatcggtcgcttggttatcggacagaatggaatcctctccacccctgctgtatcctgcatcattagaaaaatcaaagccattggtgggatcattctgacagccagtcacaacccagggggccccaatggagattttggaatcaaattcaatatttctaatggaggtcctgctccagaagcaataactgataaaattttccaaatcagcaagacaattgaagaatatgcagtttgccctgacctgaaagtagaccttggtgttctgggaaagcagcagtttgacttggaaaataagttcaaacccttcacagtggaaattgtggattcggtagaagcttatgctacaatgctgagaagcatctttgatttcagtgcactgaaagaactactttctgggccaaaccgactgaagatccgtattgatgctatgcatggagttgtgggaccgtatgtaaagaagatcctctgtgaagaactcggtgcccctgcgaactcggcagttaactgcgttcctctggaggactttggaggccaccaccctgaccccaacctcacctatgcagctgacctggtggagaccatgaagtcaggagagcatgattttggggctgcctttgatggagatggggatcgaaacatgattctgggcaagcatgggttctttgtgaacccttcagactctgtggctgtcattgctgccaacatcttcagcattccgtatttccagcagactggggtccgcggctttgcacggagcatgcccacgagtggtgctctggaccgggtggctagtgctacaaagattgctttgtatgagaccccaactggctggaagttttttgggaatttgatggacgcgagcaaactgtccctttgtggggaggagagcttcgggaccggttctgaccacatccgtgagaaagatggactgtgggctgtccttgcctggctctccatcctagccacccgcaagcagagtgtggaggacattctcaaagatcattggcaaaagtatggccggaatttcttcaccaggtatgattacgaggaggtggaagctgagggcgcaaacaaaatgatggtgcaagttcctttctcttttgtgaatctttccccccatttcctgtttacatgtaacccaacaaaatgcaatttctagtgccttctgtccaatcagttctttcctctgagtgagacgtacttggctacagatttctgccttgttttgcgacattgtcccattcacacagatattttgggataataaaggaaaataagctacaa

SEQ ID NO: 366279 - DNA, 1448 bp, Homo sapiens
cccgccggacctgccaggaggtgggctggcgcggagggagggccctgtcccctgtccctttaaggaggagggccaaacgccggcctagagtgcggcgtagcccccacccgccgtgccctcaccccagagcagctgcagcctcagccggccgcccctccgccagccaagtccgccgctctgacccccggcagcaagtcgccaccatggtgaagatcgtgacagttaagacccaggcgtaccaggaccagaagccgggcacgagcgggctgcggaagcgggtgaaggtgttccagagcagcgccaactacgcggagaacttcatccagagtatcatctccaccgtggagccggcgcagcggcaggaggccacgctggtggtgggcggggacggccggttctacatgaaggaggccatccagctcatcgctcgcatcgctgccgccaacgggatcggtcgcttggttatcggacagaatggaatcctctccacccctgctgtatcctgcatcattagaaaaatcaaagccattggtgggatcattctgacagccagtcacaacccagggggccccaatggagattttggaatcaaattcaatatttctaatggaggtcctgctccagaagcaataactgataaaattttccaaatcagcaagacaattgaagaatatgcagtttgccctgacctgaaagtagaccttggtgttctgggaaagcagcagtttgacttggaaaataagttcaaacccttcacagtggaaattgtggattcggtagaagcttatgctacaatgctgagaagcatctttgatttcagtgcactgaaagaactactttctgggccaaaccgactgaagatccgtattgatgctatgcatggagttgtgggaccgtatgtaaagaagatcctctgtgaagaactcggtgcccctgcgaactcggcagttaactgcgttcctctggaggactttggaggccaccaccctgacccctaccaagcaacccctagggcttgcttggttggacaaaagtggaaagctacactgggaagttactcccttccttcaatgtctcagtgacagcgatgaggggtcctcaaaagacctcgagtttcccgaaccgaatcaccgtaagaaggacagggctagggcatttggccaggatggccaccctcctgctgttgccccttagtgaggaatcttcaccccacttcctctacccccaggttctcctccaccacagccagtcccctttcctcgctggacttaagggccactgtcccatcacccactctgccactgcctccttccacaatctgtaaatctccttgccttagactcctcctgccctccaagctgtacgtctgtcttccagatcttacttgacatccagccccctccctcaccctcacctgcagtccactacaattagctctaaccaagcaa

SEQ ID NO: 366280 - DNA, 565 bp, Homo sapiens
ttaggtgatgacagtgggtgcagtgcgtcccgtcctctcctgcagctgggacactttcagagcaatggaaacaaaatgtattcaccaagcattttaggatttgactttttcactaaccagttgacgagcagtgcatttacaaggcactgccaaacaagatgcccttgggagctgtgagggaaagaggacctgcgggcttagatcaatctcaattccttttcatgccctcctgcattgctgctgcgtgggtatttgtctccttagccatcaggtacagtttacactacaatgtaagctataggtggagcatcagcagtgagtgaggccattcttcatccttaggatgtggcaatgaaatgatggtgcaagttcctttctcttttgtgaatctttccccccatttcctgtttacatgtaacccaacaaaatgcaatttctagtgccttctgtccaatcagttctttcctctgagtgagacgtacttggctacagatttctgccttgttttgcgacattgtcccattcacacagatattttgggataataaaggaaaataagctacaa

SEQ ID NO: 366281 - DNA, 401 bp, Homo sapiens
ggagaaagcacgtttcttacagcagcttgctgtcccccctccaggttctgaccacatccgtgagaaagatggactgtgggctgtccttgcctggctctccatcctagccacccgcaagcagagtgtggaggacattctcaaagatcattggcaaaagtatggccggaatttcttcaccaggtgagccacagcccagctggggtacaaggtaaggtggggaagtgggcagagagaattcttgcgcatccacagcctctcctgtcttaagtgctaataaaaccctaggtcatccagcctctctcaattggagactttaaaaataatctggtcagggatgaaatgaagtcaatttttatgtcagccataaagagtgaggctttaaaagtttagctaacataatc

SEQ ID NO: 366282 - DNA, 2441 bp, Homo sapiens
cccgccggacctgccaggaggtgggctggcgcggagggagggccctgtcccctgtccctttaaggaggagggccaaacgccggcctagagtgcggcgtagcccccacccgccgtgccctcaccccagagcagctgcagcctcagccggccgcccctccgccagccaagtccgccgctctgacccccggcagcaagtcgccaccatggtgaagatcgtgacagttaagacccaggcgtaccaggaccagaagccgggcacgagcgggctgcggaagcgggtgaaggtgttccagagcagcgccaactacgcggagaacttcatccagagtatcatctccaccgtggagccggcgcagcggcaggaggccacgctggtggtgggcggggacggccggttctacatgaaggaggccatccagctcatcgctcgcatcgctgccgccaacgggatcggtcgcttggttatcggacagaatggaatcctctccacccctgctgtatcctccattggtgggatcattctgacagccagtcacaacccagggggccccaatggagattttggaatcaaattcaatatttctaatggaggtcctgctccagaagcaataactgataaaattttccaaatcagcaagacaattgaagaatatgcagtttgccctgacctgaaagtagaccttggtgttctgggaaagcagcagtttgacttggaaaataagttcaaacccttcacagtggaaattgtggattcggtagaagcttatgctacaatgctgagaagcatctttgatttcagtgcactgaaagaactactttctgggccaaaccgactgaagatccgtattgatgctatgcatggagttgtgggaccgtatgtaaagaagatcctctgtgaagaactcggtgcccctgcgaactcggcagttaactgcgttcctctggaggactttggaggccaccaccctgaccccaacctcacctatgcagctgacctggtggagaccatgaagtcaggagagcatgattttggggctgcctttgatggagatggggatcgaaacatgattctgggcaagcatgggttctttgtgaacccttcagactctgtggctgtcattgctgccaacatcttcagcattccgtatttccagcagactggggtccgcggctttgcacggagcatgcccacgagtggtgctctggaccgggtggctagtgctacaaagattgctttgtatgagaccccaactggctggaagttttttgggaatttgatggacgcgagcaaactgtccctttgtggggaggagagcttcgggaccggttctgaccacatccgtgagaaagatggactgtgggctgtccttgcctggctctccatcctagccacccgcaagcagagtgtggaggacattctcaaagatcattggcaaaagtatggccggaatttcttcaccaggtatgattacgaggaggtggaagctgagggcgcaaacaaaatgatgaaggacttggaggccctgatgtttgatcgctcctttgtggggaagcagttctcagcaaatgacaaagtttacactgtggagaaggccgataactttgaatacagcgacccagtggatggaagcatttcaagaaatcagggcttgcgcctcattttcacagatggttctcgaatcgtcttccgactgagcggcactgggagtgccggggccaccattcggctgtacatcgatagctatgagaaggacgttgccaagattaaccaggacccccaggtcatgttggccccccttatttccattgctctgaaagtgtcccagctgcaggagaggacgggacgcactgcacccactgtcatcacctaagaagacaggcctgatgtggtacgtccctccacccccggacccatccaagtcatctgattgaagagcatgacagaaacaaaatgtattcaccaagcattttaggatttgactttttcactaaccagttgacgagcagtgcatttacaaggcactgccaaacaagatgcccttgggagctgtgagggaaagaggacctgcgggcttagatcaatctcaattccttttcatgccctcctgcattgctgctgcgtgggtatttgtctccttagccatcaggtacagtttacactacaatgtaagctataggtggagcatcagcagtgagtgaggccattcttcatccttaggatgtggcaatgaaatgatggtgcaagttcctttctcttttgtgaatctttccccccatttcctgtttacatgtaacccaacaaaatgcaatttctagtgccttctgtccaatcagttctttcctctgagtgagacgtacttggctacagatttctgccttgttttgcgacattgtcccattcacacagatattttgggataataaaggaaaataagctacaa

SEQ ID NO: 366283 - DNA, 1457 bp, Homo sapiens
caaaggtacgaaggcgccgcggtggcttaaatccatatggaacatgatctgtagctgctttgatggaatgggatcgaaacatgattctgggcaagcatgggttctttgtgaacccttcagactctgtggctgtcattgctgccaacatcttcagcattccgtatttccagcagactggggtccgcggctttgcacggagcatgcccacgagtggtgctctggaccgggtggctagtgctacaaagattgctttgtatgagaccccaactggctggaagttttttgggaatttgatggacgcgagcaaactgtccctttgtggggaggagagcttcgggaccggttctgaccacatccgtgagaaagatggactgtgggctgtccttgcctggctctccatcctagccacccgcaagcagagtgtggaggacattctcaaagatcattggcaaaagtatggccggaatttcttcaccaggtatgattacgaggaggtggaagctgagggcgcaaacaaaatgatgaaggacttggaggccctgatgtttgatcgctcctttgtggggaagcagttctcagcaaatgacaaagtttacactgtggagaaggccgataactttgaatacagcgacccagtggatggaagcatttcaagaaatcagggcttgcgcctcattttcacagatggttctcgaatcgtcttccgactgagcggcactgggagtgccggggccaccattcggctgtacatcgatagctatgagaaggacgttgccaagattaaccaggacccccaggtcatgttggccccccttatttccattgctctgaaagtgtcccagctgcaggagaggacgggacgcactgcacccactgtcatcacctaagaagacaggcctgatgtggtacgtccctccacccccggacccatccaagtcatctgattgaagagcatgacagaaacaaaatgtattcaccaagcattttaggatttgactttttcactaaccagttgacgagcagtgcatttacaaggcactgccaaacaagatgcccttgggagctgtgagggaaagaggacctgcgggcttagatcaatctcaattccttttcatgccctcctgcattgctgctgcgtgggtatttgtctccttagccatcaggtacagtttacactacaatgtaagctataggtggagcatcagcagtgagtgaggccattcttcatccttaggatgtggcaatgaaatgatggtgcaagttcctttctcttttgtgaatctttccccccatttcctgtttacatgtaacccaacaaaatgcaatttctagtgccttctgtccaatcagttctttcctctgagtgagacgtacttggctacagatttctgccttgttttgcgacattgtcccattcacacagatattttgggataataaaggaaaataagctacaa

SEQ ID NO: 366284 - DNA, 1052 bp, Homo sapiens
cgtcctccaccacttaatgcattaggtacgagctgggtgtaaatcagtgccgaggctggcattcttcaccagtgtatgattacgaggaggtggaagctgagggcgcaaacaaaatgatgaaggacttggaggccctgatgtttgatcgctcctttgtggggaagcagttctcagcaaatgacaaagtttacactgtggagaaggccgataactttgaatacagcgacccagtggatggaagcatttcaagaaatcagggcttgcgcctcattttcacagatggttctcgaatcgtcttccgactgagcggcactgggagtgccggggccaccattcggctgtacatcgatagctatgagaaggacgttgccaagattaaccaggacccccaggtcatgttggccccccttatttccattgctctgaaagtgtcccagctgcaggagaggacgggacgcactgcacccactgtcatcacctaagaagacaggcctgatgtggtacgtccctccacccccggacccatccaagtcatctgattgaagagcatgacagaaacaaaatgtattcaccaagcattttaggatttgactttttcactaaccagttgacgagcagtgcatttacaaggcactgccaaacaagatgcccttgggagctgtgagggaaagaggacctgcgggcttagatcaatctcaattccttttcatgccctcctgcattgctgctgcgtgggtatttgtctccttagccatcaggtacagtttacactacaatgtaagctataggtggagcatcagcagtgagtgaggccattcttcatccttaggatgtggcaatgaaatgatggtgcaagttcctttctcttttgtgaatctttccccccatttcctgtttacatgtaacccaacaaaatgcaatttctagtgccttctgtccaatcagttctttcctctgagtgagacgtacttggctacagatttctgccttgttttgcgacattgtcccattcacacagatattttgggataataaaggaaaataagctacaa

SEQ ID NO: 366285 - DNA, 1325 bp, Homo sapiens
cccgccggacctgccaggaggtgggctggcgcggagggagggccctgtcccctgtccctttaaggaggagggccaaacgccggcctagagtgcggcgtagcccccacccgccgtgccctcaccccagagcagctgcagcctcagccggccgcccctccgccagccaagtccgccgctctgacccccggcagcaagtcgccaccatggtgaagatcgtgacagttaagacccaggcgtaccaggaccagaagccgggcacgagcgggctgcggaagcgggtgaaggtgttccagagcagcgccaactacgcggagaacttcatccagagtatcatctccaccgtggagccggcgcagcggcaggaggccacgctggtggtgggcggggacggccggttctacatgaaggaggccatccagctcatcgctcgcatcgctgccgccaacgggatcggtcgcttggttatcggacagaatggaatcctctccacccctgctgtatcctgcatcattagaaaaatcaaagccattggtgggatcattctgacagccagtcacaacccagggggccccaatggagattttggaatcaaattcaatatttctaatggaggtcctgctccagaagcaataactgataaaattttccaaatcagcaagacaattgaagaatatgcagtttgccctgacctgaaagtagaccttggtgttctgggaaagcagcagtttgacttggaaaataagttcaaacccttcacagtggaaattgtggattcggtagaagcttatgctacaatgctgagaatcatctgattgaagagcatgacagaaacaaaatgtattcaccaagcattttaggatttgactttttcactaaccagttgacgagcagtgcatttacaaggcactgccaaacaagatgcccttgggagctgtgagggaaagaggacctgcgggcttagatcaatctcaattccttttcatgccctcctgcattgctgctgcgtgggtatttgtctccttagccatcaggtacagtttacactacaatgtaagctataggtggagcatcagcagtgagtgaggccattcttcatccttaggatgtggcaatgaaatgatggtgcaagttcctttctcttttgtgaatctttccccccatttcctgtttacatgtaacccaacaaaatgcaatttctagtgccttctgtccaatcagttctttcctctgagtgagacgtacttggctacagatttctgccttgttttgcgacattgtcccattcacacagatattttgggataataaaggaaaataagctacaa

SEQ ID NO: 366286 - DNA, 505 bp, Homo sapiens
agcaaaagtttctaattatcttgggtatctgcctaggagtggggtactctgaatattttaattcttactgcataaatacagacatgatggtgaagagtgttggatcttggatgagaatccaggtttctaattccatgttgctgctctttaggctcagcttcattgtgcgtttagtcctataccaaaaattggcagtgaaggtaaagacatcccaaaaagtcttgatacaccaatgctaactttgtcatagtgctgacgcagagtatgaaaagcttaagtttttttctcaagagtgaaatttgagctttgaacacaaagcagtatttgattctgtttattaaataaagttgtctacagcagcatgtcaggtgctgaggaggaatattaaagatgtgtgagatccggccggtcacatcccagtgctttgggaggccaaagtgggcggatcacaaggtcaggagttcaagaccagcctggccaatatggtgaaacccccgtctctact

SEQ ID NO: 366287 - DNA, 382 bp, Homo sapiens
ttacctcctttcttattttctttcctttgttgactctcatactctgttctcctaattctcccccttttccactccctgcccaccctgaaagacacacacacacacaataagtgggtggagtaagaagtcaacggagttggatataagcattcctgcttttctgacatctccagtgtcttggagaacaaggattctagaatgagggctcctcattatgcttcctttcaacattttttctctgtgttacttaagctttcaccccaagcatgtttgacagagagccagtgcattccccttactttttacaaaaataaaaaaagaaagaaaaagaaagaaagaaagaaaaagaaagaaagaaagaaagaaagaaagagaaagaaag

SEQ ID NO: 366288 - DNA, 732 bp, Homo sapiens
ggagtcaagctctgtcgcccaggctggagtgcagtggcacgatctcggctcactgcaacctccgcctcccaggttcaagcgattttcctgcctcagcctcctgagtaactgggattacaggtgcccgccaccacgtccggctaattttttttctatttttagtagagacgggggtttcactgttttggccaggctggtctcgagctcctgatctcgtgatccgcccgcttcggccttccaaagtgctgggattacaagcgtgagccaccgtgcccggctcatcctgcttttggtttcaggtctccatgccagtgaaatgtcacctcaactccaccgtccctggtgtcaggcaagcccgagggacccaattctgcctttcttctggattttcctaacctgttaagagtcttgaaagtccttaaaccacgggagactatctggcacatgacacgggatgagacttggtgggggtcccacgggggacaggtccttccagcggttcctctgcacccagcgctgcacgggcatggggcgtgggtaatcagcctcccgaaagccacgcgagtcacggtcctgcctgcgaagaactcccagggcgaccttggggctgaggagtgggcctgcttcggccttctgctcttctgttgtgtggtgaccctcaccagaggacagcttcatgctcttggacttcccagcctcaagaactgtaagaaataaatttctttataagtt

SEQ ID NO: 366289 - DNA, 772 bp, Homo sapiens
ggagtcaagctctgtcgcccaggctggagtgcagtggcacgatctcggctcactgcaacctccgcctcccaggttcaagcgattttcctgcctcagcctcctgagtaactgggattacaggtgcccgccaccacgtccggctaattttttttctatttttagtagagacgggggtttcactgttttggccaggctggtctcgagctcctgatctcgtgatccgcccgcttcggccttccaaagtgctgggattacaagcgtgagccaccgtgcccggctcatcctgcttttggtttcaggtctccatgccagtgaaatgtcacctcaactccaccgtccctggtgtcaggcaagcccgagggacccaattctgcctttcttctggattttcctaacctgttaagagtcttgaaagtccttaaaccacgggagactatctggcacatgacacgggatgagacttggtgggggtcccacgggggacaggtccttccagcggttcctctgcacccagcgctgcacgggcatggggcgtgggtaatcagcctcccgaaagccacgcgagtcacggtcctgcctgcgaagaactcccagggcgaccttggggctgaggagtgggcctgcttcggccttctgctcttctgttgtgtggtgaccctcaccagaggacagcttcatgctcttggacttcccagcctcaagaacttcttgctctgttgcccaggctagaatgcagaggcaccatcttggctcactgcaacctccgcctacc

SEQ ID NO: 366290 - DNA, 882 bp, Homo sapiens
ggagtcaagctctgtcgcccaggctggagtgcagtggcacgatctcggctcactgcaacctccgcctcccaggttcaagcgattttcctgcctcagcctcctgagtaactgggattacaggtgcccgccaccacgtccggctaattttttttctatttttagtagagacgggggtttcactgttttggccaggctggtctcgagctcctgatctcgtgatccgcccgcttcggccttccaaagtgctgggattacaagcgtgagccaccgtgcccggctcatcctgcttttggtttcaggtctccatgccagtgaaatgtcacctcaactccaccgtccctggtgtcaggcaagcccgagggacccaattctgcctttcttctggattttcctaacctgttaagagtcttgaaagtccttaaaccacgggagactatctggcacatgacacgggatgagacttggtgggggtcccacgggggacaggtccttccagcggttcctctgcacccagcgctgcacgggcatggggcgtgggtaatcagcctcccgaaagccacgcgagtcacggtcctgcctgcgaagaactcccagggcgaccttggggctgaggagtgggcctgcttcggccttctgctcttctgttgtgtggtgaccctcaccagaggacagcttcatgctcttggacttcccagcctcaagaactgtaagaaataaatttctttataagttgcccagtctgtggtatttggttatagcagcaggaaatggagtgagacaatgccctttaccagatcaaattccctttcatttctactttgctgtttttaccattaatagaatgtgaaatataacaataaacaataacgtttgacacattga

SEQ ID NO: 366291 - DNA, 181 bp, Homo sapiens
gttcttcctaggcagcccaccacgcgcagaggctgggtgtgtccctcttggggccggcggctgccagggaggacccgggtctaccctccctccccagggatgggcctggtccctccaagtactccttgtgggccaagagcctgtgtacagaggcattaagtgtctgttgaatgaacggtgg

SEQ ID NO: 366292 - DNA, 474 bp, Homo sapiens
ttttttttttggagagacagggttttgccctgctgcccaggctgatcttgcactcccgagcttaagcgatccactggctttggcccccaaaagtgctgggattacaggcgtgagccactatgcctggccagaatctgagcttttaaccattacaggtgctgctgcctccggaaaaggacagactgtaacccatgctttgaggacgaaaagcatctcaggaagggaaaacagggtgccttctggggaatttaaagcaacccttttgggctggggttaggggacagaggttaagatgaggtaagagagccttaggctacattgttaatgacttggagtctgtgcttatatgaccaagtcacttaggggtttctgagcagaataataaagtgacaacattttaagattgatgcagtagtgacatgtaggtgcatgttaactagtaagagtgtgtactgcagtgatagtggcaactga

SEQ ID NO: 366293 - DNA, 218 bp, Homo sapiens
gatcttaaaatttggtgtgttaacatacgattatatttatacattcatttatatgtttgacaaaaatttattaagttcctgctgtgtgtcagataatgtgcttaccactggagagagtactatgagcaaactaggcacaatggctgacctcatggcacttatacccagtgagagacagatattaatagataatctcacaaataaattatatataatct

SEQ ID NO: 366294 - DNA, 746 bp, Homo sapiens
ggaagagaccgagttttaggaaaaacatcaaagctggataggttgggcagaagagctggggatagcatttagagaggctgagagtcctgggttctgggttatcaaggtgagagaaaccagaggttgccagttgtaggtgggcgtcaggactagagtgatgcttccagaagtttctgcaagtgggccgagtctaaggtagggcagggtacgccagaagttgaggggcactaggtagacaggccgagctggtggctgggtgctcccctcaccctccatgctgctaggagcccgtgagcagggacttgctctcctctccctccctcctggggcctgcctgtctgtctgtgaactcttgtcggccagcgaggccgggagcaggtggccttcatctgcaactgtgtctctctcagcctccacagccacggggacaccctgcacctattcccacgggacaggctggacccagagactctggacccggggcctccccttgagtagagacccgccctctgactgatggacgccgctgacctggggtcagacccgtgggctggacccctgcccaccccgcaggaaccctgaggcctaggggagctgttgagccttcagtgtctgcatgtgggaagtgggctccttcacctacctcacagggctgttgtgaggggcgctgtgatgcggttccaaagcacagggcttggcgcaccccactgtgctctcaataaatgtgtttcctgtcttaacaaaaa

SEQ ID NO: 366295 - DNA, 1018 bp, Homo sapiens
tggaaagagctgagtgggctgtttggctagcgtacgcgcatttgtttaaaaggaaagggtgtgtttcttggcaaagactcttcggaggaaacgctgaactggggatgggtctctacctgttctggggcctcactgcccttcctgccggggacaggcagtcactggtgggtttccccccagtggaaacacaatattttggaaatatttgtatctaggataaaacttcatctggaccaacatgtctttgttggtgttgtggcccaggtgattttaagaatgtagaatacatttggcaatttccaaacggagtgatgacctgctcctccgccccccatgccctccctgaggctggaggcttcagaagcccctgccttgggaggaggctgttctacctgagaagtctttgtccccaccgttggtgacaatcagcattgacctgtgaggcacctgccaggttcgggacgcagctttagacatccagaaaaccgggggtggaggggtggggtgggggcttaagaccccagagcttgattccttttaactgtctcatccccaaagaatggtacatgggtaccaggtaggttacttgaatcaccctgagcctcgattttcccacccgttagaaacagggtaattcatgacagtgtccgcttgggagacggctgtgacccctgagaattctcgctgcatgccgtgggctggctcgtgagactcaaggtctgggttcgaggcccccgcaaccccttctgactgtgtggcctgggcgagtttgttgtttgtaacctggaaagcgtcacacctgcctggcacggttattgtgggcttcaatgagattgtttgtgtgaaataaacgctttgtgactggcacacaggcgctctcatcccggctctcctggtgggcccggaccgctgggtgctacagggctgttgtgaggggcgctgtgatgcggttccaaagcacagggcttggcgcaccccactgtgctctcaataaatgtgtttcctgtcttaacaaaaa

SEQ ID NO: 366296 - DNA, 504 bp, Homo sapiens
tgggggcttgaagacataaccgtggttatccaggctgcggcggtagaagctggcattgaagggctcagggttctctgtccagtcctcagctgccctggagcacccaagaggcagactggtaggtaaggggtggcttgtcggggacagtggtctccacaaatgcaaggaggcctctgggcagaacaaatgcaggttccctggcaggggcagggtttgggtagtgggataggtcacttacttgttggggaagtctggaagtggggtaagctagggtccagggtaggttcagggcacacacccctcattgttaacctcgcagtccaccccgcaggaaccctgaggcctaggggagctgttgagccttcagtgtctgcatgtgggaagtgggctccttcacctacctcacagggctgttgtgaggggcgctgtgatgcggttccaaagcacagggcttggcgcaccccactgtgctctcaataaatgtgtttcctgtcttaacaaaaa

SEQ ID NO: 366297 - DNA, 1045 bp, Homo sapiens
tggaaagagctgagtgggctgtttggctagcgtacgcgcatttgtttaaaaggaaagggtgtgtttcttggcaaagactcttcggaggaaacgctgaactggggatgggtctctacctgttctggggcctcactgcccttcctgccggggacaggcagtcactggtgggtttccccccagtggaaacacaatattttggaaatatttgtatctaggataaaacttcatctggaccaacatgtctttgttggtgttgtggcccaggtgattttaagaatgtagaatacatttggcaatttccaaacggagtgatgacctgctcctccgccccccatgccctccctgaggctggaggcttcagaagcccctgccttgggaggaggctgttctacctgagaagtctttgtccccaccgttggtgacaatcagcattgacctgtgaggcacctgccaggttcgggacgcagctttagacatccagaaaaccgggggtggaggggtggggtgggggcttaagaccccagagcttgattccttttaactgtctcatccccaaagaatggtacatgggtaccaggtaggttacttgaatcaccctgagcctcgattttcccacccgttagaaacagggtaattcatgacagtgtccgcttgggagacggctgtgacccctgagaattctcgctgcatgccgtgggctggctcgtgagactcaaggtctgggttcgaggcccccgcaaccccttctgactgtgtggcctgggcgagtttgttgtttgtaacctggaaagcgtcacacctgcctggcacggttattgtgggcttcaatgagattgtttgtgtgaaataaacgctttgtgactggcacacaggcgctctcatcccggctctcctggtgggcccggaccgctgggtgctggctgcggaggccctgtgctccctggaactgtctgcgctggtcccagggactcttgggcagagtggagggcaagggggaaagcaccagcctgctctggggagacagtggcagagggaagtgtttgct

SEQ ID NO: 366298 - DNA, 528 bp, Homo sapiens
aattagccgggcgtggtggtgggcgcctgtaatcccagctactcaggaggctgcggcaggagaatcacttgaacctggaaggcagaggttgcggtgagctgagatagcaccatccagcaggttcccagtgcccccgacaagcccctgctggtgtctccatctcctgccaagcatcctccagtgcctcctcctgtgggcctggcctcagggctatggacagactcctgtcccatcccagagacccctcgtgatcgttccctggcacgtgggccgtggcccggctgggtcggctgaagaactgcggatggaagctgcggaagaggccctgatggggcccaccatcccggacccaagtcttcttcctggcgggcctctcgtctccttcctggtttgggggtcctaagcctttgggtcccacagagcacgacttcgctccgtgaacagcaccaacccaagtctgttccatgtctccacacctgccccttccgctccataggcagctggtgggtgagtggagtcaggagagaa

SEQ ID NO: 366299 - DNA, 412 bp, Homo sapiens
gtgctggggcctcaggggtctgctcttcttctctttcagaatctggggctccaggctatgccttggctggactgaggtctgggggtgcacttattatccctggggacacctgctaagcttctccctgacaagctgtgtcactgatggatgagataatccaggcccaggttcccagggggagggaaaatggagaaaatataaaaagatgtgaaaaaggaaaaaggaaaggtaataaacaaacaaccaaagtgataaatggatagttaagggaggttgtctgaacagggattataattagtttacatacatactccttaaacagataaatacattacacctttcaaagatagagctaaggaaaggcaaaaatgaaactaaatgaaagcgaaagggaaaataaagaaaaaccaat

SEQ ID NO: 366300 - DNA, 7683 bp, Homo sapiens
atatcagggtggtttataaagcctgtaaacacacctaagaaaataaacattttacaaatgaaaaaaaaaaaaaaaaaaaaaaaaaagcagagagggagcgcgccttggctcgctggccttggcggcggctcctcaggagagctggggcgcccacgagaggatccctcacccgggtctctcctcagggatgacatcatccgtccacctccttgtcttcaaggaccacctcctctccatgctgagctgctgccaaggggcctgctgcccatctacacctcacgagggcactaggagcacggtttcctggatcccaccaacatacaaagcagccactcactgacccccaggaccaggatggcaaaggatgaagaggaccggaactgaccagccagctgtccctcttacctaaagacttaaaccaatgccctagtgagggggcattgggcattaagccctgacctttgctatgctcatactttgactctatgagtactttcctataagtctttgcttgtgttcacctgctagcaaactggagtgtttccctccccaagggggtgtcagtctttgtcgactgactctgtcatcacccttatgatgtcctgaatggaaggatccctttgggaaattctcaggagggggacctgggccaagggcttggccagcatcctgctggcaactccaaggccctgggtgggcttctggaatgagcatgctactgaatcaccaaaggcacgccccacctctctgaagatcttcctatccttttctgggggaatggggtcgatgagagcaacctcctagggttgttgtgagaattaaatgagataaaagaggcctcaggcaggatctggcatagaggaggtgatcagcaaatgtttgttgaaaaggtttgacaggtcagtcccttcccacccctcttgcttgtcttacttgtcttatttattctccaacagcactccaggcagcccttgtccacgggctctccttgcatcaggtaggggctttgcagagaccatcgacgggctgacttgagtaagaacacgaattatgcatgtggccatttccagagcactttctatgtgatatgaacatgtgatttttatgtaatatgtgtatgtaaacgaggcagcctcatttccaggtgaggatgcatttggtagtgttgatttttgtaatttaaagaagctgaaagggagagaggacccgtgaggactgaactctctgtcccatggggtagggcttacatttacattaaagaaacagaaacttgctgggaggtgtaagtatttggtcacattgctggcaacagaaggggttggagttggacccagggtgccacgctagctgccctcaccccttcttcccctctggcccagagttatactaagagtccttttatttcaaaccaaatgtttgacaatgggacagtctgtttgaaatcccagctgcctggggtggtcttggggggtctgggtggccccagtgctggtaccatgtgctggcttcaccttttaataacagtgtgaccttaaacaagtcgcttaactactctaagtttcagtttctttcatggtctaaatggagattaaaacacacacacacacacacacacacacacacacacacacacaccctcgtgtatctaccccacagggcgcttttgaagaccaaatgctgtaactactatgaaagtgctttgtaaattgctgtggaaagtgtgagctactcaagcacccgaggctgtccctccttgctcacatgtccagcccaattctcccttagtgagaacagcactcagtaggtgctgtgtgtgtttgtgttcaattaagaaattccagaataaataaaaatgaattaattcaacaaacattttctggggcaccgacaatctgcccagtgcaccaggctaggtatctgatacaaagataatgaaaacagtctcttggaacctaattggggtcctcatttgaccaggaatttctttcgtcccgttttaagccaaccagttttgtccggacaagacaaaaacaacttgggctgctttagagaagcccagctcagtgtagacaatagctgcccagcctctgaaaggggctgattggattatgtggcaaatggaggtgcaaggatgacttggacggtgacaaatgaagtgggcggagacctgctttgagttaatccaggctattaggaggggaccttttgtcttccagagactggcaggagcttttaccagtggtttttacatccttaatgttcaggacgaataatttatggtcagtgaaaatccaggccccagtgagattcgagtgggctgtaaaatcgagagtcctgctcccagtgagtaatggtagtgaatgtttctgtcactttttgcaaccgtccattcatttgatcctcacaactccctgtcctgagccaggaccggccactgccactcccagggaaacagaggctgtcaagaggctccacagattgggccccactggatcattgaacccctgttccctgagttctagaggaagaattgtacctgtctcagtcccggccacctccagaaggcctccctctgcatttctgactttgctgtgccggcagcctggagcctcccaggtccctgctgtcatcttttctagccactacagtctctgtctttcctttcacagccccaagcttcttgaaaggcctgtctacacttgctgtcttccttcctcacctccaatttcctcttcaacccactgcttcctgactcgctctactccgtggaagcacgctcacaaaggtaaagacttttctgtggcttaatccttgtcatgttttcggctcatggacacaaggacacattttcatgccttctctcacagggctctgcgtctccggttcacttctgtgtctttacactcccttcacagagacacttgctcccccttctctcgttcttagcatcccctaggaacttgcacacccaggtctctcgacttctggacctgcttcttaccatgccgtcttaagcagtcaggagtcgctgcctgggttcgagtcctagttaaattacttagtgctgagaccttggggtaggtaaacttttccaagccaggtttatctcagtttcaaaatagggttaatcgtctttatctggcaggtcaggtgggatgtctcacaggtaagcaccagatgccatttgaaaggcttgaagcaaagtcaataaagcattcatgggaaaatacaactggaggcaccactagattttcgtatacattaggttcccacggggaggaccgaagagagaagaaagaagtggaaagggaggagcgtgcaggagagacaggagaagagaataactaaacaaagacattaaagacaaaaaaaaagtaggaaagggagacttagaaaatattaaaagccaccaaaaacacatccaaagacggtttccccttacgttagttgggctaaaagaaagcaaatgggaagaaggttttaaattgattatcccagtgacaaatcccaggaagctttcacatcaaatcaccctattctgggtttttaactccttccatcgagtttaacctctttacctcccacatcctggtaaaccctgccccctccctaccgccccctttgctggtgattaaatcctgaaggtacacgaagtatttcagtgaatgaatggctaacagaaaagggcctcccctcccccttaccctggcggtgtttttcagttttattccactttccgcccttttcccttaatgaacacagggctaatctcgggccttgtcgaaggaagaggctgcagacgttaatgaggttagctgctggattccagtattcgtcgcataaggatccttctttgtctgcgaaggaaaaacacactgattatcataatgagtaatgaggtgaactggccaccgccgggccggggcgatgtggcttcttaagccacacttctaattttggtgatggagccgacatttctttggcttctcatttaagtctttgcctctgtcccagtgcgaagtccattcagcggggttgaaagttgcaggcagctttgggaaggggggcgtcggacagggttgcattgtagaaagtggctttgttcgatccttcgcacagatgcaaatggccagagcattcattccctttcttcaagagctgaggactgggggggccactggtgatcagttcccaactctagctctcctctgactcatctcaggacccattgaggacatccaaaactcactcaagatcaccaagtggtaggaaagtactaactcctgggcatagccctaggggagtgactacaatgtgaatactcatggaatgcctagccaggtgaagaagtgaatgcatgttggcatcccagagggaccccccttaagagggcatagtttggggttcagatttgactccagcatactgttgaaattgggcacagggggctagtgattagtcaggatcaatcagtggagaggagattaaaactcacatctgggagtccggaatcagaacttgtagttcttttttttgaaatggagtctcgctctgtcgcccaggctggagtgcagtggcgtgatctcggctcactgcaacctctgccttccgggttcaagcaattctcccacctcagcctcctgagtagctgggattacaggcgcccaccaccacagccggctactttttgtatttttaggagagacggggtttcaccatgttggtcaggctggtcttgaactcctgacctcatgatccacctgccttagcctcccaaagtgctgggattacaggcgtgagccaccatgcccagccctatagtagttcttcttttgccccttaatatcctcacccacatgtcctgtaccctgcctgaaccctcctcctctttttgttctgatctttgagctccctagagcccataattctttagagcaggtatgtcccgagtctgaaacatgcccttatttgtcccaagctctggacatttctcaccccaaggcggatcaatcatgattaaatcactccaattaaactttaggctccagtcagaccttcagccaaatggaaaaaaaaactaggggataagggaggtagttggagcaagaaaatgttattagttgaaaccttacgggaccttcctcccttagtgagtctgttggctaaaggttctctggcttcgtgaattagaatcggatactgtttccaagttagcaaaaccaactctaccccagcaccccacgaggaagaatgtggaaggatctcccattggccggttggggcaaaagcctgaggcaatctttcatccccttttgccaaggcgagactttcccagtgacggtgatgtagttggccactctgactatgggtggactcgggtgtagacctctgaagctgagatcacacgaaaacctggcctccccgccatgtagctgttggagagtagaaaaatagagcacgcctgatgtttctaaatgagaagactttcaatagtaatgaagaatccatggcactctcctcaccctcaaacacatggcagtcattcacatacaggccccaaagccactgttagtgctgcagtagctcctgtggacattggaaagcccggagagggcgtggaagaaatcagctggcccccggcaggttctctggggttttgtgcccaaggctcctggagccctaaaaactttcaaaagttaactccccacgtccccatcctgcttgggtttctggacttttctgaggcaccggcagaggggtctcgttgctcccttgagtgtaggggcagccctttaacctggctccttgagtccctgctttttctgcttctgttgccttcttcctcgtcttcctctctctcaatatctccctctctttgtccctccccagttcctgacctggccatcccggggtgcccttgaccagccccgtgtctcctcagggtgtcccagcaccagcctggcacagagtggggctcagttagagtatgtgggatgttggtttcgccaggtgagtgaatgaaaggactcgaccaccacagctgagccactagctgggccatgcgaagagttctaggtgcaaaggctggagggtggaattcatttttgagaggtgtgtgagcagcttccgacccctgccccatttgaacgggggccttgctggtcgcgtccctgcattcacccgcgcggccatcccgtcatccaacagttgatcctaactgagcacgcccacggccctggtctggcctgggcaccggccaccgtagcccatcccttgatggcctctgtgtccccaggagggcgggccggggggttgcccaggggctggagcagtggactgtggctccatagaggtaggccggagggtgtgagggcagattcaagctatccccagggctctgctctggtcggagccagccccttctccctctctgccttccccgccccattcctgatgctgaactgttctggacccctggccctgagtctctcaggaccaaagtgggcacgggaacagctgtagtgtgtgcccccccgggctttggccacaggtctccctctcgaggtgtggttgtgactgcgacccttcccttgccgtgatgccttcctcccccggggcttggtccagctccttcactctctagcagctgctggggcccacctcccatgccgaggaccagcaggggaaacctccagggagcatctgcaggctctgcttctgcccggctgctggcttgctctccctggtggctctccagcggccagcttcctcacccacccggcactctgctttgctctgtctcctgaggtgggcctgaccaacctccccttctctgcctcagtccctgggctccagggctcagctccacagccctctgcctagcaggctggttctccctgccaagcccatacctgtggtcacctggccctcctgtggtctgagtaccactcccctgccccaggagccactcccactccagctgcctgtttccagcaggttcccagtgcccccgacaagcccctgctggtgtctccatctcctgccaagcatcctccagtgcctcctcctgtgggcctggcctcagggctatggacagactcctgtcccatcccagagacccctcgtgatcgttccctggcacgtgggccgtggcccggctgggtcggctgaagaactgcggatggaagctgcggaagaggccctgatggggcccaccatcccggacccaagtcttcttcctggcgggcctctcgtctccttcctggtttgggcggaagccatcacctggatgcctacgtgggaagggacctcgaatgtgggaccccagcccctctccagctcgaaatccctccacagccacggggacaccctgcacctattcccacgggacaggctggacccagagactctggacccggggcctccccttgagtagagacccgccctctgactgatggacgccgctgacctggggtcagacccgtgggctggacccctgcccaccccgcaggaaccctgaggcctaggggagctgttgagccttcagtgtctgcatgtgggaagtgggctccttcacctacctcacagggctgttgtgaggggcgctgtgatgcggttccaaagcacagggcttggcgcaccccactgtgctctcaataaatgtgtttcctgtcttaacaaaaa

SEQ ID NO: 366301 - DNA, 7558 bp, Homo sapiens
atatcagggtggtttataaagcctgtaaacacacctaagaaaataaacattttacaaatgaaaaaaaaaaaaaaaaaaaaaaaaaagcagagagggagcgcgccttggctcgctggccttggcggcggctcctcaggagagctggggcgcccacgagaggatccctcacccgggtctctcctcagggatgacatcatccgtccacctccttgtcttcaaggaccacctcctctccatgctgagctgctgccaaggggcctgctgcccatctacacctcacgagggcactaggagcacggtttcctggatcccaccaacatacaaagcagccactcactgacccccaggaccaggatggcaaaggatgaagaggaccggaactgaccagccagctgtccctcttacctaaagacttaaaccaatgccctagtgagggggcattgggcattaagccctgacctttgctatgctcatactttgactctatgagtactttcctataagtctttgcttgtgttcacctgctagcaaactggagtgtttccctccccaagggggtgtcagtctttgtcgactgactctgtcatcacccttatgatgtcctgaatggaaggatccctttgggaaattctcaggagggggacctgggccaagggcttggccagcatcctgctggcaactccaaggccctgggtgggcttctggaatgagcatgctactgaatcaccaaaggcacgccccacctctctgaagatcttcctatccttttctgggggaatggggtcgatgagagcaacctcctagggttgttgtgagaattaaatgagataaaagaggcctcaggcaggatctggcatagaggaggtgatcagcaaatgtttgttgaaaaggtttgacaggtcagtcccttcccacccctcttgcttgtcttacttgtcttatttattctccaacagcactccaggcagcccttgtccacgggctctccttgcatcaggtaggggctttgcagagaccatcgacgggctgacttgagtaagaacacgaattatgcatgtggccatttccagagcactttctatgtgatatgaacatgtgatttttatgtaatatgtgtatgtaaacgaggcagcctcatttccaggtgaggatgcatttggtagtgttgatttttgtaatttaaagaagctgaaagggagagaggacccgtgaggactgaactctctgtcccatggggtagggcttacatttacattaaagaaacagaaacttgctgggaggtgtaagtatttggtcacattgctggcaacagaaggggttggagttggacccagggtgccacgctagctgccctcaccccttcttcccctctggcccagagttatactaagagtccttttatttcaaaccaaatgtttgacaatgggacagtctgtttgaaatcccagctgcctggggtggtcttggggggtctgggtggccccagtgctggtaccatgtgctggcttcaccttttaataacagtgtgaccttaaacaagtcgcttaactactctaagtttcagtttctttcatggtctaaatggagattaaaacacacacacacacacacacacacacacacacacacacacaccctcgtgtatctaccccacagggcgcttttgaagaccaaatgctgtaactactatgaaagtgctttgtaaattgctgtggaaagtgtgagctactcaagcacccgaggctgtccctccttgctcacatgtccagcccaattctcccttagtgagaacagcactcagtaggtgctgtgtgtgtttgtgttcaattaagaaattccagaataaataaaaatgaattaattcaacaaacattttctggggcaccgacaatctgcccagtgcaccaggctaggtatctgatacaaagataatgaaaacagtctcttggaacctaattggggtcctcatttgaccaggaatttctttcgtcccgttttaagccaaccagttttgtccggacaagacaaaaacaacttgggctgctttagagaagcccagctcagtgtagacaatagctgcccagcctctgaaaggggctgattggattatgtggcaaatggaggtgcaaggatgacttggacggtgacaaatgaagtgggcggagacctgctttgagttaatccaggctattaggaggggaccttttgtcttccagagactggcaggagcttttaccagtggtttttacatccttaatgttcaggacgaataatttatggtcagtgaaaatccaggccccagtgagattcgagtgggctgtaaaatcgagagtcctgctcccagtgagtaatggtagtgaatgtttctgtcactttttgcaaccgtccattcatttgatcctcacaactccctgtcctgagccaggaccggccactgccactcccagggaaacagaggctgtcaagaggctccacagattgggccccactggatcattgaacccctgttccctgagttctagaggaagaattgtacctgtctcagtcccggccacctccagaaggcctccctctgcatttctgactttgctgtgccggcagcctggagcctcccaggtccctgctgtcatcttttctagccactacagtctctgtctttcctttcacagccccaagcttcttgaaaggcctgtctacacttgctgtcttccttcctcacctccaatttcctcttcaacccactgcttcctgactcgctctactccgtggaagcacgctcacaaaggtaaagacttttctgtggcttaatccttgtcatgttttcggctcatggacacaaggacacattttcatgccttctctcacagggctctgcgtctccggttcacttctgtgtctttacactcccttcacagagacacttgctcccccttctctcgttcttagcatcccctaggaacttgcacacccaggtctctcgacttctggacctgcttcttaccatgccgtcttaagcagtcaggagtcgctgcctgggttcgagtcctagttaaattacttagtgctgagaccttggggtaggtaaacttttccaagccaggtttatctcagtttcaaaatagggttaatcgtctttatctggcaggtcaggtgggatgtctcacaggtaagcaccagatgccatttgaaaggcttgaagcaaagtcaataaagcattcatgggaaaatacaactggaggcaccactagattttcgtatacattaggttcccacggggaggaccgaagagagaagaaagaagtggaaagggaggagcgtgcaggagagacaggagaagagaataactaaacaaagacattaaagacaaaaaaaaagtaggaaagggagacttagaaaatattaaaagccaccaaaaacacatccaaagacggtttccccttacgttagttgggctaaaagaaagcaaatgggaagaaggttttaaattgattatcccagtgacaaatcccaggaagctttcacatcaaatcaccctattctgggtttttaactccttccatcgagtttaacctctttacctcccacatcctggtaaaccctgccccctccctaccgccccctttgctggtgattaaatcctgaaggtacacgaagtatttcagtgaatgaatggctaacagaaaagggcctcccctcccccttaccctggcggtgtttttcagttttattccactttccgcccttttcccttaatgaacacagggctaatctcgggccttgtcgaaggaagaggctgcagacgttaatgaggttagctgctggattccagtattcgtcgcataaggatccttctttgtctgcgaaggaaaaacacactgattatcataatgagtaatgaggtgaactggccaccgccgggccggggcgatgtggcttcttaagccacacttctaattttggtgatggagccgacatttctttggcttctcatttaagtctttgcctctgtcccagtgcgaagtccattcagcggggttgaaagttgcaggcagctttgggaaggggggcgtcggacagggttgcattgtagaaagtggctttgttcgatccttcgcacagatgcaaatggccagagcattcattccctttcttcaagagctgaggactgggggggccactggtgatcagttcccaactctagctctcctctgactcatctcaggacccattgaggacatccaaaactcactcaagatcaccaagtggtaggaaagtactaactcctgggcatagccctaggggagtgactacaatgtgaatactcatggaatgcctagccaggtgaagaagtgaatgcatgttggcatcccagagggaccccccttaagagggcatagtttggggttcagatttgactccagcatactgttgaaattgggcacagggggctagtgattagtcaggatcaatcagtggagaggagattaaaactcacatctgggagtccggaatcagaacttgtagttcttttttttgaaatggagtctcgctctgtcgcccaggctggagtgcagtggcgtgatctcggctcactgcaacctctgccttccgggttcaagcaattctcccacctcagcctcctgagtagctgggattacaggcgcccaccaccacagccggctactttttgtatttttaggagagacggggtttcaccatgttggtcaggctggtcttgaactcctgacctcatgatccacctgccttagcctcccaaagtgctgggattacaggcgtgagccaccatgcccagccctatagtagttcttcttttgccccttaatatcctcacccacatgtcctgtaccctgcctgaaccctcctcctctttttgttctgatctttgagctccctagagcccataattctttagagcaggtatgtcccgagtctgaaacatgcccttatttgtcccaagctctggacatttctcaccccaaggcggatcaatcatgactcccttagtgagtctgttggctaaaggttctctggcttcgtgaattagaatcggatactgtttccaagttagcaaaaccaactctaccccagcaccccacgaggaagaatgtggaaggatctcccattggccggttggggcaaaagcctgaggcaatctttcatccccttttgccaaggcgagactttcccagtgacggtgatgtagttggccactctgactatgggtggactcgggtgtagacctctgaagctgagatcacacgaaaacctggcctccccgccatgtagctgttggagagtagaaaaatagagcacgcctgatgtttctaaatgagaagactttcaatagtaatgaagaatccatggcactctcctcaccctcaaacacatggcagtcattcacatacaggccccaaagccactgttagtgctgcagtagctcctgtggacattggaaagcccggagagggcgtggaagaaatcagctggcccccggcaggttctctggggttttgtgcccaaggctcctggagccctaaaaactttcaaaagttaactccccacgtccccatcctgcttgggtttctggacttttctgaggcaccggcagaggggtctcgttgctcccttgagtgtaggggcagccctttaacctggctccttgagtccctgctttttctgcttctgttgccttcttcctcgtcttcctctctctcaatatctccctctctttgtccctccccagttcctgacctggccatcccggggtgcccttgaccagccccgtgtctcctcagggtgtcccagcaccagcctggcacagagtggggctcagttagagtatgtgggatgttggtttcgccaggtgagtgaatgaaaggactcgaccaccacagctgagccactagctgggccatgcgaagagttctaggtgcaaaggctggagggtggaattcatttttgagaggtgtgtgagcagcttccgacccctgccccatttgaacgggggccttgctggtcgcgtccctgcattcacccgcgcggccatcccgtcatccaacagttgatcctaactgagcacgcccacggccctggtctggcctgggcaccggccaccgtagcccatcccttgatggcctctgtgtccccaggagggcgggccggggggttgcccaggggctggagcagtggactgtggctccatagaggtaggccggagggtgtgagggcagattcaagctatccccagggctctgctctggtcggagccagccccttctccctctctgccttccccgccccattcctgatgctgaactgttctggacccctggccctgagtctctcaggaccaaagtgggcacgggaacagctgtagtgtgtgcccccccgggctttggccacaggtctccctctcgaggtgtggttgtgactgcgacccttcccttgccgtgatgccttcctcccccggggcttggtccagctccttcactctctagcagctgctggggcccacctcccatgccgaggaccagcaggggaaacctccagggagcatctgcaggctctgcttctgcccggctgctggcttgctctccctggtggctctccagcggccagcttcctcacccacccggcactctgctttgctctgtctcctgaggtgggcctgaccaacctccccttctctgcctcagtccctgggctccagggctcagctccacagccctctgcctagcaggctggttctccctgccaagcccatacctgtggtcacctggccctcctgtggtctgagtaccactcccctgccccaggagccactcccactccagctgcctgtttccagcaggttcccagtgcccccgacaagcccctgctggtgtctccatctcctgccaagcatcctccagtgcctcctcctgtgggcctggcctcagggctatggacagactcctgtcccatcccagagacccctcgtgatcgttccctggcacgtgggccgtggcccggctgggtcggctgaagaactgcggatggaagctgcggaagaggccctgatggggcccaccatcccggacccaagtcttcttcctggcgggcctctcgtctccttcctggtttgggcggaagccatcacctggatgcctacgtgggaagggacctcgaatgtgggaccccagcccctctccagctcgaaatccctccacagccacggggacaccctgcacctattcccacgggacaggctggacccagagactctggacccggggcctccccttgagtagagacccgccctctgactgatggacgccgctgacctggggtcagacccgtgggctggacccctgcccaccccgcaggaaccctgaggcctaggggagctgttgagccttcagtgtctgcatgtgggaagtgggctccttcacctacctcacagggctgttgtgaggggcgctgtgatgcggttccaaagcacagggcttggcgcaccccactgtgctctcaataaatgtgtttcctgtcttaacaaaaa

SEQ ID NO: 366302 - DNA, 7629 bp, Homo sapiens
atatcagggtggtttataaagcctgtaaacacacctaagaaaataaacattttacaaatgaaaaaaaaaaaaaaaaaaaaaaaaaagcagagagggagcgcgccttggctcgctggccttggcggcggctcctcaggagagctggggcgcccacgagaggatccctcacccgggtctctcctcagggatgacatcatccgtccacctccttgtcttcaaggaccacctcctctccatgctgagctgctgccaaggggcctgctgcccatctacacctcacgagggcactaggagcacggtttcctggatcccaccaacatacaaagcagccactcactgacccccaggaccaggatggcaaaggatgaagaggaccggaactgaccagccagctgtccctcttacctaaagacttaaaccaatgccctagtgagggggcattgggcattaagccctgacctttgctatgctcatactttgactctatgagtactttcctataagtctttgcttgtgttcacctgctagcaaactggagtgtttccctccccaagggggtgtcagtctttgtcgactgactctgtcatcacccttatgatgtcctgaatggaaggatccctttgggaaattctcaggagggggacctgggccaagggcttggccagcatcctgctggcaactccaaggccctgggtgggcttctggaatgagcatgctactgaatcaccaaaggcacgccccacctctctgaagatcttcctatccttttctgggggaatggggtcgatgagagcaacctcctagggttgttgtgagaattaaatgagataaaagaggcctcaggcaggatctggcatagaggaggtgatcagcaaatgtttgttgaaaaggtttgacaggtcagtcccttcccacccctcttgcttgtcttacttgtcttatttattctccaacagcactccaggcagcccttgtccacgggctctccttgcatcaggtaggggctttgcagagaccatcgacgggctgacttgagtaagaacacgaattatgcatgtggccatttccagagcactttctatgtgatatgaacatgtgatttttatgtaatatgtgtatgtaaacgaggcagcctcatttccaggtgaggatgcatttggtagtgttgatttttgtaatttaaagaagctgaaagggagagaggacccgtgaggactgaactctctgtcccatggggtagggcttacatttacattaaagaaacagaaacttgctgggaggtgtaagtatttggtcacattgctggcaacagaaggggttggagttggacccagggtgccacgctagctgccctcaccccttcttcccctctggcccagagttatactaagagtccttttatttcaaaccaaatgtttgacaatgggacagtctgtttgaaatcccagctgcctggggtggtcttggggggtctgggtggccccagtgctggtaccatgtgctggcttcaccttttaataacagtgtgaccttaaacaagtcgcttaactactctaagtttcagtttctttcatggtctaaatggagattaaaacacacacacacacacacacacacacacacacacacacacaccctcgtgtatctaccccacagggcgcttttgaagaccaaatgctgtaactactatgaaagtgctttgtaaattgctgtggaaagtgtgagctactcaagcacccgaggctgtccctccttgctcacatgtccagcccaattctcccttagtgagaacagcactcagtaggtgctgtgtgtgtttgtgttcaattaagaaattccagaataaataaaaatgaattaattcaacaaacattttctggggcaccgacaatctgcccagtgcaccaggctaggtatctgatacaaagataatgaaaacagtctcttggaacctaattggggtcctcatttgaccaggaatttctttcgtcccgttttaagccaaccagttttgtccggacaagacaaaaacaacttgggctgctttagagaagcccagctcagtgtagacaatagctgcccagcctctgaaaggggctgattggattatgtggcaaatggaggtgcaaggatgacttggacggtgacaaatgaagtgggcggagacctgctttgagttaatccaggctattaggaggggaccttttgtcttccagagactggcaggagcttttaccagtggtttttacatccttaatgttcaggacgaataatttatggtcagtgaaaatccaggccccagtgagattcgagtgggcttttttgcaaccgtccattcatttgatcctcacaactccctgtcctgagccaggaccggccactgccactcccagggaaacagaggctgtcaagaggctccacagattgggccccactggatcattgaacccctgttccctgagttctagaggaagaattgtacctgtctcagtcccggccacctccagaaggcctccctctgcatttctgactttgctgtgccggcagcctggagcctcccaggtccctgctgtcatcttttctagccactacagtctctgtctttcctttcacagccccaagcttcttgaaaggcctgtctacacttgctgtcttccttcctcacctccaatttcctcttcaacccactgcttcctgactcgctctactccgtggaagcacgctcacaaaggtaaagacttttctgtggcttaatccttgtcatgttttcggctcatggacacaaggacacattttcatgccttctctcacagggctctgcgtctccggttcacttctgtgtctttacactcccttcacagagacacttgctcccccttctctcgttcttagcatcccctaggaacttgcacacccaggtctctcgacttctggacctgcttcttaccatgccgtcttaagcagtcaggagtcgctgcctgggttcgagtcctagttaaattacttagtgctgagaccttggggtaggtaaacttttccaagccaggtttatctcagtttcaaaatagggttaatcgtctttatctggcaggtcaggtgggatgtctcacaggtaagcaccagatgccatttgaaaggcttgaagcaaagtcaataaagcattcatgggaaaatacaactggaggcaccactagattttcgtatacattaggttcccacggggaggaccgaagagagaagaaagaagtggaaagggaggagcgtgcaggagagacaggagaagagaataactaaacaaagacattaaagacaaaaaaaaagtaggaaagggagacttagaaaatattaaaagccaccaaaaacacatccaaagacggtttccccttacgttagttgggctaaaagaaagcaaatgggaagaaggttttaaattgattatcccagtgacaaatcccaggaagctttcacatcaaatcaccctattctgggtttttaactccttccatcgagtttaacctctttacctcccacatcctggtaaaccctgccccctccctaccgccccctttgctggtgattaaatcctgaaggtacacgaagtatttcagtgaatgaatggctaacagaaaagggcctcccctcccccttaccctggcggtgtttttcagttttattccactttccgcccttttcccttaatgaacacagggctaatctcgggccttgtcgaaggaagaggctgcagacgttaatgaggttagctgctggattccagtattcgtcgcataaggatccttctttgtctgcgaaggaaaaacacactgattatcataatgagtaatgaggtgaactggccaccgccgggccggggcgatgtggcttcttaagccacacttctaattttggtgatggagccgacatttctttggcttctcatttaagtctttgcctctgtcccagtgcgaagtccattcagcggggttgaaagttgcaggcagctttgggaaggggggcgtcggacagggttgcattgtagaaagtggctttgttcgatccttcgcacagatgcaaatggccagagcattcattccctttcttcaagagctgaggactgggggggccactggtgatcagttcccaactctagctctcctctgactcatctcaggacccattgaggacatccaaaactcactcaagatcaccaagtggtaggaaagtactaactcctgggcatagccctaggggagtgactacaatgtgaatactcatggaatgcctagccaggtgaagaagtgaatgcatgttggcatcccagagggaccccccttaagagggcatagtttggggttcagatttgactccagcatactgttgaaattgggcacagggggctagtgattagtcaggatcaatcagtggagaggagattaaaactcacatctgggagtccggaatcagaacttgtagttcttttttttgaaatggagtctcgctctgtcgcccaggctggagtgcagtggcgtgatctcggctcactgcaacctctgccttccgggttcaagcaattctcccacctcagcctcctgagtagctgggattacaggcgcccaccaccacagccggctactttttgtatttttaggagagacggggtttcaccatgttggtcaggctggtcttgaactcctgacctcatgatccacctgccttagcctcccaaagtgctgggattacaggcgtgagccaccatgcccagccctatagtagttcttcttttgccccttaatatcctcacccacatgtcctgtaccctgcctgaaccctcctcctctttttgttctgatctttgagctccctagagcccataattctttagagcaggtatgtcccgagtctgaaacatgcccttatttgtcccaagctctggacatttctcaccccaaggcggatcaatcatgattaaatcactccaattaaactttaggctccagtcagaccttcagccaaatggaaaaaaaaactaggggataagggaggtagttggagcaagaaaatgttattagttgaaaccttacgggaccttcctcccttagtgagtctgttggctaaaggttctctggcttcgtgaattagaatcggatactgtttccaagttagcaaaaccaactctaccccagcaccccacgaggaagaatgtggaaggatctcccattggccggttggggcaaaagcctgaggcaatctttcatccccttttgccaaggcgagactttcccagtgacggtgatgtagttggccactctgactatgggtggactcgggtgtagacctctgaagctgagatcacacgaaaacctggcctccccgccatgtagctgttggagagtagaaaaatagagcacgcctgatgtttctaaatgagaagactttcaatagtaatgaagaatccatggcactctcctcaccctcaaacacatggcagtcattcacatacaggccccaaagccactgttagtgctgcagtagctcctgtggacattggaaagcccggagagggcgtggaagaaatcagctggcccccggcaggttctctggggttttgtgcccaaggctcctggagccctaaaaactttcaaaagttaactccccacgtccccatcctgcttgggtttctggacttttctgaggcaccggcagaggggtctcgttgctcccttgagtgtaggggcagccctttaacctggctccttgagtccctgctttttctgcttctgttgccttcttcctcgtcttcctctctctcaatatctccctctctttgtccctccccagttcctgacctggccatcccggggtgcccttgaccagccccgtgtctcctcagggtgtcccagcaccagcctggcacagagtggggctcagttagagtatgtgggatgttggtttcgccaggtgagtgaatgaaaggactcgaccaccacagctgagccactagctgggccatgcgaagagttctaggtgcaaaggctggagggtggaattcatttttgagaggtgtgtgagcagcttccgacccctgccccatttgaacgggggccttgctggtcgcgtccctgcattcacccgcgcggccatcccgtcatccaacagttgatcctaactgagcacgcccacggccctggtctggcctgggcaccggccaccgtagcccatcccttgatggcctctgtgtccccaggagggcgggccggggggttgcccaggggctggagcagtggactgtggctccatagaggtaggccggagggtgtgagggcagattcaagctatccccagggctctgctctggtcggagccagccccttctccctctctgccttccccgccccattcctgatgctgaactgttctggacccctggccctgagtctctcaggaccaaagtgggcacgggaacagctgtagtgtgtgcccccccgggctttggccacaggtctccctctcgaggtgtggttgtgactgcgacccttcccttgccgtgatgccttcctcccccggggcttggtccagctccttcactctctagcagctgctggggcccacctcccatgccgaggaccagcaggggaaacctccagggagcatctgcaggctctgcttctgcccggctgctggcttgctctccctggtggctctccagcggccagcttcctcacccacccggcactctgctttgctctgtctcctgaggtgggcctgaccaacctccccttctctgcctcagtccctgggctccagggctcagctccacagccctctgcctagcaggctggttctccctgccaagcccatacctgtggtcacctggccctcctgtggtctgagtaccactcccctgccccaggagccactcccactccagctgcctgtttccagcaggttcccagtgcccccgacaagcccctgctggtgtctccatctcctgccaagcatcctccagtgcctcctcctgtgggcctggcctcagggctatggacagactcctgtcccatcccagagacccctcgtgatcgttccctggcacgtgggccgtggcccggctgggtcggctgaagaactgcggatggaagctgcggaagaggccctgatggggcccaccatcccggacccaagtcttcttcctggcgggcctctcgtctccttcctggtttgggcggaagccatcacctggatgcctacgtgggaagggacctcgaatgtgggaccccagcccctctccagctcgaaatccctccacagccacggggacaccctgcacctattcccacgggacaggctggacccagagactctggacccggggcctccccttgagtagagacccgccctctgactgatggacgccgctgacctggggtcagacccgtgggctggacccctgcccaccccgcaggaaccctgaggcctaggggagctgttgagccttcagtgtctgcatgtgggaagtgggctccttcacctacctcacagggctgttgtgaggggcgctgtgatgcggttccaaagcacagggcttggcgcaccccactgtgctctcaataaatgtgtttcctgtcttaacaaaaa

SEQ ID NO: 366303 - DNA, 7656 bp, Homo sapiens
atatcagggtggtttataaagcctgtaaacacacctaagaaaataaacattttacaaatgaaaaaaaaaaaaaaaaaaaaaaaaaagcagagagggagcgcgccttggctcgctggccttggcggcggctcctcaggagagctggggcgcccacgagaggatccctcacccgggtctctcctcagggatgacatcatccgtccacctccttgtcttcaaggaccacctcctctccatgctgagctgctgccaaggggcctgctgcccatctacacctcacgagggcactaggagcacggtttcctggatcccaccaacatacaaagcagccactcactgacccccaggaccaggatggcaaaggatgaagaggaccggaactgaccagccagctgtccctcttacctaaagacttaaaccaatgccctagtgagggggcattgggcattaagccctgacctttgctatgctcatactttgactctatgagtactttcctataagtctttgcttgtgttcacctgctagcaaactggagtgtttccctccccaagggggtgtcagtctttgtcgactgactctgtcatcacccttatgatgtcctgaatggaaggatccctttgggaaattctcaggagggggacctgggccaagggcttggccagcatcctgctggcaactccaaggccctgggtgggcttctggaatgagcatgctactgaatcaccaaaggcacgccccacctctctgaagatcttcctatccttttctgggggaatggggtcgatgagagcaacctcctagggttgttgtgagaattaaatgagataaaagaggcctcaggcaggatctggcatagaggaggtgatcagcaaatgtttgttgaaaaggtttgacaggtcagtcccttcccacccctcttgcttgtcttacttgtcttatttattctccaacagcactccaggcagcccttgtccacgggctctccttgcatcaggtaggggctttgcagagaccatcgacgggctgacttgagtaagaacacgaattatgcatgtggccatttccagagcactttctatgtgatatgaacatgtgatttttatgtaatatgtgtatgtaaacgaggcagcctcatttccaggtgaggatgcatttggtagtgttgatttttgtaatttaaagaagctgaaagggagagaggacccgtgaggactgaactctctgtcccatggggtagggcttacatttacattaaagaaacagaaacttgctgggaggtgtaagtatttggtcacattgctggcaacagaaggggttggagttggacccagggtgccacgctagctgccctcaccccttcttcccctctggcccagagttatactaagagtccttttatttcaaaccaaatgtttgacaatgggacagtctgtttgaaatcccagctgcctggggtggtcttggggggtctgggtggccccagtgctggtaccatgtgctggcttcaccttttaataacagtgtgaccttaaacaagtcgcttaactactctaagtttcagtttctttcatggtctaaatggagattaaaacacacacacacacacacacacacacacacacacacacacaccctcgtgtatctaccccacagggcgcttttgaagaccaaatgctgtaactactatgaaagtgctttgtaaattgctgtggaaagtgtgagctactcaagcacccgaggctgtccctccttgctcacatgtccagcccaattctcccttagtgagaacagcactcagtaggtgctgtgtgtgtttgtgttcaattaagaaattccagaataaataaaaatgaattaattcaacaaacattttctggggcaccgacaatctgcccagtgcaccaggctaggtatctgatacaaagataatgaaaacagtctcttggaacctaattggggtcctcatttgaccaggaatttctttcgtcccgttttaagccaaccagttttgtccggacaagacaaaaacaacttgggctgctttagagaagcccagctcagtgtagacaatagctgcccagcctctgaaaggggctgattggattatgtggcaaatggaggtgcaaggatgacttggacggtgacaaatgaagtgggcggagacctgctttgagttaatccaggctattaggaggggaccttttgtcttccagagactggcaggagcttttaccagtggtttttacatccttaatgttcaggacgaataatttatggtcagtgaaaatccaggccccagtgagattcgagtgggctgtaaaatcgagagtcctgctcccagtgagtaatggtagtgaatgtttctgtcactttttgcaaccgtccattcatttgatcctcacaactccctgtcctgagccaggaccggccactgccactcccagggaaacagaggctgtcaagaggctccacagattgggccccactggatcattgaacccctgttccctgagttctagaggaagaattgtacctgtctcagtcccggccacctccagaaggcctccctctgcatttctgactttgctgtgccggcagcctggagcctcccaggtccctgctgtcatcttttctagccactacagtctctgtctttcctttcacagccccaagcttcttgaaaggcctgtctacacttgctgtcttccttcctcacctccaatttcctcttcaacccactgcttcctgactcgctctactccgtggaagcacgctcacaaaggtaaagacttttctgtggcttaatccttgtcatgttttcggctcatggacacaaggacacattttcatgccttctctcacagggctctgcgtctccggttcacttctgtgtctttacactcccttcacagagacacttgctcccccttctctcgttcttagcatcccctaggaacttgcacacccaggtctctcgacttctggacctgcttcttaccatgccgtcttaagcagtcaggagtcgctgcctgggttcgagtcctagttaaattacttagtgctgagaccttggggtaggtaaacttttccaagccaggtttatctcagtttcaaaatagggttaatcgtctttatctggcaggtcaggtgggatgtctcacaggtaagcaccagatgccatttgaaaggcttgaagcaaagtcaataaagcattcatgggaaaatacaactggaggcaccactagattttcgtatacattaggttcccacggggaggaccgaagagagaagaaagaagtggaaagggaggagcgtgcaggagagacaggagaagagaataactaaacaaagacattaaagacaaaaaaaaagtaggaaagggagacttagaaaatattaaaagccaccaaaaacacatccaaagacggtttccccttacgttagttgggctaaaagaaagcaaatgggaagaaggttttaaattgattatcccagtgacaaatcccaggaagctttcacatcaaatcaccctattctgggtttttaactccttccatcgagtttaacctctttacctccctaccgccccctttgctggtgattaaatcctgaaggtacacgaagtatttcagtgaatgaatggctaacagaaaagggcctcccctcccccttaccctggcggtgtttttcagttttattccactttccgcccttttcccttaatgaacacagggctaatctcgggccttgtcgaaggaagaggctgcagacgttaatgaggttagctgctggattccagtattcgtcgcataaggatccttctttgtctgcgaaggaaaaacacactgattatcataatgagtaatgaggtgaactggccaccgccgggccggggcgatgtggcttcttaagccacacttctaattttggtgatggagccgacatttctttggcttctcatttaagtctttgcctctgtcccagtgcgaagtccattcagcggggttgaaagttgcaggcagctttgggaaggggggcgtcggacagggttgcattgtagaaagtggctttgttcgatccttcgcacagatgcaaatggccagagcattcattccctttcttcaagagctgaggactgggggggccactggtgatcagttcccaactctagctctcctctgactcatctcaggacccattgaggacatccaaaactcactcaagatcaccaagtggtaggaaagtactaactcctgggcatagccctaggggagtgactacaatgtgaatactcatggaatgcctagccaggtgaagaagtgaatgcatgttggcatcccagagggaccccccttaagagggcatagtttggggttcagatttgactccagcatactgttgaaattgggcacagggggctagtgattagtcaggatcaatcagtggagaggagattaaaactcacatctgggagtccggaatcagaacttgtagttcttttttttgaaatggagtctcgctctgtcgcccaggctggagtgcagtggcgtgatctcggctcactgcaacctctgccttccgggttcaagcaattctcccacctcagcctcctgagtagctgggattacaggcgcccaccaccacagccggctactttttgtatttttaggagagacggggtttcaccatgttggtcaggctggtcttgaactcctgacctcatgatccacctgccttagcctcccaaagtgctgggattacaggcgtgagccaccatgcccagccctatagtagttcttcttttgccccttaatatcctcacccacatgtcctgtaccctgcctgaaccctcctcctctttttgttctgatctttgagctccctagagcccataattctttagagcaggtatgtcccgagtctgaaacatgcccttatttgtcccaagctctggacatttctcaccccaaggcggatcaatcatgattaaatcactccaattaaactttaggctccagtcagaccttcagccaaatggaaaaaaaaactaggggataagggaggtagttggagcaagaaaatgttattagttgaaaccttacgggaccttcctcccttagtgagtctgttggctaaaggttctctggcttcgtgaattagaatcggatactgtttccaagttagcaaaaccaactctaccccagcaccccacgaggaagaatgtggaaggatctcccattggccggttggggcaaaagcctgaggcaatctttcatccccttttgccaaggcgagactttcccagtgacggtgatgtagttggccactctgactatgggtggactcgggtgtagacctctgaagctgagatcacacgaaaacctggcctccccgccatgtagctgttggagagtagaaaaatagagcacgcctgatgtttctaaatgagaagactttcaatagtaatgaagaatccatggcactctcctcaccctcaaacacatggcagtcattcacatacaggccccaaagccactgttagtgctgcagtagctcctgtggacattggaaagcccggagagggcgtggaagaaatcagctggcccccggcaggttctctggggttttgtgcccaaggctcctggagccctaaaaactttcaaaagttaactccccacgtccccatcctgcttgggtttctggacttttctgaggcaccggcagaggggtctcgttgctcccttgagtgtaggggcagccctttaacctggctccttgagtccctgctttttctgcttctgttgccttcttcctcgtcttcctctctctcaatatctccctctctttgtccctccccagttcctgacctggccatcccggggtgcccttgaccagccccgtgtctcctcagggtgtcccagcaccagcctggcacagagtggggctcagttagagtatgtgggatgttggtttcgccaggtgagtgaatgaaaggactcgaccaccacagctgagccactagctgggccatgcgaagagttctaggtgcaaaggctggagggtggaattcatttttgagaggtgtgtgagcagcttccgacccctgccccatttgaacgggggccttgctggtcgcgtccctgcattcacccgcgcggccatcccgtcatccaacagttgatcctaactgagcacgcccacggccctggtctggcctgggcaccggccaccgtagcccatcccttgatggcctctgtgtccccaggagggcgggccggggggttgcccaggggctggagcagtggactgtggctccatagaggtaggccggagggtgtgagggcagattcaagctatccccagggctctgctctggtcggagccagccccttctccctctctgccttccccgccccattcctgatgctgaactgttctggacccctggccctgagtctctcaggaccaaagtgggcacgggaacagctgtagtgtgtgcccccccgggctttggccacaggtctccctctcgaggtgtggttgtgactgcgacccttcccttgccgtgatgccttcctcccccggggcttggtccagctccttcactctctagcagctgctggggcccacctcccatgccgaggaccagcaggggaaacctccagggagcatctgcaggctctgcttctgcccggctgctggcttgctctccctggtggctctccagcggccagcttcctcacccacccggcactctgctttgctctgtctcctgaggtgggcctgaccaacctccccttctctgcctcagtccctgggctccagggctcagctccacagccctctgcctagcaggctggttctccctgccaagcccatacctgtggtcacctggccctcctgtggtctgagtaccactcccctgccccaggagccactcccactccagctgcctgtttccagcaggttcccagtgcccccgacaagcccctgctggtgtctccatctcctgccaagcatcctccagtgcctcctcctgtgggcctggcctcagggctatggacagactcctgtcccatcccagagacccctcgtgatcgttccctggcacgtgggccgtggcccggctgggtcggctgaagaactgcggatggaagctgcggaagaggccctgatggggcccaccatcccggacccaagtcttcttcctggcgggcctctcgtctccttcctggtttgggcggaagccatcacctggatgcctacgtgggaagggacctcgaatgtgggaccccagcccctctccagctcgaaatccctccacagccacggggacaccctgcacctattcccacgggacaggctggacccagagactctggacccggggcctccccttgagtagagacccgccctctgactgatggacgccgctgacctggggtcagacccgtgggctggacccctgcccaccccgcaggaaccctgaggcctaggggagctgttgagccttcagtgtctgcatgtgggaagtgggctccttcacctacctcacagggctgttgtgaggggcgctgtgatgcggttccaaagcacagggcttggcgcaccccactgtgctctcaataaatgtgtttcctgtcttaacaaaaa

SEQ ID NO: 366304 - DNA, 7714 bp, Homo sapiens
atatcagggtggtttataaagcctgtaaacacacctaagaaaataaacattttacaaatgaaaaaaaaaaaaaaaaaaaaaaaaaagcagagagggagcgcgccttggctcgctggccttggcggcggctcctcaggagagctggggcgcccacgagaggatccctcacccgggtctctcctcagggatgacatcatccgtccacctccttgtcttcaaggaccacctcctctccatgctgagctgctgccaaggggcctgctgcccatctacacctcacgagggcactaggagcacggtttcctggatcccaccaacatacaaagcagccactcactgacccccaggaccaggatggcaaaggatgaagaggaccggaactgaccagccagctgtccctcttacctaaagacttaaaccaatgccctagtgagggggcattgggcattaagccctgacctttgctatgctcatactttgactctatgagtactttcctataagtctttgcttgtgttcacctgctagcaaactggagtgtttccctccccaagggggtgtcagtctttgtcgactgactctgtcatcacccttatgatgtcctgaatggaaggatccctttgggaaattctcaggagggggacctgggccaagggcttggccagcatcctgctggcaactccaaggccctgggtgggcttctggaatgagcatgctactgaatcaccaaaggcacgccccacctctctgaagatcttcctatccttttctgggggaatggggtcgatgagagcaacctcctagggttgttgtgagaattaaatgagataaaagaggcctcaggcaggatctggcatagaggaggtgatcagcaaatgtttgttgaaaaggtttgacaggtcagtcccttcccacccctcttgcttgtcttacttgtcttatttattctccaacagcactccaggcagcccttgtccacgggctctccttgcatcaggtaggggctttgcagagaccatcgacgggctgacttgagtaagaacacgaattatgcatgtggccatttccagagcactttctatgtgatatgaacatgtgatttttatgtaatatgtgtatgtaaacgaggcagcctcatttccaggtgaggatgcatttggtagtgttgatttttgtaatttaaagaagctgaaagggagagaggacccgtgaggactgaactctctgtcccatggggtagggcttacatttacattaaagaaacagaaacttgctgggaggtgtaagtatttggtcacattgctggcaacagaaggggttggagttggacccagggtgccacgctagctgccctcaccccttcttcccctctggcccagagttatactaagagtccttttatttcaaaccaaatgtttgacaatgggacagtctgtttgaaatcccagctgcctggggtggtcttggggggtctgggtggccccagtgctggtaccatgtgctggcttcaccttttaataacagtgtgaccttaaacaagtcgcttaactactctaagtttcagtttctttcatggtctaaatggagattaaaacacacacacacacacacacacacacacacacacacacacaccctcgtgtatctaccccacagggcgcttttgaagaccaaatgctgtaactactatgaaagtgctttgtaaattgctgtggaaagtgtgagctactcaagcacccgaggctgtccctccttgctcacatgtccagcccaattctcccttagtgagaacagcactcagtaggtgctgtgtgtgtttgtgttcaattaagaaattccagaataaataaaaatgaattaattcaacaaacattttctggggcaccgacaatctgcccagtgcaccaggctaggtatctgatacaaagataatgaaaacagtctcttggaacctaattggggtcctcatttgaccaggaatttctttcgtcccgttttaagccaaccagttttgtccggacaagacaaaaacaacttgggctgctttagagaagcccagctcagtgtagacaatagctgcccagcctctgaaaggggctgattggattatgtggcaaatggaggtgcaaggatgacttggacggtgacaaatgaagtgggcggagacctgctttgagttaatccaggctattaggaggggaccttttgtcttccagagactggcaggagcttttaccagtggtttttacatccttaatgttcaggacgaataatttatggtcagtgaaaatccaggccccagtgagattcgagtgggctgtaaaatcgagagtcctgctcccagtgagtaatggtagtgaatgtttctgtcactttttgcaaccgtccattcatttgatcctcacaactccctgtcctgagccaggaccggccactgccactcccagggaaacagaggctgtcaagaggctccacagattgggccccactggatcattgaacccctgttccctgagttctagaggaagaattgtacctgtctcagtcccggccacctccagaaggcctccctctgcatttctgactttgctgtgccggcagcctggagcctcccaggtccctgctgtcatcttttctagccactacagtctctgtctttcctttcacagccccaagcttcttgaaaggcctgtctacacttgctgtcttccttcctcacctccaatttcctcttcaacccactgcttcctgactcgctctactccgtggaagcacgctcacaaaggtaaagacttttctgtggcttaatccttgtcatgttttcggctcatggacacaaggacacattttcatgccttctctcacagggctctgcgtctccggttcacttctgtgtctttacactcccttcacagagacacttgctcccccttctctcgttcttagcatcccctaggaacttgcacacccaggtctctcgacttctggacctgcttcttaccatgccgtcttaagcagtcaggagtcgctgcctgggttcgagtcctagttaaattacttagtgctgagaccttggggtaggtaaacttttccaagccaggtttatctcagtttcaaaatagggttaatcgtctttatctggcaggtcaggtgggatgtctcacaggtaagcaccagatgccatttgaaaggcttgaagcaaagtcaataaagcattcatgggaaaatacaactggaggcaccactagattttcgtatacattaggttcccacggggaggaccgaagagagaagaaagaagtggaaagggaggagcgtgcaggagagacaggagaagagaataactaaacaaagacattaaagacaaaaaaaaagtaggaaagggagacttagaaaatattaaaagccaccaaaaacacatccaaagacggtttccccttacgttagttgggctaaaagaaagcaaatgggaagaaggttttaaattgattatcccagtgacaaatcccaggaagctttcacatcaaatcaccctattctgggtttttaactccttccatcgagtttaacctctttacctcccacatcctggtaaaccctgccccctccctaccgccccctttgctggtgattaaatcctgaaggtacacgaagtatttcagtgaatgaatggctaacagaaaagggcctcccctcccccttaccctggcggtgtttttcagttttattccactttccgcccttttcccttaatgaacacagggctaatctcgggccttgtcgaaggaagaggctgcagacgttaatgaggttagctgctggattccagtattcgtcgcataaggatccttctttgtctgcgaaggaaaaacacactgattatcataatgagtaatgaggtgaactggccaccgccgggccggggcgatgtggcttcttaagccacacttctaattttggtgatggagccgacatttctttggcttctcatttaagtctttgcctctgtcccagtgcgaagtccattcagcggggttgaaagttgcaggcagctttgggaaggggggcgtcggacagggttgcattgtagaaagtggctttgttcgatccttcgcacagatgcaaatggccagagcattcattccctttcttcaagagctgaggactgggggggccactggtgatcagttcccaactctagctctcctctgactcatctcaggacccattgaggacatccaaaactcactcaagatcaccaagtggtaggaaagtactaactcctgggcatagccctaggggagtgactacaatgtgaatactcatggaatgcctagccaggtgaagaagtgaatgcatgttggcatcccagagggaccccccttaagagggcatagtttggggttcagatttgactccagcatactgttgaaattgggcacagggggctagtgattagtcaggatcaatcagtggagaggagattaaaactcacatctgggagtccggaatcagaacttgtagttcttttttttgaaatggagtctcgctctgtcgcccaggctggagtgcagtggcgtgatctcggctcactgcaacctctgccttccgggttcaagcaattctcccacctcagcctcctgagtagctgggattacaggcgcccaccaccacagccggctactttttgtatttttaggagagacggggtttcaccatgttggtcaggctggtcttgaactcctgacctcatgatccacctgccttagcctcccaaagtgctgggattacaggcgtgagccaccatgcccagccctatagtagttcttcttttgccccttaatatcctcacccacatgtcctgtaccctgcctgaaccctcctcctctttttgttctgatctttgagctccctagagcccataattctttagagcaggtatgtcccgagtctgaaacatgcccttatttgtcccaagctctggacatttctcaccccaaggcggatcaatcatgattaaatcactccaattaaactttaggctccagtcagaccttcagccaaatggaaaaaaaaactaggggataagggaggtagttggagcaagaaaatgttattagttgaaaccttacgggaccttcctcccttagtgagtctgttggctaaaggttctctggcttcgtgaattagaatcggatactgtttccaagttagcaaaaccaactctaccccagcaccccacgaggaagaatgtggaaggatctcccattggccggttggggcaaaagcctgaggcaatctttcatccccttttgccaaggcgagactttcccagtgacggtgatgtagttggccactctgactatgggtggactcgggtgtagacctctgaagctgagatcacacgaaaacctggcctccccgccatgtagctgttggagagtagaaaaatagagcacgcctgatgtttctaaatgagaagactttcaatagtaatgaagaatccatggcactctcctcaccctcaaacacatggcagtcattcacatacaggccccaaagccactgttagtgctgcagtagctcctgtggacattggaaagcccggagagggcgtggaagaaatcagctggcccccggcaggttctctggggttttgtgcccaaggctcctggagccctaaaaactttcaaaagttaactccccacgtccccatcctgcttgggtttctggacttttctgaggcaccggcagaggggtctcgttgctcccttgagtgtaggggcagccctttaacctggctccttgagtccctgctttttctgcttctgttgccttcttcctcgtcttcctctctctcaatatctccctctctttgtccctccccagttcctgacctggccatcccggggtgcccttgaccagccccgtgtctcctcagggtgtcccagcaccagcctggcacagagtggggctcagttagagtatgtgggatgttggtttcgccaggtgagtgaatgaaaggactcgaccaccacagctgagccactagctgggccatgcgaagagttctaggtgcaaaggctggagggtggaattcatttttgagaggtgtgtgagcagcttccgacccctgccccatttgaacgggggccttgctggtcgcgtccctgcattcacccgcgcggccatcccgtcatccaacagttgatcctaactgagcacgcccacggccctggtctggcctgggcaccggccaccgtagcccatcccttgatggcctctgtgtccccaggagggcgggccggggggttgcccaggggctggagcagtggactgtggctccatagaggtaggccggagggtgtgagggcagattcaagctatccccagggctctgctctggtcggagccagccccttctccctctctgccttccccgccccattcctgatgctgaactgttctggacccctggccctgagtctctcaggaccaaagtgggcacgggaacagctgtagtgtgtgcccccccgggctttggccacaggtctccctctcgaggtgtggttgtgactgcgacccttcccttgccgtgatgccttcctcccccggggcttggtccagctccttcactctctagcagctgctggggcccacctcccatgccgaggaccagcaggggaaacctccagggagcatctgcaggctctgcttctgcccggctgctggcttgctctccctggtggctctccagcggccagcttcctcacccacccggcactctgctttgctctgtctcctgaggtgggcctgaccaacctccccttctctgcctcagtccctgggctccagggctcagctccacagccctctgcctagcaggctggttctccctgccaagcccatacctgtggtcacctggccctcctgtggtctgagtaccactcccctgccccaggagccactcccactccagctgcctgtttccagcaggttcccagtgcccccgacaagcccctgctggtgtctccatctcctgccaagcatcctccagtgcctcctcctgtgggcctggcctcagggctatggacagactcctgtcccatcccagagacccctcgtgatcgttccctgtcaccccactccaccgaaaagtaaactgcaggcacgtgggccgtggcccggctgggtcggctgaagaactgcggatggaagctgcggaagaggccctgatggggcccaccatcccggacccaagtcttcttcctggcgggcctctcgtctccttcctggtttgggcggaagccatcacctggatgcctacgtgggaagggacctcgaatgtgggaccccagcccctctccagctcgaaatccctccacagccacggggacaccctgcacctattcccacgggacaggctggacccagagactctggacccggggcctccccttgagtagagacccgccctctgactgatggacgccgctgacctggggtcagacccgtgggctggacccctgcccaccccgcaggaaccctgaggcctaggggagctgttgagccttcagtgtctgcatgtgggaagtgggctccttcacctacctcacagggctgttgtgaggggcgctgtgatgcggttccaaagcacagggcttggcgcaccccactgtgctctcaataaatgtgtttcctgtcttaacaaaaa

SEQ ID NO: 366305 - DNA, 7804 bp, Homo sapiens
atatcagggtggtttataaagcctgtaaacacacctaagaaaataaacattttacaaatgaaaaaaaaaaaaaaaaaaaaaaaaaagcagagagggagcgcgccttggctcgctggccttggcggcggctcctcaggagagctggggcgcccacgagaggatccctcacccgggtctctcctcagggatgacatcatccgtccacctccttgtcttcaaggaccacctcctctccatgctgagctgctgccaaggggcctgctgcccatctacacctcacgagggcactaggagcacggtttcctggatcccaccaacatacaaagcagccactcactgacccccaggaccaggatggcaaaggatgaagaggaccggaactgaccagccagctgtccctcttacctaaagacttaaaccaatgccctagtgagggggcattgggcattaagccctgacctttgctatgctcatactttgactctatgagtactttcctataagtctttgcttgtgttcacctgctagcaaactggagtgtttccctccccaagggggtgtcagtctttgtcgactgactctgtcatcacccttatgatgtcctgaatggaaggatccctttgggaaattctcaggagggggacctgggccaagggcttggccagcatcctgctggcaactccaaggccctgggtgggcttctggaatgagcatgctactgaatcaccaaaggcacgccccacctctctgaagatcttcctatccttttctgggggaatggggtcgatgagagcaacctcctagggttgttgtgagaattaaatgagataaaagaggcctcaggcaggatctggcatagaggaggtgatcagcaaatgtttgttgaaaaggtttgacaggtcagtcccttcccacccctcttgcttgtcttacttgtcttatttattctccaacagcactccaggcagcccttgtccacgggctctccttgcatcaggtaggggctttgcagagaccatcgacgggctgacttgagtaagaacacgaattatgcatgtggccatttccagagcactttctatgtgatatgaacatgtgatttttatgtaatatgtgtatgtaaacgaggcagcctcatttccaggtgaggatgcatttggtagtgttgatttttgtaatttaaagaagctgaaagggagagaggacccgtgaggactgaactctctgtcccatggggtagggcttacatttacattaaagaaacagaaacttgctgggaggtgtaagtatttggtcacattgctggcaacagaaggggttggagttggacccagggtgccacgctagctgccctcaccccttcttcccctctggcccagagttatactaagagtccttttatttcaaaccaaatgtttgacaatgggacagtctgtttgaaatcccagctgcctggggtggtcttggggggtctgggtggccccagtgctggtaccatgtgctggcttcaccttttaataacagtgtgaccttaaacaagtcgcttaactactctaagtttcagtttctttcatggtctaaatggagattaaaacacacacacacacacacacacacacacacacacacacacaccctcgtgtatctaccccacagggcgcttttgaagaccaaatgctgtaactactatgaaagtgctttgtaaattgctgtggaaagtgtgagctactcaagcacccgaggctgtccctccttgctcacatgtccagcccaattctcccttagtgagaacagcactcagtaggtgctgtgtgtgtttgtgttcaattaagaaattccagaataaataaaaatgaattaattcaacaaacattttctggggcaccgacaatctgcccagtgcaccaggctaggtatctgatacaaagataatgaaaacagtctcttggaacctaattggggtcctcatttgaccaggaatttctttcgtcccgttttaagccaaccagttttgtccggacaagacaaaaacaacttgggctgctttagagaagcccagctcagtgtagacaatagctgcccagcctctgaaaggggctgattggattatgtggcaaatggaggtgcaaggatgacttggacggtgacaaatgaagtgggcggagacctgctttgagttaatccaggctattaggaggggaccttttgtcttccagagactggcaggagcttttaccagtggtttttacatccttaatgttcaggacgaataatttatggtcagtgaaaatccaggccccagtgagattcgagtgggctgtaaaatcgagagtcctgctcccagtgagtaatggtagtgaatgtttctgtcactttttgcaaccgtccattcatttgatcctcacaactccctgtcctgagccaggaccggccactgccactcccagggaaacagaggctgtcaagaggctccacagattgggccccactggatcattgaacccctgttccctgagttctagaggaagaattgtacctgtctcagtcccggccacctccagaaggcctccctctgcatttctgactttgctgtgccggcagcctggagcctcccaggtccctgctgtcatcttttctagccactacagtctctgtctttcctttcacagccccaagcttcttgaaaggcctgtctacacttgctgtcttccttcctcacctccaatttcctcttcaacccactgcttcctgactcgctctactccgtggaagcacgctcacaaaggtaaagacttttctgtggcttaatccttgtcatgttttcggctcatggacacaaggacacattttcatgccttctctcacagggctctgcgtctccggttcacttctgtgtctttacactcccttcacagagacacttgctcccccttctctcgttcttagcatcccctaggaacttgcacacccaggtctctcgacttctggacctgcttcttaccatgccgtcttaagcagtcaggagtcgctgcctgggttcgagtcctagttaaattacttagtgctgagaccttggggtaggtaaacttttccaagccaggtttatctcagtttcaaaatagggttaatcgtctttatctggcaggtcaggtgggatgtctcacaggtaagcaccagatgccatttgaaaggcttgaagcaaagtcaataaagcattcatgggaaaatacaactggaggcaccactagattttcgtatacattaggttcccacggggaggaccgaagagagaagaaagaagtggaaagggaggagcgtgcaggagagacaggagaagagaataactaaacaaagacattaaagacaaaaaaaaagtaggaaagggagacttagaaaatattaaaagccaccaaaaacacatccaaagacggtttccccttacgttagttgggctaaaagaaagcaaatgggaagaaggttttaaattgattatcccagtgacaaatcccaggaagctttcacatcaaatcaccctattctgggtttttaactccttccatcgagtttaacctctttacctcccacatcctggtaaaccctgccccctccctaccgccccctttgctggtgattaaatcctgaaggtacacgaagtatttcagtgaatgaatggctaacagaaaagggcctcccctcccccttaccctggcggtgtttttcagttttattccactttccgcccttttcccttaatgaacacagggctaatctcgggccttgtcgaaggaagaggctgcagacgttaatgaggttagctgctggattccagtattcgtcgcataaggatccttctttgtctgcgaaggaaaaacacactgattatcataatgagtaatgaggtgaactggccaccgccgggccggggcgatgtggcttcttaagccacacttctaattttggtgatggagccgacatttctttggcttctcatttaagtctttgcctctgtcccagtgcgaagtccattcagcggggttgaaagttgcaggcagctttgggaaggggggcgtcggacagggttgcattgtagaaagtggctttgttcgatccttcgcacagatgcaaatggccagagcattcattccctttcttcaagagctgaggactgggggggccactggtgatcagttcccaactctagctctcctctgactcatctcaggacccattgaggacatccaaaactcactcaagatcaccaagtggtaggaaagtactaactcctgggcatagccctaggggagtgactacaatgtgaatactcatggaatgcctagccaggtgaagaagtgaatgcatgttggcatcccagagggaccccccttaagagggcatagtttggggttcagatttgactccagcatactgttgaaattgggcacagggggctagtgattagtcaggatcaatcagtggagaggagattaaaactcacatctgggagtccggaatcagaacttgtagttcttttttttgaaatggagtctcgctctgtcgcccaggctggagtgcagtggcgtgatctcggctcactgcaacctctgccttccgggttcaagcaattctcccacctcagcctcctgagtagctgggattacaggcgcccaccaccacagccggctactttttgtatttttaggagagacggggtttcaccatgttggtcaggctggtcttgaactcctgacctcatgatccacctgccttagcctcccaaagtgctgggattacaggcgtgagccaccatgcccagccctatagtagttcttcttttgccccttaatatcctcacccacatgtcctgtaccctgcctgaaccctcctcctctttttgttctgatctttgagctccctagagcccataattctttagagcaggtatgtcccgagtctgaaacatgcccttatttgtcccaagctctggacatttctcaccccaaggcggatcaatcatgattaaatcactccaattaaactttaggctccagtcagaccttcagccaaatggaaaaaaaaactaggggataagggaggtagttggagcaagaaaatgttattagttgaaaccttacgggaccttcctcccttagtgagtctgttggctaaaggttctctggcttcgtgaattagaatcggatactgtttccaagttagcaaaaccaactctaccccagcaccccacgaggaagaatgtggaaggatctcccattggccggttggggcaaaagcctgaggcaatctttcatccccttttgccaaggcgagactttcccagtgacggtgatgtagttggccactctgactatgggtggactcgggtgtagacctctgaagctgagatcacacgaaaacctggcctccccgccatgtagctgttggagagtagaaaaatagagcacgcctgatgtttctaaatgagaagactttcaatagtaatgaagaatccatggcactctcctcaccctcaaacacatggcagtcattcacatacaggccccaaagccactgttagtgctgcagtagctcctgtggacattggaaagcccggagagggcgtggaagaaatcagctggcccccggcaggttctctggggttttgtgcccaaggctcctggagccctaaaaactttcaaaagttaactccccacgtccccatcctgcttgggtttctggacttttctgaggcaccggcagaggggtctcgttgctcccttgagtgtaggggcagccctttaacctggctccttgagtccctgctttttctgcttctgttgccttcttcctcgtcttcctctctctcaatatctccctctctttgtccctccccagttcctgacctggccatcccggggtgcccttgaccagccccgtgtctcctcagggtgtcccagcaccagcctggcacagagtggggctcagttagagtatgtgggatgttggtttcgccaggtgagtgaatgaaaggactcgaccaccacagctgagccactagctgggccatgcgaagagttctaggtgcaaaggctggagggtggaattcatttttgagaggtgtgtgagcagcttccgacccctgccccatttgaacgggggccttgctggtcgcgtccctgcattcacccgcgcggccatcccgtcatccaacagttgatcctaactgagcacgcccacggccctggtctggcctgggcaccggccaccgtagcccatcccttgatggcctctgtgtccccaggagggcgggccggggggttgcccaggggctggagcagtggactgtggctccatagaggtaggccggagggtgtgagggcagattcaagctatccccagggctctgctctggtcggagccagccccttctccctctctgccttccccgccccattcctgatgctgaactgttctggacccctggccctgagtctctcaggaccaaagtgggcacgggaacagctgtagtgtgtgcccccccgggctttggccacaggtctccctctcgaggtgtggttgtgactgcgacccttcccttgccgtgatgccttcctcccccggggcttggtccagctccttcactctctagcagctgctggggcccacctcccatgccgaggaccagcaggggaaacctccagggagcatctgcaggctctgcttctgcccggctgctggcttgctctccctggtggctctccagcggccagcttcctcacccacccggcactctgctttgctctgtctcctgaggtgggcctgaccaacctccccttctctgcctcagtccctgggctccagggctcagctccacagccctctgcctagcaggctggttctccctgccaagcccatacctgtggtcacctggccctcctgtggtctgagtaccactcccctgccccaggagccactcccactccagctgcctgtttccagcaggttcccagtgcccccgacaagcccctgctggtgtctccatctcctgccaagcatcctccagtgcctcctcctgtgggcctggcctcagggctatggacagactcctgtcccatcccagagacccctcgtgatcgttccctgtcaccccactccaccgaaaagtaaactgcaggtgaggccgtgcccgagtctttcttcggtgtgtttggcttttccggggcgcttgccttgccatgattctaactctctgcccttccccaaggcacgtgggccgtggcccggctgggtcggctgaagaactgcggatggaagctgcggaagaggccctgatggggcccaccatcccggacccaagtcttcttcctggcgggcctctcgtctccttcctggtttgggcggaagccatcacctggatgcctacgtgggaagggacctcgaatgtgggaccccagcccctctccagctcgaaatccctccacagccacggggacaccctgcacctattcccacgggacaggctggacccagagactctggacccggggcctccccttgagtagagacccgccctctgactgatggacgccgctgacctggggtcagacccgtgggctggacccctgcccaccccgcaggaaccctgaggcctaggggagctgttgagccttcagtgtctgcatgtgggaagtgggctccttcacctacctcacagggctgttgtgaggggcgctgtgatgcggttccaaagcacagggcttggcgcaccccactgtgctctcaataaatgtgtttcctgtcttaacaaaaa

SEQ ID NO: 366306 - DNA, 7309 bp, Homo sapiens
atatcagggtggtttataaagcctgtaaacacacctaagaaaataaacattttacaaatgaaaaaaaaaaaaaaaaaaaaaaaaaagcagagagggagcgcgccttggctcgctggccttggcggcggctcctcaggagagctggggcgcccacgagaggatccctcacccgggtctctcctcagggatgacatcatccgtccacctccttgtcttcaaggaccacctcctctccatgctgagctgctgccaaggggcctgctgcccatctacacctcacgagggcactaggagcacggtttcctggatcccaccaacatacaaagcagccactcactgacccccaggaccaggatggcaaaggatgaagaggaccggaactgaccagccagctgtccctcttacctaaagacttaaaccaatgccctagtgagggggcattgggcattaagccctgacctttgctatgctcatactttgactctatgagtactttcctataagtctttgcttgtgttcacctgctagcaaactggagtgtttccctccccaagggggtgtcagtctttgtcgactgactctgtcatcacccttatgatgtcctgaatggaaggatccctttgggaaattctcaggagggggacctgggccaagggcttggccagcatcctgctggcaactccaaggccctgggtgggcttctggaatgagcatgctactgaatcaccaaaggcacgccccacctctctgaagatcttcctatccttttctgggggaatggggtcgatgagagcaacctcctagggttgttgtgagaattaaatgagataaaagaggcctcaggcaggatctggcatagaggaggtgatcagcaaatgtttgttgaaaaggtttgacaggtcagtcccttcccacccctcttgcttgtcttacttgtcttatttattctccaacagcactccaggcagcccttgtccacgggctctccttgcatcaggtaggggctttgcagagaccatcgacgggctgacttgagtaagaacacgaattatgcatgtggccatttccagagcactttctatgtgatatgaacatgtgatttttatgtaatatgtgtatgtaaacgaggcagcctcatttccaggtgaggatgcatttggtagtgttgatttttgtaatttaaagaagctgaaagggagagaggacccgtgaggactgaactctctgtcccatggggtagggcttacatttacattaaagaaacagaaacttgctgggaggtgtaagtatttggtcacattgctggcaacagaaggggttggagttggacccagggtgccacgctagctgccctcaccccttcttcccctctggcccagagttatactaagagtccttttatttcaaaccaaatgtttgacaatgggacagtctgtttgaaatcccagctgcctggggtggtcttggggggtctgggtggccccagtgctggtaccatgtgctggcttcaccttttaataacagtgtgaccttaaacaagtcgcttaactactctaagtttcagtttctttcatggtctaaatggagattaaaacacacacacacacacacacacacacacacacacacacacaccctcgtgtatctaccccacagggcgcttttgaagaccaaatgctgtaactactatgaaagtgctttgtaaattgctgtggaaagtgtgagctactcaagcacccgaggctgtccctccttgctcacatgtccagcccaattctcccttagtgagaacagcactcagtaggtgctgtgtgtgtttgtgttcaattaagaaattccagaataaataaaaatgaattaattcaacaaacattttctggggcaccgacaatctgcccagtgcaccaggctaggtatctgatacaaagataatgaaaacagtctcttggaacctaattggggtcctcatttgaccaggaatttctttcgtcccgttttaagccaaccagttttgtccggacaagacaaaaacaacttgggctgctttagagaagcccagctcagtgtagacaatagctgcccagcctctgaaaggggctgattggattatgtggcaaatggaggtgcaaggatgacttggacggtgacaaatgaagtgggcggagacctgctttgagttaatccaggctattaggaggggaccttttgtcttccagagactggcaggagcttttaccagtggtttttacatccttaatgttcaggacgaataatttatggtcagtgaaaatccaggccccagtgagattcgagtgggctgtaaaatcgagagtcctgctcccagtgagtaatggtagtgaatgtttctgtcactttttgcaaccgtccattcatttgatcctcacaactccctgtcctgagccaggaccggccactgccactcccagggaaacagaggctgtcaagaggctccacagattgggccccactggatcattgaacccctgttccctgagttctagaggaagaattgtacctgtctcagtcccggccacctccagaaggcctccctctgcatttctgactttgctgtgccggcagcctggagcctcccaggtccctgctgtcatcttttctagccactacagtctctgtctttcctttcacagccccaagcttcttgaaaggcctgtctacacttgctgtcttccttcctcacctccaatttcctcttcaacccactgcttcctgactcgctctactccgtggaagcacgctcacaaaggtaaagacttttctgtggcttaatccttgtcatgttttcggctcatggacacaaggacacattttcatgccttctctcacagggctctgcgtctccggttcacttctgtgtctttacactcccttcacagagacacttgctcccccttctctcgttcttagcatcccctaggaacttgcacacccaggtctctcgacttctggacctgcttcttaccatgccgtcttaagcagtcaggagtcgctgcctgggttcgagtcctagttaaattacttagtgctgagaccttggggtaggtaaacttttccaagccaggtttatctcagtttcaaaatagggttaatcgtctttatctggcaggtcaggtgggatgtctcacaggtaagcaccagatgccatttgaaaggcttgaagcaaagtcaataaagcattcatgggaaaatacaactggaggcaccactagattttcgtatacattaggttcccacggggaggaccgaagagagaagaaagaagtggaaagggaggagcgtgcaggagagacaggagaagagaataactaaacaaagacattaaagacaaaaaaaaagtaggaaagggagacttagaaaatattaaaagccaccaaaaacacatccaaagacggtttccccttacgttagttgggctaaaagaaagcaaatgggaagaaggttttaaattgattatcccagtgacaaatcccaggaagctttcacatcaaatcaccctattctgggtttttaactccttccatcgagtttaacctctttacctcccacatcctggtaaaccctgccccctccctaccgccccctttgctggtgattaaatcctgaaggtacacgaagtatttcagtgaatgaatggctaacagaaaagggcctcccctcccccttaccctggcggtgtttttcagttttattccactttccgcccttttcccttaatgaacacagggctaatctcgggccttgtcgaaggaagaggctgcagacgttaatgaggttagctgctggattccagtattcgtcgcataaggatccttctttgtctgcgaaggaaaaacacactgattatcataatgagtaatgaggtgaactggccaccgccgggccggggcgatgtggcttcttaagccacacttctaattttggtgatggagccgacatttctttggcttctcatttaagtctttgcctctgtcccagtgcgaagtccattcagcggggttgaaagttgcaggcagctttgggaaggggggcgtcggacagggttgcattgtagaaagtggctttgttcgatccttcgcacagatgcaaatggccagagcattcattccctttcttcaagagctgaggactgggggggccactggtgatcagttcccaactctagctctcctctgactcatctcaggacccattgaggacatccaaaactcactcaagatcaccaagtggtaggaaagtactaactcctgggcatagccctaggggagtgactacaatgtgaatactcatggaatgcctagccaggtgaagaagtgaatgcatgttggcatcccagagggaccccccttaagagggcatagtttggggttcagatttgactccagcatactgttgaaattgggcacagggggctagtgattagtcaggatcaatcagtggagaggagattaaaactcacatctgggagtccggaatcagaacttgtagttcttttttttgaaatggagtctcgctctgtcgcccaggctggagtgcagtggcgtgatctcggctcactgcaacctctgccttccgggttcaagcaattctcccacctcagcctcctgagtagctgggattacaggcgcccaccaccacagccggctactttttgtatttttaggagagacggggtttcaccatgttggtcaggctggtcttgaactcctgacctcatgatccacctgccttagcctcccaaagtgctgggattacaggcgtgagccaccatgcccagccctatagtagttcttcttttgccccttaatatcctcacccacatgtcctgtaccctgcctgaaccctcctcctctttttgttctgatctttgagctccctagagcccataattctttagagcaggtatgtcccgagtctgaaacatgcccttatttgtcccaagctctggacatttctcaccccaaggcggatcaatcatgattaaatcactccaattaaactttaggctccagtcagaccttcagccaaatggaaaaaaaaactaggggataagggaggtagttggagcaagaaaatgttattagttgaaaccttacgggaccttcctcccttagtgagtctgttggctaaaggttctctggcttcgtgaattagaatcggatactgtttccaagttagcaaaaccaactctaccccagcaccccacgaggaagaatgtggaaggatctcccattggccggttggggcaaaagcctgaggcaatctttcatccccttttgccaaggcgagactttcccagtgacggtgatgtagttggccactctgactatgggtggactcgggtgtagacctctgaagctgagatcacacgaaaacctggcctccccgccatgtagctgttggagagtagaaaaatagagcacgcctgatgtttctaaatgagaagactttcaatagtaatgaagaatccatggcactctcctcaccctcaaacacatggcagtcattcacatacaggccccaaagccactgttagtgctgcagtagctcctgtggacattggaaagcccggagagggcgtggaagaaatcagctggcccccggcaggttctctggggttttgtgcccaaggctcctggagccctaaaaactttcaaaagttaactccccacgtccccatcctgcttgggtttctggacttttctgaggcaccggcagaggggtctcgttgctcccttgagtgtaggggcagccctttaacctggctccttgagtccctgctttttctgcttctgttgccttcttcctcgtcttcctctctctcaatatctccctctctttgtccctccccagttcctgacctggccatcccggggtgcccttgaccagccccgtgtctcctcagggtgtcccagcaccagcctggcacagagtggggctcagttagagtatgtgggatgttggtttcgccaggtgagtgaatgaaaggactcgaccaccacagctgagccactagctgggccatgcgaagagttctaggtgcaaaggctggagggtggaattcatttttgagaggtgtgtgagcagcttccgacccctgccccatttgaacgggggccttgctggtcgcgtccctgcattcacccgcgcggccatcccgtcatccaacagttgatcctaactgagcacgcccacggccctggtctggcctgggcaccggccaccgtagcccatcccttgatggcctctgtgtccccaggagggcgggccggggggttgcccaggggctggagcagtggactgtggctccatagaggtaggccggagggtgtgagggcagattcaagctatccccagggctctgctctggtcggagccagccccttctccctctctgccttccccgccccattcctgatgctgaactgttctggacccctggccctgagtctctcaggaccaaagtgggcacgggaacagctgtagtgtgtgcccccccgggctttggccacaggtctccctctcgaggtgtggttgtgactgcgacccttcccttgccgtgatgccttcctcccccggggcttggtccagctccttcactctctagcagctgctggtgtctccatctcctgccaagcatcctccagtgcctcctcctgtgggcctggcctcagggctatggacagactcctgtcccatcccagagacccctcgtgatcgttccctggcacgtgggccgtggcccggctgggtcggctgaagaactgcggatggaagctgcggaagaggccctgatggggcccaccatcccggacccaagtcttcttcctggcgggcctctcgtctccttcctggtttgggcggaagccatcacctggatgcctacgtgggaagggacctcgaatgtgggaccccagcccctctccagctcgaaatccctccacagccacggggacaccctgcacctattcccacgggacaggctggacccagagactctggacccggggcctccccttgagtagagacccgccctctgactgatggacgccgctgacctggggtcagacccgtgggctggacccctgcccaccccgcaggaaccctgaggcctaggggagctgttgagccttcagtgtctgcatgtgggaagtgggctccttcacctacctcacagggctgttgtgaggggcgctgtgatgcggttccaaagcacagggcttggcgcaccccactgtgctctcaataaatgtgtttcctgtcttaacaaaaa

SEQ ID NO: 366307 - DNA, 7647 bp, Homo sapiens
atatcagggtggtttataaagcctgtaaacacacctaagaaaataaacattttacaaatgaaaaaaaaaaaaaaaaaaaaaaaaaagcagagagggagcgcgccttggctcgctggccttggcggcggctcctcaggagagctggggcgcccacgagaggatccctcacccgggtctctcctcagggatgacatcatccgtccacctccttgtcttcaaggaccacctcctctccatgctgagctgctgccaaggggcctgctgcccatctacacctcacgagggcactaggagcacggtttcctggatcccaccaacatacaaagcagccactcactgacccccaggaccaggatggcaaaggatgaagaggaccggaactgaccagccagctgtccctcttacctaaagacttaaaccaatgccctagtgagggggcattgggcattaagccctgacctttgctatgctcatactttgactctatgagtactttcctataagtctttgcttgtgttcacctgctagcaaactggagtgtttccctccccaagggggtgtcagtctttgtcgactgactctgtcatcacccttatgatgtcctgaatggaaggatccctttgggaaattctcaggagggggacctgggccaagggcttggccagcatcctgctggcaactccaaggccctgggtgggcttctggaatgagcatgctactgaatcaccaaaggcacgccccacctctctgaagatcttcctatccttttctgggggaatggggtcgatgagagcaacctcctagggttgttgtgagaattaaatgagataaaagaggcctcaggcaggatctggcatagaggaggtgatcagcaaatgtttgttgaaaaggtttgacaggtcagtcccttcccacccctcttgcttgtcttacttgtcttatttattctccaacagcactccaggcagcccttgtccacgggctctccttgcatcaggtaggggctttgcagagaccatcgacgggctgacttgagtaagaacacgaattatgcatgtggccatttccagagcactttctatgtgatatgaacatgtgatttttatgtaatatgtgtatgtaaacgaggcagcctcatttccaggtgaggatgcatttggtagtgttgatttttgtaatttaaagaagctgaaagggagagaggacccgtgaggactgaactctctgtcccatggggtagggcttacatttacattaaagaaacagaaacttgctgggaggtgtaagtatttggtcacattgctggcaacagaaggggttggagttggacccagggtgccacgctagctgccctcaccccttcttcccctctggcccagagttatactaagagtccttttatttcaaaccaaatgtttgacaatgggacagtctgtttgaaatcccagctgcctggggtggtcttggggggtctgggtggccccagtgctggtaccatgtgctggcttcaccttttaataacagtgtgaccttaaacaagtcgcttaactactctaagtttcagtttctttcatggtctaaatggagattaaaacacacacacacacacacacacacacacacacacacacacaccctcgtgtatctaccccacagggcgcttttgaagaccaaatgctgtaactactatgaaagtgctttgtaaattgctgtggaaagtgtgagctactcaagcacccgaggctgtccctccttgctcacatgtccagcccaattctcccttagtgagaacagcactcagtaggtgctgtgtgtgtttgtgttcaattaagaaattccagaataaataaaaatgaattaattcaacaaacattttctggggcaccgacaatctgcccagtgcaccaggctaggtatctgatacaaagataatgaaaacagtctcttggaacctaattggggtcctcatttgaccaggaatttctttcgtcccgttttaagccaaccagttttgtccggacaagacaaaaacaacttgggctgctttagagaagcccagctcagtgtagacaatagctgcccagcctctgaaaggggctgattggattatgtggcaaatggaggtgcaaggatgacttggacggtgacaaatgaagtgggcggagacctgctttgagttaatccaggctattaggaggggaccttttgtcttccagagactggcaggagcttttaccagtggtttttacatccttaatgttcaggacgaataatttatggtcagtgaaaatccaggccccagtgagattcgagtgggctgtaaaatcgagagtcctgctcccagtgagtaatggtagtgaatgtttctgtcactttttgcaaccgtccattcatttgatcctcacaactccctgtcctgagccaggaccggccactgccactcccagggaaacagaggctgtcaagaggctccacagattgggccccactggatcattgaacccctgttccctgagttctagaggaagaattgtacctgtctcagtcccggccacctccagaaggcctccctctgcatttctgactttgctgtgccggcagcctggagcctcccaggtccctgctgtcatcttttctagccactacagtctctgtctttcctttcacagccccaagcttcttgaaaggcctgtctacacttgctgtcttccttcctcacctccaatttcctcttcaacccactgcttcctgactcgctctactccgtggaagcacgctcacaaaggtaaagacttttctgtggcttaatccttgtcatgttttcggctcatggacacaaggacacattttcatgccttctctcacagggctctgcgtctccggttcacttctgtgtctttacactcccttcacagagacacttgctcccccttctctcgttcttagcatcccctaggaacttgcacacccaggtctctcgacttctggacctgcttcttaccatgccgtcttaagcagtcaggagtcgctgcctgggttcgagtcctagttaaattacttagtgctgagaccttggggtaggtaaacttttccaagccaggtttatctcagtttcaaaatagggttaatcgtctttatctggcaggtcaggtgggatgtctcacaggtaagcaccagatgccatttgaaaggcttgaagcaaagtcaataaagcattcatgggaaaatacaactggaggcaccactagattttcgtatacattaggttcccacggggaggaccgaagagagaagaaagaagtggaaagggaggagcgtgcaggagagacaggagaagagaataactaaacaaagacattaaagacaaaaaaaaagtaggaaagggagacttagaaaatattaaaagccaccaaaaacacatccaaagacggtttccccttacgttagttgggctaaaagaaagcaaatgggaagaaggttttaaattgattatcccagtgacaaatcccaggaagctttcacatcaaatcaccctattctgggtttttaactccttccatcgagtttaacctctttacctcccacatcctggtaaaccctgccccctccctaccgccccctttgctggtgattaaatcctgaaggtacacgaagtatttcagtgaatgaatggctaacagaaaagggcctcccctcccccttaccctggcggtgtttttcagttttattccactttccgcccttttcccttaatgaacacagggctaatctcgggccttgtcgaaggaagaggctgcagacgttaatgaggttagctgctggattccagtattcgtcgcataaggatccttctttgtctgcgaaggaaaaacacactgattatcataatgagtaatgaggtgaactggccaccgccgggccggggcgatgtggcttcttaagccacacttctaattttggtgatggagccgacatttctttggcttctcatttaagtctttgcctctgtcccagtgcgaagtccattcagcggggttgaaagttgcaggcagctttgggaaggggggcgtcggacagggttgcattgtagaaagtggctttgttcgatccttcgcacagatgcaaatggccagagcattcattccctttcttcaagagctgaggactgggggggccactggtgatcagttcccaactctagctctcctctgactcatctcaggacccattgaggacatccaaaactcactcaagatcaccaagtggtaggaaagtactaactcctgggcatagccctaggggagtgactacaatgtgaatactcatggaatgcctagccaggtgaagaagtgaatgcatgttggcatcccagagggaccccccttaagagggcatagtttggggttcagatttgactccagcatactgttgaaattgggcacagggggctagtgattagtcaggatcaatcagtggagaggagattaaaactcacatctgggagtccggaatcagaacttgtagttcttttttttgaaatggagtctcgctctgtcgcccaggctggagtgcagtggcgtgatctcggctcactgcaacctctgccttccgggttcaagcaattctcccacctcagcctcctgagtagctgggattacaggcgcccaccaccacagccggctactttttgtatttttaggagagacggggtttcaccatgttggtcaggctggtcttgaactcctgacctcatgatccacctgccttagcctcccaaagtgctgggattacaggcgtgagccaccatgcccagccctatagtagttcttcttttgccccttaatatcctcacccacatgtcctgtaccctgcctgaaccctcctcctctttttgttctgatctttgagctccctagagcccataattctttagagcaggtatgtcccgagtctgaaacatgcccttatttgtcccaagctctggacatttctcaccccaaggcggatcaatcatgattaaatcactccaattaaactttaggctccagtcagaccttcagccaaatggaaaaaaaaactaggggataagggaggtagttggagcaagaaaatgttattagttgaaaccttacgggaccttcctcccttagtgagtctgttggctaaaggttctctggcttcgtgaattagaatcggatactgtttccaagttagcaaaaccaactctaccccagcaccccacgaggaagaatgtggaaggatctcccattggccggttggggcaaaagcctgaggcaatctttcatccccttttgccaaggcgagactttcccagtgacggtgatgtagttggccactctgactatgggtggactcgggtgtagacctctgaagctgagatcacacgaaaacctggcctccccgccatgtagctgttggagagtagaaaaatagagcacgcctgatgtttctaaatgagaagactttcaatagtaatgaagaatccatggcactctcctcaccctcaaacacatggcagtcattcacatacaggccccaaagccactgttagtgctgcagtagctcctgtggacattggaaagcccggagagggcgtggaagaaatcagctggcccccggcaggttctctggggttttgtgcccaaggctcctggagccctaaaaactttcaaaagttaactccccacgtccccatcctgcttgggtttctggacttttctgaggcaccggcagaggggtctcgttgctcccttgagtgtaggggcagccctttaacctggctccttgagtccctgctttttctgcttctgttgccttcttcctcgtcttcctctctctcaatatctccctctctttgtccctccccagttcctgacctggccatcccggggtgcccttgaccagccccgtgtctcctcagggtgtcccagcaccagcctggcacagagtggggctcagttagagtatgtgggatgttggtttcgccaggtgagtgaatgaaaggactcgaccaccacagctgagccactagctgggccatgcgaagagttctaggtgcaaaggctggagggtggaattcatttttgagaggtgtgtgagcagcttccgacccctgccccatttgaacgggggccttgctggtcgcgtccctgcattcacccgcgcggccatcccgtcatccaacagttgatcctaactgagcacgcccacggccctggtctggcctgggcaccggccaccgtagcccatcccttgatggcctctgtgtccccaggagggcgggccggggggttgcccaggggctggagcagtggactgtggctccatagaggtaggccggagggtgtgagggcagattcaagctatccccagggctctgctctggtcggagccagccccttctccctctctgccttccccgccccattcctgatgctgaactgttctggacccctggccctgagtctctcaggaccaaagtgggcacgggaacagctgtagtgtgtgcccccccgggctttggccacaggtctccctctcgaggtgtggttgtgactgcgacccttcccttgccgtgatgccttcctcccccggggcttggtccagctccttcactctctagcagctgctggggcccacctcccatgccgaggaccagcaggggaaacctccagggagcatctgcaggctctgcttctgcccggctgctggcttgctctccctggtggctctccagcggccagcttcctcacccacccggcactctgctttgctctgtctcctgaggtgggcctgaccaacctccccttctctgcctcagtccctgggctccagggctcagctccacagccctctgcctagcaggctggttctccctgccaagcccatacctgtggtcacctggccctcctgtggtctgagtaccactcccctgccccaggagccactcccactccagctgcctgtttccagcaggttcccagtgcccccgacaagcccctgctggtgtctccatctcctgccaagcatcctccagtgcctcctcctgtgggcctggcctcagggctatggacagactcctgtcccatcccagagacccctcgtgatcgttccctggcacgtgggccgtggcccggctgggtcggctgaagaactgcggatggaagctgcggaagaggccctgatggggcccaccatcccggacccaagtcttccggaagccatcacctggatgcctacgtgggaagggacctcgaatgtgggaccccagcccctctccagctcgaaatccctccacagccacggggacaccctgcacctattcccacgggacaggctggacccagagactctggacccggggcctccccttgagtagagacccgccctctgactgatggacgccgctgacctggggtcagacccgtgggctggacccctgcccaccccgcaggaaccctgaggcctaggggagctgttgagccttcagtgtctgcatgtgggaagtgggctccttcacctacctcacagggctgttgtgaggggcgctgtgatgcggttccaaagcacagggcttggcgcaccccactgtgctctcaataaatgtgtttcctgtcttaacaaaaa

SEQ ID NO: 366308 - DNA, 12084 bp, Homo sapiens
atatcagggtggtttataaagcctgtaaacacacctaagaaaataaacattttacaaatgaaaaaaaaaaaaaaaaaaaaaaaaaagcagagagggagcgcgccttggctcgctggccttggcggcggctcctcaggagagctggggcgcccacgagaggatccctcacccgggtctctcctcagggatgacatcatccgtccacctccttgtcttcaaggaccacctcctctccatgctgagctgctgccaaggggcctgctgcccatctacacctcacgagggcactaggagcacggtttcctggatcccaccaacatacaaagcagccactcactgacccccaggaccaggatggcaaaggatgaagaggaccggaactgaccagccagctgtccctcttacctaaagacttaaaccaatgccctagtgagggggcattgggcattaagccctgacctttgctatgctcatactttgactctatgagtactttcctataagtctttgcttgtgttcacctgctagcaaactggagtgtttccctccccaagggggtgtcagtctttgtcgactgactctgtcatcacccttatgatgtcctgaatggaaggatccctttgggaaattctcaggagggggacctgggccaagggcttggccagcatcctgctggcaactccaaggccctgggtgggcttctggaatgagcatgctactgaatcaccaaaggcacgccccacctctctgaagatcttcctatccttttctgggggaatggggtcgatgagagcaacctcctagggttgttgtgagaattaaatgagataaaagaggcctcaggcaggatctggcatagaggaggtgatcagcaaatgtttgttgaaaaggtttgacaggtcagtcccttcccacccctcttgcttgtcttacttgtcttatttattctccaacagcactccaggcagcccttgtccacgggctctccttgcatcaggtaggggctttgcagagaccatcgacgggctgacttgagtaagaacacgaattatgcatgtggccatttccagagcactttctatgtgatatgaacatgtgatttttatgtaatatgtgtatgtaaacgaggcagcctcatttccaggtgaggatgcatttggtagtgttgatttttgtaatttaaagaagctgaaagggagagaggacccgtgaggactgaactctctgtcccatggggtagggcttacatttacattaaagaaacagaaacttgctgggaggtgtaagtatttggtcacattgctggcaacagaaggggttggagttggacccagggtgccacgctagctgccctcaccccttcttcccctctggcccagagttatactaagagtccttttatttcaaaccaaatgtttgacaatgggacagtctgtttgaaatcccagctgcctggggtggtcttggggggtctgggtggccccagtgctggtaccatgtgctggcttcaccttttaataacagtgtgaccttaaacaagtcgcttaactactctaagtttcagtttctttcatggtctaaatggagattaaaacacacacacacacacacacacacacacacacacacacacaccctcgtgtatctaccccacagggcgcttttgaagaccaaatgctgtaactactatgaaagtgctttgtaaattgctgtggaaagtgtgagctactcaagcacccgaggctgtccctccttgctcacatgtccagcccaattctcccttagtgagaacagcactcagtaggtgctgtgtgtgtttgtgttcaattaagaaattccagaataaataaaaatgaattaattcaacaaacattttctggggcaccgacaatctgcccagtgcaccaggctaggtatctgatacaaagataatgaaaacagtctcttggaacctaattggggtcctcatttgaccaggaatttctttcgtcccgttttaagccaaccagttttgtccggacaagacaaaaacaacttgggctgctttagagaagcccagctcagtgtagacaatagctgcccagcctctgaaaggggctgattggattatgtggcaaatggaggtgcaaggatgacttggacggtgacaaatgaagtgggcggagacctgctttgagttaatccaggctattaggaggggaccttttgtcttccagagactggcaggagcttttaccagtggtttttacatccttaatgttcaggacgaataatttatggtcagtgaaaatccaggccccagtgagattcgagtgggctgtaaaatcgagagtcctgctcccagtgagtaatggtagtgaatgtttctgtcactttttgcaaccgtccattcatttgatcctcacaactccctgtcctgagccaggaccggccactgccactcccagggaaacagaggctgtcaagaggctccacagattgggccccactggatcattgaacccctgttccctgagttctagaggaagaattgtacctgtctcagtcccggccacctccagaaggcctccctctgcatttctgactttgctgtgccggcagcctggagcctcccaggtccctgctgtcatcttttctagccactacagtctctgtctttcctttcacagccccaagcttcttgaaaggcctgtctacacttgctgtcttccttcctcacctccaatttcctcttcaacccactgcttcctgactcgctctactccgtggaagcacgctcacaaaggtaaagacttttctgtggcttaatccttgtcatgttttcggctcatggacacaaggacacattttcatgccttctctcacagggctctgcgtctccggttcacttctgtgtctttacactcccttcacagagacacttgctcccccttctctcgttcttagcatcccctaggaacttgcacacccaggtctctcgacttctggacctgcttcttaccatgccgtcttaagcagtcaggagtcgctgcctgggttcgagtcctagttaaattacttagtgctgagaccttggggtaggtaaacttttccaagccaggtttatctcagtttcaaaatagggttaatcgtctttatctggcaggtcaggtgggatgtctcacaggtaagcaccagatgccatttgaaaggcttgaagcaaagtcaataaagcattcatgggaaaatacaactggaggcaccactagattttcgtatacattaggttcccacggggaggaccgaagagagaagaaagaagtggaaagggaggagcgtgcaggagagacaggagaagagaataactaaacaaagacattaaagacaaaaaaaaagtaggaaagggagacttagaaaatattaaaagccaccaaaaacacatccaaagacggtttccccttacgttagttgggctaaaagaaagcaaatgggaagaaggttttaaattgattatcccagtgacaaatcccaggaagctttcacatcaaatcaccctattctgggtttttaactccttccatcgagtttaacctctttacctcccacatcctggtaaaccctgccccctccctaccgccccctttgctggtgattaaatcctgaaggtacacgaagtatttcagtgaatgaatggctaacagaaaagggcctcccctcccccttaccctggcggtgtttttcagttttattccactttccgcccttttcccttaatgaacacagggctaatctcgggccttgtcgaaggaagaggctgcagacgttaatgaggttagctgctggattccagtattcgtcgcataaggatccttctttgtctgcgaaggaaaaacacactgattatcataatgagtaatgaggtgaactggccaccgccgggccggggcgatgtggcttcttaagccacacttctaattttggtgatggagccgacatttctttggcttctcatttaagtctttgcctctgtcccagtgcgaagtccattcagcggggttgaaagttgcaggcagctttgggaaggggggcgtcggacagggttgcattgtagaaagtggctttgttcgatccttcgcacagatgcaaatggccagagcattcattccctttcttcaagagctgaggactgggggggccactggtgatcagttcccaactctagctctcctctgactcatctcaggacccattgaggacatccaaaactcactcaagatcaccaagtggtaggaaagtactaactcctgggcatagccctaggggagtgactacaatgtgaatactcatggaatgcctagccaggtgaagaagtgaatgcatgttggcatcccagagggaccccccttaagagggcatagtttggggttcagatttgactccagcatactgttgaaattgggcacagggggctagtgattagtcaggatcaatcagtggagaggagattaaaactcacatctgggagtccggaatcagaacttgtagttcttttttttgaaatggagtctcgctctgtcgcccaggctggagtgcagtggcgtgatctcggctcactgcaacctctgccttccgggttcaagcaattctcccacctcagcctcctgagtagctgggattacaggcgcccaccaccacagccggctactttttgtatttttaggagagacggggtttcaccatgttggtcaggctggtcttgaactcctgacctcatgatccacctgccttagcctcccaaagtgctgggattacaggcgtgagccaccatgcccagccctatagtagttcttcttttgccccttaatatcctcacccacatgtcctgtaccctgcctgaaccctcctcctctttttgttctgatctttgagctccctagagcccataattctttagagcaggtatgtcccgagtctgaaacatgcccttatttgtcccaagctctggacatttctcaccccaaggcggatcaatcatgattaaatcactccaattaaactttaggctccagtcagaccttcagccaaatggaaaaaaaaactaggggataagggaggtagttggagcaagaaaatgttattagttgaaaccttacgggaccttcctcccttagtgagtctgttggctaaaggttctctggcttcgtgaattagaatcggatactgtttccaagttagcaaaaccaactctaccccagcaccccacgaggaagaatgtggaaggatctcccattggccggttggggcaaaagcctgaggcaatctttcatccccttttgccaaggcgagactttcccagtgacggtgatgtagttggccactctgactatgggtggactcgggtgtagacctctgaagctgagatcacacgaaaacctggcctccccgccatgtagctgttggagagtagaaaaatagagcacgcctgatgtttctaaatgagaagactttcaatagtaatgaagaatccatggcactctcctcaccctcaaacacatggcagtcattcacatacaggccccaaagccactgttagtgctgcagtagctcctgtggacattggaaagcccggagagggcgtggaagaaatcagctggcccccggcaggttctctggggttttgtgcccaaggctcctggagccctaaaaactttcaaaagttaactccccacgtccccatcctgcttgggtttctggacttttctgaggcaccggcagaggggtctcgttgctcccttgagtgtaggggcagccctttaacctggctccttgagtccctgctttttctgcttctgttgccttcttcctcgtcttcctctctctcaatatctccctctctttgtccctccccagttcctgacctggccatcccggggtgcccttgaccagccccgtgtctcctcagggtgtcccagcaccagcctggcacagagtggggctcagttagagtatgtgggatgttggtttcgccaggtgagtgaatgaaaggactcgaccaccacagctgagccactagctgggccatgcgaagagttctaggtgcaaaggctggagggtggaattcatttttgagaggtgtgtgagcagcttccgacccctgccccatttgaacgggggccttgctggtcgcgtccctgcattcacccgcgcggccatcccgtcatccaacagttgatcctaactgagcacgcccacggccctggtctggcctgggcaccggccaccgtagcccatcccttgatggcctctgtgtccccaggagggcgggccggggggttgcccaggggctggagcagtggactgtggctccatagaggtaggccggagggtgtgagggcagattcaagctatccccagggctctgctctggtcggagccagccccttctccctctctgccttccccgccccattcctgatgctgaactgttctggacccctggccctgagtctctcaggaccaaagtgggcacgggaacagctgtagtgtgtgcccccccgggctttggccacaggtctccctctcgaggtgtggttgtgactgcgacccttcccttgccgtgatgccttcctcccccggggcttggtccagctccttcactctctagcagctgctggggcccacctcccatgccgaggaccagcaggggaaacctccagggagcatctgcaggctctgcttctgcccggctgctggcttgctctccctggtggctctccagcggccagcttcctcacccacccggcactctgctttgctctgtctcctgaggtgggcctgaccaacctccccttctctgcctcagtccctgggctccagggctcagctccacagccctctgcctagcaggctggttctccctgccaagcccatacctgtggtcacctggccctcctgtggtctgagtaccactcccctgccccaggagccactcccactccagctgcctgtttccagcaggttcccagtgcccccgacaagcccctgctggtgtctccatctcctgccaagcatcctccagtgcctcctcctgtgggcctggcctcagggctatggacagactcctgtcccatcccagagacccctcgtgatcgttccctggcacgtgggccgtggcccggctgggtcggctgaagaactgcggatggaagctgcggaagaggccctgatggggcccaccatcccggacccaagtcttcttcctggcgggcctctcgtctccttcctggtttgggcggaagccatcacctggatgcctacgtgggaagggacctcgaatgtgggaccccagcccctctccagctcgaaatcggcagactaggatggaagtgccctgtgagctggggggcccttcaaagggccaaggagaaaacgcaggccgagggaccagccttccaaatgggcttcaagctccaatgacctccgctcgccccctcgaaatgtctggaaaacataatgggcagattttctgtcttcaaagtttccggctaaacctcttcaagttctttattgtttgggactgagacactcagccatgttaatgggtagtttcttttgtatttgccttgaaaggccaaaatatttttatattgccacagacaaagccacctatttaaaaatgaactccatgtccgtcgtttcccaccaggagactatgtaccatgtgtgtgtctctatgtattctggggtcttgaaacaggtttctcatggggatggtcattcaccacggtccagaggggcagaacaggcggcgcttgccttgcccagggggcctggggaacgtgggccctcatctcagatctgcccccagtatgtttaggacgcgagccccagaaggatctgggagtaaacttaacattcactgtgtctctgctctgcatccgccatttgtgtgtgtttctggactgtgggctgtgtgtaccttggttggtgactcagtgagaagaagcaggaatgccaaagatactgtgaatgttctgagttttgttgctgttgttgttgagaggttgtttcactggtatctattgcattgtataataaatgaccagatgaatgaatgagtgaagcaagagagaatgaataaacaagtaaataggtaaagaagtaagcaagccaggatgagagtgtgtgtacacaagaccatggttcatccgctttgatggctaggcaatcaatatataaatagaaaaaacccagtgaatcactaagtaatagggcaacacacaaagcgatatcaggtgattatggactaaggggtatgtgtaactcaaatatatgcctctgacatttgacaatgaaaaagaacctaaatgaaagaaagaatggatgtatgagtagtgaagtgcagaatgagacatagattttgaggcccgtcaaaatgaaaagatgcaagttagggaacaagtgatcaaaagggagaagggaaaggttttttttaaaaaaccaaaacaacaaagaaaggttaaaaaaaaaaacagactagaggatgagtaatgagtaactctgtaaggaggaccatgtcagactattgtaagctaagcattaggactgatacaaataatatatgctcctggcatagaaaaataaaccacagagaacgagttcaaagaatagcaaagaaagaaagaggacccagtgggcgaaagatgagagtgtacttttaccaaaagttatctaagcctgagcacttgaagtctgcacataaataaataaatgacaaaagaaagaaaaaaaggccaaaaagtctacattgcgtgtgtggatggatgaatgagcagtgggagtgcagcgccaggtgacaagatgttgtgaggggttttgagtcatccagtcctgggcactgaggtctgttagatgaaaggatatgagaaaggtaatattggtaaataaagaaataggaaacaatgtaacaaatgttaagtacagaaatacattaatgggtggtaaataaagatgtaaaagaaggcaatgcgatcgatggtggcaaaagatcatcacagattaagggctatggctggtccacttctagaaaaccacaggctgtccattaaataatgaacatctaagtgaacaagtcagtgagtacctaaatagacaaggatgaggtgaatgagaagacatggccccatgggtcctcctgatgagggtgttggggtcccccctgggcaccccagctgcatgaaaatgaaggacaggaggtatggaaagctatgacagaagagagaaaggaacggtaaaaagaaataacaaccaaatggataaatgggtagatccacgagaagagttaggctaggacttgtcataagggcacctgactccactaatagaggaataaatgcctaataaaaagagagcaagcaggaaggaaggatgctatgaatgcaggaaggaagtaatgagtgagacgtggaaccgcacggccaaggatggacgtttgcgggtggctttttgatgcgtacagccaagccactccatggcaatgagctccgaagacaaagtgcaagagagaatgagtgagagagtgagagagagagaaacaataaaaaatgggaagaaatgtaaaaaggaagaaaggaagagaggtaatatattaaggaataaatacatgcatgcagatttaagacagagccatgctagaacaggaatgaaaggctgtgtgaaccaagcagaccgcttaattggcaccagtgctgctggtatggtcaatcacctactcaactaaggaacggctcaaagcatacacatgggagggaggagtggggccacagagagagggcccattagttgcagattacgatgtatccagttaggtgcacctgccttcgagaagtgtaaaaataagtatttacatagaaagaaagactgaatggatgcacggtgaatgcatgaatgattgaacgacagaaaagatttgcattgaccgatgaggagggcattgtagacagggatgagggtcattgatcctgggtgcagatctccaaaagaatgacagaaagaaagagggagtggtggaaagaaacaataggatgggaaaaaatgaaaatagaaaaaaggaagtgaaagagataataaataattagatcaaataagttgatgaaaggggactggtttagcacaagccatccacattaattcaaacctgtggctctgaagtttgttttttaaatgaccacaagtgtaagactgaatgaaagaataaatgcgtgcattccataggatgcaagaaaaggagtgaggaatgggaaaattggaagaacgagagagggagagatgtaagaaaagaaaggaaaagtgaagtaggcatatgaaagaaaaggcacttcttggacaagcactgaaatataatgagacagttttacccattaaatataataaacagtaaacgttgaggttcatcaataaaagcacagatacctgaatagaggagtgacctgaatagaattcgttcagccgaacgaatgagaatggatgattttcactatcctgtgcactcaaggcccaaaagagaaagcaagagaggagagaatatggaaacgtatgacaggatgtatataagcaatacaaacatattgaatgaataaataaagacataaatatgtgggagagtggaccacgcaaggacaaaaagaggagagaaggcagcaagaattatgactaattcaaaactgggttcctgagatagttaaataaatcctgcaccaaatccccagggggagaaattaacaaacaaaagacagccccacacggaccagtgtgcagaaggctccaggaaccgcagattatggttaatccaattctgtgcacctgaggtccataaataaaagaataagtattgaaatgaaagaatgacagaaagaatgaatggacacatgaacgactgaattagaaatggaaatgcctggcacagccaggaaggagctgcccatgggattgtcattcatctcactctgggcacctgaggtccataagcgtgaaaagaggcaggaagagaagtgtcagggagtcaaagatagagctaaggaaaggcaaaaatgaaactaaatgaaagcgaaagggaaaataaagaaaaaccaataaaaaagagaacgaatacgtgggtgtatctgtaagagtaggatctgttaggattagtcataagactgtcagtaatcctgaagatggatgagataatccaggcccaggttcccagggggagggaaaatggagaaaatataaaaagatgtgaaaaaggaaaaaggaaaggtaataaacaaacaaccaaagtgataaatggatagttaagggaggttgtctgaacagggattataattagtttacatacatactccttaaacagataaatacattacacctttcaaagaataaatgaaaaatagagagacatacctggctccaaaacaaggctgtatcttctgccactgtaataaaatagatgcaattgaggttcataaataaaagaataaatacttaaacgtgaaaggtgactaaatgcggggaagaaagattgcaaataaatacatgggccaaagatgtttggtttgcccatggagttttaattaaaaaaattaataaggaaaacaaatacccaaaataaggaagactgacaaatgagtgagtggatgagagagtgaatggtgcttgacgtaggagcagtagtgctttagggaccagcatgaaggtggtgaccgggagccctgattcatgggattctgtccacctgactttataagaaccaagaatggctgggaatggtggctcacgcctgtaatcccagcactttgggaggccgaggtgggcggatcatgaggtcaggagtttgagaccagccagtttgagatcagcctggccaacatggtgaaattccatctctactaaaaaaatacaaaaattatgggcgtggtggcacctgtctgtaatcctagctactcgggaggctgagagaggagaattgcttgaacccgggaggtgggaggttgtagtgagccaagattgcaccactgcactccagcctgggctacagagcaagacactatcttagatccaaaaaag

SEQ ID NO: 366309 - DNA, 9158 bp, Homo sapiens
atatcagggtggtttataaagcctgtaaacacacctaagaaaataaacattttacaaatgaaaaaaaaaaaaaaaaaaaaaaaaaagcagagagggagcgcgccttggctcgctggccttggcggcggctcctcaggagagctggggcgcccacgagaggatccctcacccgggtctctcctcagggatgacatcatccgtccacctccttgtcttcaaggaccacctcctctccatgctgagctgctgccaaggggcctgctgcccatctacacctcacgagggcactaggagcacggtttcctggatcccaccaacatacaaagcagccactcactgacccccaggaccaggatggcaaaggatgaagaggaccggaactgaccagccagctgtccctcttacctaaagacttaaaccaatgccctagtgagggggcattgggcattaagccctgacctttgctatgctcatactttgactctatgagtactttcctataagtctttgcttgtgttcacctgctagcaaactggagtgtttccctccccaagggggtgtcagtctttgtcgactgactctgtcatcacccttatgatgtcctgaatggaaggatccctttgggaaattctcaggagggggacctgggccaagggcttggccagcatcctgctggcaactccaaggccctgggtgggcttctggaatgagcatgctactgaatcaccaaaggcacgccccacctctctgaagatcttcctatccttttctgggggaatggggtcgatgagagcaacctcctagggttgttgtgagaattaaatgagataaaagaggcctcaggcaggatctggcatagaggaggtgatcagcaaatgtttgttgaaaaggtttgacaggtcagtcccttcccacccctcttgcttgtcttacttgtcttatttattctccaacagcactccaggcagcccttgtccacgggctctccttgcatcaggtaggggctttgcagagaccatcgacgggctgacttgagtaagaacacgaattatgcatgtggccatttccagagcactttctatgtgatatgaacatgtgatttttatgtaatatgtgtatgtaaacgaggcagcctcatttccaggtgaggatgcatttggtagtgttgatttttgtaatttaaagaagctgaaagggagagaggacccgtgaggactgaactctctgtcccatggggtagggcttacatttacattaaagaaacagaaacttgctgggaggtgtaagtatttggtcacattgctggcaacagaaggggttggagttggacccagggtgccacgctagctgccctcaccccttcttcccctctggcccagagttatactaagagtccttttatttcaaaccaaatgtttgacaatgggacagtctgtttgaaatcccagctgcctggggtggtcttggggggtctgggtggccccagtgctggtaccatgtgctggcttcaccttttaataacagtgtgaccttaaacaagtcgcttaactactctaagtttcagtttctttcatggtctaaatggagattaaaacacacacacacacacacacacacacacacacacacacacaccctcgtgtatctaccccacagggcgcttttgaagaccaaatgctgtaactactatgaaagtgctttgtaaattgctgtggaaagtgtgagctactcaagcacccgaggctgtccctccttgctcacatgtccagcccaattctcccttagtgagaacagcactcagtaggtgctgtgtgtgtttgtgttcaattaagaaattccagaataaataaaaatgaattaattcaacaaacattttctggggcaccgacaatctgcccagtgcaccaggctaggtatctgatacaaagataatgaaaacagtctcttggaacctaattggggtcctcatttgaccaggaatttctttcgtcccgttttaagccaaccagttttgtccggacaagacaaaaacaacttgggctgctttagagaagcccagctcagtgtagacaatagctgcccagcctctgaaaggggctgattggattatgtggcaaatggaggtgcaaggatgacttggacggtgacaaatgaagtgggcggagacctgctttgagttaatccaggctattaggaggggaccttttgtcttccagagactggcaggagcttttaccagtggtttttacatccttaatgttcaggacgaataatttatggtcagtgaaaatccaggccccagtgagattcgagtgggctgtaaaatcgagagtcctgctcccagtgagtaatggtagtgaatgtttctgtcactttttgcaaccgtccattcatttgatcctcacaactccctgtcctgagccaggaccggccactgccactcccagggaaacagaggctgtcaagaggctccacagattgggccccactggatcattgaacccctgttccctgagttctagaggaagaattgtacctgtctcagtcccggccacctccagaaggcctccctctgcatttctgactttgctgtgccggcagcctggagcctcccaggtccctgctgtcatcttttctagccactacagtctctgtctttcctttcacagccccaagcttcttgaaaggcctgtctacacttgctgtcttccttcctcacctccaatttcctcttcaacccactgcttcctgactcgctctactccgtggaagcacgctcacaaaggtaaagacttttctgtggcttaatccttgtcatgttttcggctcatggacacaaggacacattttcatgccttctctcacagggctctgcgtctccggttcacttctgtgtctttacactcccttcacagagacacttgctcccccttctctcgttcttagcatcccctaggaacttgcacacccaggtctctcgacttctggacctgcttcttaccatgccgtcttaagcagtcaggagtcgctgcctgggttcgagtcctagttaaattacttagtgctgagaccttggggtaggtaaacttttccaagccaggtttatctcagtttcaaaatagggttaatcgtctttatctggcaggtcaggtgggatgtctcacaggtaagcaccagatgccatttgaaaggcttgaagcaaagtcaataaagcattcatgggaaaatacaactggaggcaccactagattttcgtatacattaggttcccacggggaggaccgaagagagaagaaagaagtggaaagggaggagcgtgcaggagagacaggagaagagaataactaaacaaagacattaaagacaaaaaaaaagtaggaaagggagacttagaaaatattaaaagccaccaaaaacacatccaaagacggtttccccttacgttagttgggctaaaagaaagcaaatgggaagaaggttttaaattgattatcccagtgacaaatcccaggaagctttcacatcaaatcaccctattctgggtttttaactccttccatcgagtttaacctctttacctcccacatcctggtaaaccctgccccctccctaccgccccctttgctggtgattaaatcctgaaggtacacgaagtatttcagtgaatgaatggctaacagaaaagggcctcccctcccccttaccctggcggtgtttttcagttttattccactttccgcccttttcccttaatgaacacagggctaatctcgggccttgtcgaaggaagaggctgcagacgttaatgaggttagctgctggattccagtattcgtcgcataaggatccttctttgtctgcgaaggaaaaacacactgattatcataatgagtaatgaggtgaactggccaccgccgggccggggcgatgtggcttcttaagccacacttctaattttggtgatggagccgacatttctttggcttctcatttaagtctttgcctctgtcccagtgcgaagtccattcagcggggttgaaagttgcaggcagctttgggaaggggggcgtcggacagggttgcattgtagaaagtggctttgttcgatccttcgcacagatgcaaatggccagagcattcattccctttcttcaagagctgaggactgggggggccactggtgatcagttcccaactctagctctcctctgactcatctcaggacccattgaggacatccaaaactcactcaagatcaccaagtggtaggaaagtactaactcctgggcatagccctaggggagtgactacaatgtgaatactcatggaatgcctagccaggtgaagaagtgaatgcatgttggcatcccagagggaccccccttaagagggcatagtttggggttcagatttgactccagcatactgttgaaattgggcacagggggctagtgattagtcaggatcaatcagtggagaggagattaaaactcacatctgggagtccggaatcagaacttgtagttcttttttttgaaatggagtctcgctctgtcgcccaggctggagtgcagtggcgtgatctcggctcactgcaacctctgccttccgggttcaagcaattctcccacctcagcctcctgagtagctgggattacaggcgcccaccaccacagccggctactttttgtatttttaggagagacggggtttcaccatgttggtcaggctggtcttgaactcctgacctcatgatccacctgccttagcctcccaaagtgctgggattacaggcgtgagccaccatgcccagccctatagtagttcttcttttgccccttaatatcctcacccacatgtcctgtaccctgcctgaaccctcctcctctttttgttctgatctttgagctccctagagcccataattctttagagcaggtatgtcccgagtctgaaacatgcccttatttgtcccaagctctggacatttctcaccccaaggcggatcaatcatgattaaatcactccaattaaactttaggctccagtcagaccttcagccaaatggaaaaaaaaactaggggataagggaggtagttggagcaagaaaatgttattagttgaaaccttacgggaccttcctcccttagtgagtctgttggctaaaggttctctggcttcgtgaattagaatcggatactgtttccaagttagcaaaaccaactctaccccagcaccccacgaggaagaatgtggaaggatctcccattggccggttggggcaaaagcctgaggcaatctttcatccccttttgccaaggcgagactttcccagtgacggtgatgtagttggccactctgactatgggtggactcgggtgtagacctctgaagctgagatcacacgaaaacctggcctccccgccatgtagctgttggagagtagaaaaatagagcacgcctgatgtttctaaatgagaagactttcaatagtaatgaagaatccatggcactctcctcaccctcaaacacatggcagtcattcacatacaggccccaaagccactgttagtgctgcagtagctcctgtggacattggaaagcccggagagggcgtggaagaaatcagctggcccccggcaggttctctggggttttgtgcccaaggctcctggagccctaaaaactttcaaaagttaactccccacgtccccatcctgcttgggtttctggacttttctgaggcaccggcagaggggtctcgttgctcccttgagtgtaggggcagccctttaacctggctccttgagtccctgctttttctgcttctgttgccttcttcctcgtcttcctctctctcaatatctccctctctttgtccctccccagttcctgacctggccatcccggggtgcccttgaccagccccgtgtctcctcagggtgtcccagcaccagcctggcacagagtggggctcagttagagtatgtgggatgttggtttcgccaggtgagtgaatgaaaggactcgaccaccacagctgagccactagctgggccatgcgaagagttctaggtgcaaaggctggagggtggaattcatttttgagaggtgtgtgagcagcttccgacccctgccccatttgaacgggggccttgctggtcgcgtccctgcattcacccgcgcggccatcccgtcatccaacagttgatcctaactgagcacgcccacggccctggtctggcctgggcaccggccaccgtagcccatcccttgatggcctctgtgtccccaggagggcgggccggggggttgcccaggggctggagcagtggactgtggctccatagaggtaggccggagggtgtgagggcagattcaagctatccccagggctctgctctggtcggagccagccccttctccctctctgccttccccgccccattcctgatgctgaactgttctggacccctggccctgagtctctcaggaccaaagtgggcacgggaacagctgtagtgtgtgcccccccgggctttggccacaggtctccctctcgaggtgtggttgtgactgcgacccttcccttgccgtgatgccttcctcccccggggcttggtccagctccttcactctctagcagctgctggggcccacctcccatgccgaggaccagcaggggaaacctccagggagcatctgcaggctctgcttctgcccggctgctggcttgctctccctggtggctctccagcggccagcttcctcacccacccggcactctgctttgctctgtctcctgaggtgggcctgaccaacctccccttctctgcctcagtccctgggctccagggctcagctccacagccctctgcctagcaggctggttctccctgccaagcccatacctgtggtcacctggccctcctgtggtctgagtaccactcccctgccccaggagccactcccactccagctgcctgtttccagcaggttcccagtgcccccgacaagcccctgctggtgtctccatctcctgccaagcatcctccagtgcctcctcctgtgggcctggcctcagggctatggacagactcctgtcccatcccagagacccctcgtgatcgttccctggcacgtgggccgtggcccggctgggtcggctgaagaactgcggatggaagctgcggaagaggccctgatggggcccaccatcccggacccaagtcttcttcctggcgggcctctcgtctccttcctggtttgggcggaagccatcacctggatgcctacgtgggaagggacctcgaatgtgggaccccagcccctctccagctcgaaatcggcagactaggatggaagtgccctgtgagctggggggcccttcaaagggccaaggagaaaacgcaggccgagggaccagccttccaaatgggcttcaagctccaatgacctccgctcgccccctcgaaatgtctggaaaacataatgggcagattttctgtcttcaaagtttccggctaaacctcttcaagttctttattgtttgggactgagacactcagccatgttaatgggtagtttcttttgtatttgccttgaaaggccaaaatatttttatattgccacagacaaagccacctatttaaaaatgaactccatgtccgtcgtttcccaccaggagactatgtaccatgtgtgtgtctctatgtattctggggtcttgaaacaggtttctcatggggatggtcattcaccacggtccagaggggcagaacaggcggcgcttgccttgcccagggggcctggggaacgtgggccctcatctcagatctgcccccagtatgtttaggacgcgagccccagaaggatctgggagtaaacttaacattcactgtgtctctgctctgcatccgccatttgtgtgtgtttctggactgtgggctgtgtgtaccttggttggtgactcagtgagaagaagcaggaatgccaaagatactgtgaatgttctgagttttgttgctgttgttgttgagaggttgtttcactggtatctattgcattgtataataaatgaccagatgaatgaatgagtgaagcaagagagaatgaataaacaagtaaataggtaaagaagtaagcaagccaggatgagagtgtgtgtacacaagaccatggttcatccgctttgatggctaggcaatcaatatataaatagaaaaaacccagtgaatcactaagtaatagggcaacacacaaagcgatatcaggtgattatggactaaggggtatgtgtaactcaaatatatgcctctgacatttgacaatgaaaaagaacctaaatgaaagaaagaatggatgtatgagtagtgaagtgcagaatgagacatagattttgaggcccgtcaaaatgaaaagatgcaagttagggaacaagtgatcaaaagggagaagggaaaggttttttttaaaaaaccaaaacaacaaagaaaggttaaaaaaaaaaacagactagaggatgagtaatgagtaactctgtaaggaggaccatgtcagactattgtaagctaagcattaggactgatacaaataatatatgctcctggcatagaaaaataaaccacagagaacgagttcaaagaatagcaaagaaagaaagaggacccagtgggcgaaagatgagagtgtacttttaccaaaagttatctaagcctgagcacttgaagtctgcacataaataaataaatgacaaaagaaagaaaaaaaggccagcgaggccgggagcaggtggccttcatctgcaactgtgtctctctcagcctccacagccacggggacaccctgcacctattcccacgggacaggctggacccagagactctggacccggggcctccccttgagtagagacccgccctctgactgatggacgccgctgacctggggtcagacccgtgggctggacccctgcccaccccgcaggaaccctgaggcctaggggagctgttgagccttcagtgtctgcatgtgggaagtgggctccttcacctacctcacagggctgttgtgaggggcgctgtgatgcggttccaaagcacagggcttggcgcaccccactgtgctctcaataaatgtgtttcctgtcttaacaaaaa

SEQ ID NO: 366310 - DNA, 8098 bp, Homo sapiens
atatcagggtggtttataaagcctgtaaacacacctaagaaaataaacattttacaaatgaaaaaaaaaaaaaaaaaaaaaaaaaagcagagagggagcgcgccttggctcgctggccttggcggcggctcctcaggagagctggggcgcccacgagaggatccctcacccgggtctctcctcagggatgacatcatccgtccacctccttgtcttcaaggaccacctcctctccatgctgagctgctgccaaggggcctgctgcccatctacacctcacgagggcactaggagcacggtttcctggatcccaccaacatacaaagcagccactcactgacccccaggaccaggatggcaaaggatgaagaggaccggaactgaccagccagctgtccctcttacctaaagacttaaaccaatgccctagtgagggggcattgggcattaagccctgacctttgctatgctcatactttgactctatgagtactttcctataagtctttgcttgtgttcacctgctagcaaactggagtgtttccctccccaagggggtgtcagtctttgtcgactgactctgtcatcacccttatgatgtcctgaatggaaggatccctttgggaaattctcaggagggggacctgggccaagggcttggccagcatcctgctggcaactccaaggccctgggtgggcttctggaatgagcatgctactgaatcaccaaaggcacgccccacctctctgaagatcttcctatccttttctgggggaatggggtcgatgagagcaacctcctagggttgttgtgagaattaaatgagataaaagaggcctcaggcaggatctggcatagaggaggtgatcagcaaatgtttgttgaaaaggtttgacaggtcagtcccttcccacccctcttgcttgtcttacttgtcttatttattctccaacagcactccaggcagcccttgtccacgggctctccttgcatcaggtaggggctttgcagagaccatcgacgggctgacttgagtaagaacacgaattatgcatgtggccatttccagagcactttctatgtgatatgaacatgtgatttttatgtaatatgtgtatgtaaacgaggcagcctcatttccaggtgaggatgcatttggtagtgttgatttttgtaatttaaagaagctgaaagggagagaggacccgtgaggactgaactctctgtcccatggggtagggcttacatttacattaaagaaacagaaacttgctgggaggtgtaagtatttggtcacattgctggcaacagaaggggttggagttggacccagggtgccacgctagctgccctcaccccttcttcccctctggcccagagttatactaagagtccttttatttcaaaccaaatgtttgacaatgggacagtctgtttgaaatcccagctgcctggggtggtcttggggggtctgggtggccccagtgctggtaccatgtgctggcttcaccttttaataacagtgtgaccttaaacaagtcgcttaactactctaagtttcagtttctttcatggtctaaatggagattaaaacacacacacacacacacacacacacacacacacacacacaccctcgtgtatctaccccacagggcgcttttgaagaccaaatgctgtaactactatgaaagtgctttgtaaattgctgtggaaagtgtgagctactcaagcacccgaggctgtccctccttgctcacatgtccagcccaattctcccttagtgagaacagcactcagtaggtgctgtgtgtgtttgtgttcaattaagaaattccagaataaataaaaatgaattaattcaacaaacattttctggggcaccgacaatctgcccagtgcaccaggctaggtatctgatacaaagataatgaaaacagtctcttggaacctaattggggtcctcatttgaccaggaatttctttcgtcccgttttaagccaaccagttttgtccggacaagacaaaaacaacttgggctgctttagagaagcccagctcagtgtagacaatagctgcccagcctctgaaaggggctgattggattatgtggcaaatggaggtgcaaggatgacttggacggtgacaaatgaagtgggcggagacctgctttgagttaatccaggctattaggaggggaccttttgtcttccagagactggcaggagcttttaccagtggtttttacatccttaatgttcaggacgaataatttatggtcagtgaaaatccaggccccagtgagattcgagtgggctgtaaaatcgagagtcctgctcccagtgagtaatggtagtgaatgtttctgtcactttttgcaaccgtccattcatttgatcctcacaactccctgtcctgagccaggaccggccactgccactcccagggaaacagaggctgtcaagaggctccacagattgggccccactggatcattgaacccctgttccctgagttctagaggaagaattgtacctgtctcagtcccggccacctccagaaggcctccctctgcatttctgactttgctgtgccggcagcctggagcctcccaggtccctgctgtcatcttttctagccactacagtctctgtctttcctttcacagccccaagcttcttgaaaggcctgtctacacttgctgtcttccttcctcacctccaatttcctcttcaacccactgcttcctgactcgctctactccgtggaagcacgctcacaaaggtaaagacttttctgtggcttaatccttgtcatgttttcggctcatggacacaaggacacattttcatgccttctctcacagggctctgcgtctccggttcacttctgtgtctttacactcccttcacagagacacttgctcccccttctctcgttcttagcatcccctaggaacttgcacacccaggtctctcgacttctggacctgcttcttaccatgccgtcttaagcagtcaggagtcgctgcctgggttcgagtcctagttaaattacttagtgctgagaccttggggtaggtaaacttttccaagccaggtttatctcagtttcaaaatagggttaatcgtctttatctggcaggtcaggtgggatgtctcacaggtaagcaccagatgccatttgaaaggcttgaagcaaagtcaataaagcattcatgggaaaatacaactggaggcaccactagattttcgtatacattaggttcccacggggaggaccgaagagagaagaaagaagtggaaagggaggagcgtgcaggagagacaggagaagagaataactaaacaaagacattaaagacaaaaaaaaagtaggaaagggagacttagaaaatattaaaagccaccaaaaacacatccaaagacggtttccccttacgttagttgggctaaaagaaagcaaatgggaagaaggttttaaattgattatcccagtgacaaatcccaggaagctttcacatcaaatcaccctattctgggtttttaactccttccatcgagtttaacctctttacctcccacatcctggtaaaccctgccccctccctaccgccccctttgctggtgattaaatcctgaaggtacacgaagtatttcagtgaatgaatggctaacagaaaagggcctcccctcccccttaccctggcggtgtttttcagttttattccactttccgcccttttcccttaatgaacacagggctaatctcgggccttgtcgaaggaagaggctgcagacgttaatgaggttagctgctggattccagtattcgtcgcataaggatccttctttgtctgcgaaggaaaaacacactgattatcataatgagtaatgaggtgaactggccaccgccgggccggggcgatgtggcttcttaagccacacttctaattttggtgatggagccgacatttctttggcttctcatttaagtctttgcctctgtcccagtgcgaagtccattcagcggggttgaaagttgcaggcagctttgggaaggggggcgtcggacagggttgcattgtagaaagtggctttgttcgatccttcgcacagatgcaaatggccagagcattcattccctttcttcaagagctgaggactgggggggccactggtgatcagttcccaactctagctctcctctgactcatctcaggacccattgaggacatccaaaactcactcaagatcaccaagtggtaggaaagtactaactcctgggcatagccctaggggagtgactacaatgtgaatactcatggaatgcctagccaggtgaagaagtgaatgcatgttggcatcccagagggaccccccttaagagggcatagtttggggttcagatttgactccagcatactgttgaaattgggcacagggggctagtgattagtcaggatcaatcagtggagaggagattaaaactcacatctgggagtccggaatcagaacttgtagttcttttttttgaaatggagtctcgctctgtcgcccaggctggagtgcagtggcgtgatctcggctcactgcaacctctgccttccgggttcaagcaattctcccacctcagcctcctgagtagctgggattacaggcgcccaccaccacagccggctactttttgtatttttaggagagacggggtttcaccatgttggtcaggctggtcttgaactcctgacctcatgatccacctgccttagcctcccaaagtgctgggattacaggcgtgagccaccatgcccagccctatagtagttcttcttttgccccttaatatcctcacccacatgtcctgtaccctgcctgaaccctcctcctctttttgttctgatctttgagctccctagagcccataattctttagagcaggtatgtcccgagtctgaaacatgcccttatttgtcccaagctctggacatttctcaccccaaggcggatcaatcatgattaaatcactccaattaaactttaggctccagtcagaccttcagccaaatggaaaaaaaaactaggggataagggaggtagttggagcaagaaaatgttattagttgaaaccttacgggaccttcctcccttagtgagtctgttggctaaaggttctctggcttcgtgaattagaatcggatactgtttccaagttagcaaaaccaactctaccccagcaccccacgaggaagaatgtggaaggatctcccattggccggttggggcaaaagcctgaggcaatctttcatccccttttgccaaggcgagactttcccagtgacggtgatgtagttggccactctgactatgggtggactcgggtgtagacctctgaagctgagatcacacgaaaacctggcctccccgccatgtagctgttggagagtagaaaaatagagcacgcctgatgtttctaaatgagaagactttcaatagtaatgaagaatccatggcactctcctcaccctcaaacacatggcagtcattcacatacaggccccaaagccactgttagtgctgcagtagctcctgtggacattggaaagcccggagagggcgtggaagaaatcagctggcccccggcaggttctctggggttttgtgcccaaggctcctggagccctaaaaactttcaaaagttaactccccacgtccccatcctgcttgggtttctggacttttctgaggcaccggcagaggggtctcgttgctcccttgagtgtaggggcagccctttaacctggctccttgagtccctgctttttctgcttctgttgccttcttcctcgtcttcctctctctcaatatctccctctctttgtccctccccagttcctgacctggccatcccggggtgcccttgaccagccccgtgtctcctcagggtgtcccagcaccagcctggcacagagtggggctcagttagagtatgtgggatgttggtttcgccaggtgagtgaatgaaaggactcgaccaccacagctgagccactagctgggccatgcgaagagttctaggtgcaaaggctggagggtggaattcatttttgagaggtgtgtgagcagcttccgacccctgccccatttgaacgggggccttgctggtcgcgtccctgcattcacccgcgcggccatcccgtcatccaacagttgatcctaactgagcacgcccacggccctggtctggcctgggcaccggccaccgtagcccatcccttgatggcctctgtgtccccaggagggcgggccggggggttgcccaggggctggagcagtggactgtggctccatagaggtaggccggagggtgtgagggcagattcaagctatccccagggctctgctctggtcggagccagccccttctccctctctgccttccccgccccattcctgatgctgaactgttctggacccctggccctgagtctctcaggaccaaagtgggcacgggaacagctgtagtgtgtgcccccccgggctttggccacaggtctccctctcgaggtgtggttgtgactgcgacccttcccttgccgtgatgccttcctcccccggggcttggtccagctccttcactctctagcagctgctggggcccacctcccatgccgaggaccagcaggggaaacctccagggagcatctgcaggctctgcttctgcccggctgctggcttgctctccctggtggctctccagcggccagcttcctcacccacccggcactctgctttgctctgtctcctgaggtgggcctgaccaacctccccttctctgcctcagtccctgggctccagggctcagctccacagccctctgcctagcaggctggttctccctgccaagcccatacctgtggtcacctggccctcctgtggtctgagtaccactcccctgccccaggagccactcccactccagctgcctgtttccagcaggttcccagtgcccccgacaagcccctgctggtgtctccatctcctgccaagcatcctccagtgcctcctcctgtgggcctggcctcagggctatggacagactcctgtcccatcccagagacccctcgtgatcgttccctggcacgtgggccgtggcccggctgggtcggctgaagaactgcggatggaagctgcggaagaggccctgatggggcccaccatcccggacccaagtcttcttcctggcgggcctctcgtctccttcctggtttgggcggaagccatcacctggatgcctacgtgggaagggacctcgaatgtgggaccccagcccctctccagctcgaaatccctccacagccacggggacaccctgcacctattcccacgggacaggctggacccagagactctggacccggggcctccccttgagtagagacccgccctctgactgatggacgccgctgacctggggtcagacccgtgggctggacccctgcccaccccgcaggaaccctgaggcctaggggagctgttgagccttcagtgtctgcatgtgggaagtgggctccttcacctacctcacagggctgttgtgaggggcgctgtgatgcggttccaaagcacagggcttggcgcaccccactgtgctctcaataaatgtgtttcctgtcttaacaaaaaaaaaaaaaaaaaaaaaaaaaaaaaaaaaaaaaaaaaaaaaaaaaaactagagggggggcccgctccccaatgggccctatagagagtcagttcacaatcaattgagtcgccttcaacaaccgtgggactggaaaaaccctgcctgcacccaactaaattgcttggcagcaaatacacctttctgcagctggcttattaactagcaggccggcacggatcgaacttcctaacaatggcgtcacctgcatgggtgaacggcaggttggttggcgggaatacttatgttaaagccaaatcccctcataaattaatagaatgatccgacatagggtggactggtgttccattctggaccatcaatccattattaaggacggagctttcaaccacgaagggggaaacacctctgtttggg

SEQ ID NO: 366311 - DNA, 8056 bp, Homo sapiens
atatcagggtggtttataaagcctgtaaacacacctaagaaaataaacattttacaaatgaaaaaaaaaaaaaaaaaaaaaaaaaagcagagagggagcgcgccttggctcgctggccttggcggcggctcctcaggagagctggggcgcccacgagaggatccctcacccgggtctctcctcagggatgacatcatccgtccacctccttgtcttcaaggaccacctcctctccatgctgagctgctgccaaggggcctgctgcccatctacacctcacgagggcactaggagcacggtttcctggatcccaccaacatacaaagcagccactcactgacccccaggaccaggatggcaaaggatgaagaggaccggaactgaccagccagctgtccctcttacctaaagacttaaaccaatgccctagtgagggggcattgggcattaagccctgacctttgctatgctcatactttgactctatgagtactttcctataagtctttgcttgtgttcacctgctagcaaactggagtgtttccctccccaagggggtgtcagtctttgtcgactgactctgtcatcacccttatgatgtcctgaatggaaggatccctttgggaaattctcaggagggggacctgggccaagggcttggccagcatcctgctggcaactccaaggccctgggtgggcttctggaatgagcatgctactgaatcaccaaaggcacgccccacctctctgaagatcttcctatccttttctgggggaatggggtcgatgagagcaacctcctagggttgttgtgagaattaaatgagataaaagaggcctcaggcaggatctggcatagaggaggtgatcagcaaatgtttgttgaaaaggtttgacaggtcagtcccttcccacccctcttgcttgtcttacttgtcttatttattctccaacagcactccaggcagcccttgtccacgggctctccttgcatcaggtaggggctttgcagagaccatcgacgggctgacttgagtaagaacacgaattatgcatgtggccatttccagagcactttctatgtgatatgaacatgtgatttttatgtaatatgtgtatgtaaacgaggcagcctcatttccaggtgaggatgcatttggtagtgttgatttttgtaatttaaagaagctgaaagggagagaggacccgtgaggactgaactctctgtcccatggggtagggcttacatttacattaaagaaacagaaacttgctgggaggtgtaagtatttggtcacattgctggcaacagaaggggttggagttggacccagggtgccacgctagctgccctcaccccttcttcccctctggcccagagttatactaagagtccttttatttcaaaccaaatgtttgacaatgggacagtctgtttgaaatcccagctgcctggggtggtcttggggggtctgggtggccccagtgctggtaccatgtgctggcttcaccttttaataacagtgtgaccttaaacaagtcgcttaactactctaagtttcagtttctttcatggtctaaatggagattaaaacacacacacacacacacacacacacacacacacacacacaccctcgtgtatctaccccacagggcgcttttgaagaccaaatgctgtaactactatgaaagtgctttgtaaattgctgtggaaagtgtgagctactcaagcacccgaggctgtccctccttgctcacatgtccagcccaattctcccttagtgagaacagcactcagtaggtgctgtgtgtgtttgtgttcaattaagaaattccagaataaataaaaatgaattaattcaacaaacattttctggggcaccgacaatctgcccagtgcaccaggctaggtatctgatacaaagataatgaaaacagtctcttggaacctaattggggtcctcatttgaccaggaatttctttcgtcccgttttaagccaaccagttttgtccggacaagacaaaaacaacttgggctgctttagagaagcccagctcagtgtagacaatagctgcccagcctctgaaaggggctgattggattatgtggcaaatggaggtgcaaggatgacttggacggtgacaaatgaagtgggcggagacctgctttgagttaatccaggctattaggaggggaccttttgtcttccagagactggcaggagcttttaccagtggtttttacatccttaatgttcaggacgaataatttatggtcagtgaaaatccaggccccagtgagattcgagtgggctgtaaaatcgagagtcctgctcccagtgagtaatggtagtgaatgtttctgtcactttttgcaaccgtccattcatttgatcctcacaactccctgtcctgagccaggaccggccactgccactcccagggaaacagaggctgtcaagaggctccacagattgggccccactggatcattgaacccctgttccctgagttctagaggaagaattgtacctgtctcagtcccggccacctccagaaggcctccctctgcatttctgactttgctgtgccggcagcctggagcctcccaggtccctgctgtcatcttttctagccactacagtctctgtctttcctttcacagccccaagcttcttgaaaggcctgtctacacttgctgtcttccttcctcacctccaatttcctcttcaacccactgcttcctgactcgctctactccgtggaagcacgctcacaaaggtaaagacttttctgtggcttaatccttgtcatgttttcggctcatggacacaaggacacattttcatgccttctctcacagggctctgcgtctccggttcacttctgtgtctttacactcccttcacagagacacttgctcccccttctctcgttcttagcatcccctaggaacttgcacacccaggtctctcgacttctggacctgcttcttaccatgccgtcttaagcagtcaggagtcgctgcctgggttcgagtcctagttaaattacttagtgctgagaccttggggtaggtaaacttttccaagccaggtttatctcagtttcaaaatagggttaatcgtctttatctggcaggtcaggtgggatgtctcacaggtaagcaccagatgccatttgaaaggcttgaagcaaagtcaataaagcattcatgggaaaatacaactggaggcaccactagattttcgtatacattaggttcccacggggaggaccgaagagagaagaaagaagtggaaagggaggagcgtgcaggagagacaggagaagagaataactaaacaaagacattaaagacaaaaaaaaagtaggaaagggagacttagaaaatattaaaagccaccaaaaacacatccaaagacggtttccccttacgttagttgggctaaaagaaagcaaatgggaagaaggttttaaattgattatcccagtgacaaatcccaggaagctttcacatcaaatcaccctattctgggtttttaactccttccatcgagtttaacctctttacctcccacatcctggtaaaccctgccccctccctaccgccccctttgctggtgattaaatcctgaaggtacacgaagtatttcagtgaatgaatggctaacagaaaagggcctcccctcccccttaccctggcggtgtttttcagttttattccactttccgcccttttcccttaatgaacacagggctaatctcgggccttgtcgaaggaagaggctgcagacgttaatgaggttagctgctggattccagtattcgtcgcataaggatccttctttgtctgcgaaggaaaaacacactgattatcataatgagtaatgaggtgaactggccaccgccgggccggggcgatgtggcttcttaagccacacttctaattttggtgatggagccgacatttctttggcttctcatttaagtctttgcctctgtcccagtgcgaagtccattcagcggggttgaaagttgcaggcagctttgggaaggggggcgtcggacagggttgcattgtagaaagtggctttgttcgatccttcgcacagatgcaaatggccagagcattcattccctttcttcaagagctgaggactgggggggccactggtgatcagttcccaactctagctctcctctgactcatctcaggacccattgaggacatccaaaactcactcaagatcaccaagtggtaggaaagtactaactcctgggcatagccctaggggagtgactacaatgtgaatactcatggaatgcctagccaggtgaagaagtgaatgcatgttggcatcccagagggaccccccttaagagggcatagtttggggttcagatttgactccagcatactgttgaaattgggcacagggggctagtgattagtcaggatcaatcagtggagaggagattaaaactcacatctgggagtccggaatcagaacttgtagttcttttttttgaaatggagtctcgctctgtcgcccaggctggagtgcagtggcgtgatctcggctcactgcaacctctgccttccgggttcaagcaattctcccacctcagcctcctgagtagctgggattacaggcgcccaccaccacagccggctactttttgtatttttaggagagacggggtttcaccatgttggtcaggctggtcttgaactcctgacctcatgatccacctgccttagcctcccaaagtgctgggattacaggcgtgagccaccatgcccagccctatagtagttcttcttttgccccttaatatcctcacccacatgtcctgtaccctgcctgaaccctcctcctctttttgttctgatctttgagctccctagagcccataattctttagagcaggtatgtcccgagtctgaaacatgcccttatttgtcccaagctctggacatttctcaccccaaggcggatcaatcatgattaaatcactccaattaaactttaggctccagtcagaccttcagccaaatggaaaaaaaaactaggggataagggaggtagttggagcaagaaaatgttattagttgaaaccttacgggaccttcctcccttagtgagtctgttggctaaaggttctctggcttcgtgaattagaatcggatactgtttccaagttagcaaaaccaactctaccccagcaccccacgaggaagaatgtggaaggatctcccattggccggttggggcaaaagcctgaggcaatctttcatccccttttgccaaggcgagactttcccagtgacggtgatgtagttggccactctgactatgggtggactcgggtgtagacctctgaagctgagatcacacgaaaacctggcctccccgccatgtagctgttggagagtagaaaaatagagcacgcctgatgtttctaaatgagaagactttcaatagtaatgaagaatccatggcactctcctcaccctcaaacacatggcagtcattcacatacaggccccaaagccactgttagtgctgcagtagctcctgtggacattggaaagcccggagagggcgtggaagaaatcagctggcccccggcaggttctctggggttttgtgcccaaggctcctggagccctaaaaactttcaaaagttaactccccacgtccccatcctgcttgggtttctggacttttctgaggcaccggcagaggggtctcgttgctcccttgagtgtaggggcagccctttaacctggctccttgagtccctgctttttctgcttctgttgccttcttcctcgtcttcctctctctcaatatctccctctctttgtccctccccagttcctgacctggccatcccggggtgcccttgaccagccccgtgtctcctcagggtgtcccagcaccagcctggcacagagtggggctcagttagagtatgtgggatgttggtttcgccaggtgagtgaatgaaaggactcgaccaccacagctgagccactagctgggccatgcgaagagttctaggtgcaaaggctggagggtggaattcatttttgagaggtgtgtgagcagcttccgacccctgccccatttgaacgggggccttgctggtcgcgtccctgcattcacccgcgcggccatcccgtcatccaacagttgatcctaactgagcacgcccacggccctggtctggcctgggcaccggccaccgtagcccatcccttgatggcctctgtgtccccaggagggcgggccggggggttgcccaggggctggagcagtggactgtggctccatagaggtaggccggagggtgtgagggcagattcaagctatccccagggctctgctctggtcggagccagccccttctccctctctgccttccccgccccattcctgatgctgaactgttctggacccctggccctgagtctctcaggaccaaagtgggcacgggaacagctgtagtgtgtgcccccccgggctttggccacaggtctccctctcgaggtgtggttgtgactgcgacccttcccttgccgtgatgccttcctcccccggggcttggtccagctccttcactctctagcagctgctggggcccacctcccatgccgaggaccagcaggggaaacctccagggagcatctgcaggctctgcttctgcccggctgctggcttgctctccctggtggctctccagcggccagcttcctcacccacccggcactctgctttgctctgtctcctgaggtgggcctgaccaacctccccttctctgcctcagtccctgggctccagggctcagctccacagccctctgcctagcaggctggttctccctgccaagcccatacctgtggtcacctggccctcctgtggtctgagtaccactcccctgccccaggagccactcccactccagctgcctgtttccagcaggttcccagtgcccccgacaagcccctgctggtgtctccatctcctgccaagcatcctccagtgcctcctcctgtgggcctggcctcagggctatggacagactcctgtcccatcccagagacccctcgtgatcgttccctggcacgtgggccgtggcccggctgggtcggctgaagaactgcggatggaagctgcggaagaggccctgatggggcccaccatcccggacccaagtcttcttcctggcgggcctctcgtctccttcctggtttgggcggaagccatcacctggatgcctacgtgggaagggacctcgaatgtgggaccccagcccctctccagctcgaaatccctccacagccacggggacaccctgcacctattcccacgggacaggctggacccagagactctggacccggggcctccccttgagtagagacccgccctctgactgatggacgccgctgacctggggtcagacccgtgggctggacccctgcccaccccgcaggaaccctgaggcctaggggagctgttgagccttcagtgtctgcatgtgggaagtgggctccttcacctacctcacagggctgttgtgaggggcgctgtgatgcggttccaaagcacagggcttggcgcaccccactgtgctctcaataaatgtgtttcctgtcttaacaaaaaggacaaagacggccataaagacgaaagagacagacagtgcagaataaaattcgagaagcgttccgcgagcctgagtaagatggagatggctatattattgctgtagaacgtcgcaatgtgaaacccaggcggggggaccgggtaccgatgacgaaaacgtggagatgatcacggtaacgggtcgtgccttaaaaggtatgggcacgataaccaggtggtaccaccgatcaaagcactgtgaagaccatcgcctctatcgcgatgggcgggaatgatcaacagttgctcaccctgagcatttcttgttcttcttcggggagagaattcaggggctcgcatttacgggaaccgagaacctgttcctttatttccc

SEQ ID NO: 366312 - DNA, 8241 bp, Homo sapiens
atatcagggtggtttataaagcctgtaaacacacctaagaaaataaacattttacaaatgaaaaaaaaaaaaaaaaaaaaaaaaaagcagagagggagcgcgccttggctcgctggccttggcggcggctcctcaggagagctggggcgcccacgagaggatccctcacccgggtctctcctcagggatgacatcatccgtccacctccttgtcttcaaggaccacctcctctccatgctgagctgctgccaaggggcctgctgcccatctacacctcacgagggcactaggagcacggtttcctggatcccaccaacatacaaagcagccactcactgacccccaggaccaggatggcaaaggatgaagaggaccggaactgaccagccagctgtccctcttacctaaagacttaaaccaatgccctagtgagggggcattgggcattaagccctgacctttgctatgctcatactttgactctatgagtactttcctataagtctttgcttgtgttcacctgctagcaaactggagtgtttccctccccaagggggtgtcagtctttgtcgactgactctgtcatcacccttatgatgtcctgaatggaaggatccctttgggaaattctcaggagggggacctgggccaagggcttggccagcatcctgctggcaactccaaggccctgggtgggcttctggaatgagcatgctactgaatcaccaaaggcacgccccacctctctgaagatcttcctatccttttctgggggaatggggtcgatgagagcaacctcctagggttgttgtgagaattaaatgagataaaagaggcctcaggcaggatctggcatagaggaggtgatcagcaaatgtttgttgaaaaggtttgacaggtcagtcccttcccacccctcttgcttgtcttacttgtcttatttattctccaacagcactccaggcagcccttgtccacgggctctccttgcatcaggtaggggctttgcagagaccatcgacgggctgacttgagtaagaacacgaattatgcatgtggccatttccagagcactttctatgtgatatgaacatgtgatttttatgtaatatgtgtatgtaaacgaggcagcctcatttccaggtgaggatgcatttggtagtgttgatttttgtaatttaaagaagctgaaagggagagaggacccgtgaggactgaactctctgtcccatggggtagggcttacatttacattaaagaaacagaaacttgctgggaggtgtaagtatttggtcacattgctggcaacagaaggggttggagttggacccagggtgccacgctagctgccctcaccccttcttcccctctggcccagagttatactaagagtccttttatttcaaaccaaatgtttgacaatgggacagtctgtttgaaatcccagctgcctggggtggtcttggggggtctgggtggccccagtgctggtaccatgtgctggcttcaccttttaataacagtgtgaccttaaacaagtcgcttaactactctaagtttcagtttctttcatggtctaaatggagattaaaacacacacacacacacacacacacacacacacacacacacaccctcgtgtatctaccccacagggcgcttttgaagaccaaatgctgtaactactatgaaagtgctttgtaaattgctgtggaaagtgtgagctactcaagcacccgaggctgtccctccttgctcacatgtccagcccaattctcccttagtgagaacagcactcagtaggtgctgtgtgtgtttgtgttcaattaagaaattccagaataaataaaaatgaattaattcaacaaacattttctggggcaccgacaatctgcccagtgcaccaggctaggtatctgatacaaagataatgaaaacagtctcttggaacctaattggggtcctcatttgaccaggaatttctttcgtcccgttttaagccaaccagttttgtccggacaagacaaaaacaacttgggctgctttagagaagcccagctcagtgtagacaatagctgcccagcctctgaaaggggctgattggattatgtggcaaatggaggtgcaaggatgacttggacggtgacaaatgaagtgggcggagacctgctttgagttaatccaggctattaggaggggaccttttgtcttccagagactggcaggagcttttaccagtggtttttacatccttaatgttcaggacgaataatttatggtcagtgaaaatccaggccccagtgagattcgagtgggctgtaaaatcgagagtcctgctcccagtgagtaatggtagtgaatgtttctgtcactttttgcaaccgtccattcatttgatcctcacaactccctgtcctgagccaggaccggccactgccactcccagggaaacagaggctgtcaagaggctccacagattgggccccactggatcattgaacccctgttccctgagttctagaggaagaattgtacctgtctcagtcccggccacctccagaaggcctccctctgcatttctgactttgctgtgccggcagcctggagcctcccaggtccctgctgtcatcttttctagccactacagtctctgtctttcctttcacagccccaagcttcttgaaaggcctgtctacacttgctgtcttccttcctcacctccaatttcctcttcaacccactgcttcctgactcgctctactccgtggaagcacgctcacaaaggtaaagacttttctgtggcttaatccttgtcatgttttcggctcatggacacaaggacacattttcatgccttctctcacagggctctgcgtctccggttcacttctgtgtctttacactcccttcacagagacacttgctcccccttctctcgttcttagcatcccctaggaacttgcacacccaggtctctcgacttctggacctgcttcttaccatgccgtcttaagcagtcaggagtcgctgcctgggttcgagtcctagttaaattacttagtgctgagaccttggggtaggtaaacttttccaagccaggtttatctcagtttcaaaatagggttaatcgtctttatctggcaggtcaggtgggatgtctcacaggtaagcaccagatgccatttgaaaggcttgaagcaaagtcaataaagcattcatgggaaaatacaactggaggcaccactagattttcgtatacattaggttcccacggggaggaccgaagagagaagaaagaagtggaaagggaggagcgtgcaggagagacaggagaagagaataactaaacaaagacattaaagacaaaaaaaaagtaggaaagggagacttagaaaatattaaaagccaccaaaaacacatccaaagacggtttccccttacgttagttgggctaaaagaaagcaaatgggaagaaggttttaaattgattatcccagtgacaaatcccaggaagctttcacatcaaatcaccctattctgggtttttaactccttccatcgagtttaacctctttacctcccacatcctggtaaaccctgccccctccctaccgccccctttgctggtgattaaatcctgaaggtacacgaagtatttcagtgaatgaatggctaacagaaaagggcctcccctcccccttaccctggcggtgtttttcagttttattccactttccgcccttttcccttaatgaacacagggctaatctcgggccttgtcgaaggaagaggctgcagacgttaatgaggttagctgctggattccagtattcgtcgcataaggatccttctttgtctgcgaaggaaaaacacactgattatcataatgagtaatgaggtgaactggccaccgccgggccggggcgatgtggcttcttaagccacacttctaattttggtgatggagccgacatttctttggcttctcatttaagtctttgcctctgtcccagtgcgaagtccattcagcggggttgaaagttgcaggcagctttgggaaggggggcgtcggacagggttgcattgtagaaagtggctttgttcgatccttcgcacagatgcaaatggccagagcattcattccctttcttcaagagctgaggactgggggggccactggtgatcagttcccaactctagctctcctctgactcatctcaggacccattgaggacatccaaaactcactcaagatcaccaagtggtaggaaagtactaactcctgggcatagccctaggggagtgactacaatgtgaatactcatggaatgcctagccaggtgaagaagtgaatgcatgttggcatcccagagggaccccccttaagagggcatagtttggggttcagatttgactccagcatactgttgaaattgggcacagggggctagtgattagtcaggatcaatcagtggagaggagattaaaactcacatctgggagtccggaatcagaacttgtagttcttttttttgaaatggagtctcgctctgtcgcccaggctggagtgcagtggcgtgatctcggctcactgcaacctctgccttccgggttcaagcaattctcccacctcagcctcctgagtagctgggattacaggcgcccaccaccacagccggctactttttgtatttttaggagagacggggtttcaccatgttggtcaggctggtcttgaactcctgacctcatgatccacctgccttagcctcccaaagtgctgggattacaggcgtgagccaccatgcccagccctatagtagttcttcttttgccccttaatatcctcacccacatgtcctgtaccctgcctgaaccctcctcctctttttgttctgatctttgagctccctagagcccataattctttagagcaggtatgtcccgagtctgaaacatgcccttatttgtcccaagctctggacatttctcaccccaaggcggatcaatcatgattaaatcactccaattaaactttaggctccagtcagaccttcagccaaatggaaaaaaaaactaggggataagggaggtagttggagcaagaaaatgttattagttgaaaccttacgggaccttcctcccttagtgagtctgttggctaaaggttctctggcttcgtgaattagaatcggatactgtttccaagttagcaaaaccaactctaccccagcaccccacgaggaagaatgtggaaggatctcccattggccggttggggcaaaagcctgaggcaatctttcatccccttttgccaaggcgagactttcccagtgacggtgatgtagttggccactctgactatgggtggactcgggtgtagacctctgaagctgagatcacacgaaaacctggcctccccgccatgtagctgttggagagtagaaaaatagagcacgcctgatgtttctaaatgagaagactttcaatagtaatgaagaatccatggcactctcctcaccctcaaacacatggcagtcattcacatacaggccccaaagccactgttagtgctgcagtagctcctgtggacattggaaagcccggagagggcgtggaagaaatcagctggcccccggcaggttctctggggttttgtgcccaaggctcctggagccctaaaaactttcaaaagttaactccccacgtccccatcctgcttgggtttctggacttttctgaggcaccggcagaggggtctcgttgctcccttgagtgtaggggcagccctttaacctggctccttgagtccctgctttttctgcttctgttgccttcttcctcgtcttcctctctctcaatatctccctctctttgtccctccccagttcctgacctggccatcccggggtgcccttgaccagccccgtgtctcctcagggtgtcccagcaccagcctggcacagagtggggctcagttagagtatgtgggatgttggtttcgccaggtgagtgaatgaaaggactcgaccaccacagctgagccactagctgggccatgcgaagagttctaggtgcaaaggctggagggtggaattcatttttgagaggtgtgtgagcagcttccgacccctgccccatttgaacgggggccttgctggtcgcgtccctgcattcacccgcgcggccatcccgtcatccaacagttgatcctaactgagcacgcccacggccctggtctggcctgggcaccggccaccgtagcccatcccttgatggcctctgtgtccccaggagggcgggccggggggttgcccaggggctggagcagtggactgtggctccatagaggtaggccggagggtgtgagggcagattcaagctatccccagggctctgctctggtcggagccagccccttctccctctctgccttccccgccccattcctgatgctgaactgttctggacccctggccctgagtctctcaggaccaaagtgggcacgggaacagctgtagtgtgtgcccccccgggctttggccacaggtctccctctcgaggtgtggttgtgactgcgacccttcccttgccgtgatgccttcctcccccggggcttggtccagctccttcactctctagcagctgctggggcccacctcccatgccgaggaccagcaggggaaacctccagggagcatctgcaggctctgcttctgcccggctgctggcttgctctccctggtggctctccagcggccagcttcctcacccacccggcactctgctttgctctgtctcctgaggtgggcctgaccaacctccccttctctgcctcagtccctgggctccagggctcagctccacagccctctgcctagcaggctggttctccctgccaagcccatacctgtggtcacctggccctcctgtggtctgagtaccactcccctgccccaggagccactcccactccagctgcctgtttccagcaggttcccagtgcccccgacaagcccctgctggtgtctccatctcctgccaagcatcctccagtgcctcctcctgtgggcctggcctcagggctatggacagactcctgtcccatcccagagacccctcgtgatcgttccctggcacgtgggccgtggcccggctgggtcggctgaagaactgcggatggaagctgcggaagaggccctgatggggcccaccatcccggacccaagtcttcttcctggcgggcctctcgtctccttcctggtttgggcggaagccatcacctggatgcctacgtgggaagggacctcgaatgtgggaccccagcccctctccagctcgaaatccctccacagccacggggacaccctgcacctattcccacgggacaggctggacccagagactctggacccggggcctccccttgagtagagacccgccctctgactgatggacgccgctgacctggggtcagacccgtgggctggacccctgcccaccccgcaggaaccctgaggcctaggggagctgttgagccttcagtgtctgcatgtgggaagtgggctccttcacctacctcacagggctgttgtgaggggcgctgtgatgcggttccaaagcacagggcttggcgcaccccactgtgctctcaataaatgtgtttcctgtcttaacaaaaaaaaaaaaaaaaaaaaaaaaaaaaaaaaaaaaaaaaaaaaaaaaaaaaaaaaaaaaaaaaaaaaaaaaaaaaacaaaaaaaaatataacataaaagaaaaaaaaataataaacaaccaaaaatctaaaataaaaccgtggccctttttttaaaaaccatgctaaagggaaaacccttgccgtgccccaatttaaccgtttgggagaaatccccttttcgcggggggttattttcaaagggcccctcgcaaacccttgtcaaacagtccaaaccctgatggcaaaggcaattttacgctttattttttgtaaaatcccttaaattttggccaaaaacctgttttttacccaataggccaaatgcctaaatccctttaaattaaagaaattccccgaataggttggacttctccacatttgaaccaaagtcccttttaaaaaagggcttcaactgcaagggggctcgttttagggctgtgcgcctttggaaccatccccttataaatattgaggtcaggggcacaggattatattgcaccctgggacctcctttttctcct

SEQ ID NO: 366313 - DNA, 4707 bp, Homo sapiens
atatcagggtggtttataaagcctgtaaacacacctaagaaaataaacattttacaaatgaaaaaaaaaaaaaaaaaaaaaaaaaagcagagagggagcgcgccttggctcgctggccttggcggcggctcctcaggagagctggggcgcccacgagaggatccctcacccgggtctctcctcagggatgacatcatccgtccacctccttgtcttcaaggaccacctcctctccatgctgagctgctgccaaggggcctgctgcccatctacacctcacgagggcactaggagcacggtttcctggatcccaccaacatacaaagcagccactcactgacccccaggaccaggatggcaaaggatgaagaggaccggaactgaccagccagctgtccctcttacctaaagacttaaaccaatgccctagtgagggggcattgggcattaagccctgacctttgctatgctcatactttgactctatgagtactttcctataagtctttgcttgtgttcacctgctagcaaactggagtgtttccctccccaagggggtgtcagtctttgtcgactgactctgtcatcacccttatgatgtcctgaatggaaggatccctttgggaaattctcaggagggggacctgggccaagggcttggccagcatcctgctggcaactccaaggccctgggtgggcttctggaatgagcatgctactgaatcaccaaaggcacgccccacctctctgaagatcttcctatccttttctgggggaatggggtcgatgagagcaacctcctagggttgttgtgagaattaaatgagataaaagaggcctcaggcaggatctggcatagaggaggtgatcagcaaatgtttgttgaaaaggtttgacaggtcagtcccttcccacccctcttgcttgtcttacttgtcttatttattctccaacagcactccaggcagcccttgtccacgggctctccttgcatcaggtaggggctttgcagagaccatcgacgggctgacttgagtaagaacacgaattatgcatgtggccatttccagagcactttctatgtgatatgaacatgtgatttttatgtaatatgtgtatgtaaacgaggcagcctcatttccaggtgaggatgcatttggtagtgttgatttttgtaatttaaagaagctgaaagggagagaggacccgtgaggactgaactctctgtcccatggggtagggcttacatttacattaaagaaacagaaacttgctgggaggtgtaagtatttggtcacattgctggcaacagaaggggttggagttggacccagggtgccacgctagctgccctcaccccttcttcccctctggcccagagttatactaagagtccttttatttcaaaccaaatgtttgacaatgggacagtctgtttgaaatcccagctgcctggggtggtcttggggggtctgggtggccccagtgctggtaccatgtgctggcttcaccttttaataacagtgtgaccttaaacaagtcgcttaactactctaagtttcagtttctttcatggtctaaatggagattaaaacacacacacacacacacacacacacacacacacacacacaccctcgtgtatctaccccacagggcgcttttgaagaccaaatgctgtaactactatgaaagtgctttgtaaattgctgtggaaagtgtgagctactcaagcacccgaggctgtccctccttgctcacatgtccagcccaattctcccttagtgagaacagcactcagtaggtgctgtgtgtgtttgtgttcaattaagaaattccagaataaataaaaatgaattaattcaacaaacattttctggggcaccgacaatctgcccagtgcaccaggctaggtatctgatacaaagataatgaaaacagtctcttggaacctaattggggtcctcatttgaccaggaatttctttcgtcccgttttaagccaaccagttttgtccggacaagacaaaaacaacttgggctgctttagagaagcccagctcagtgtagacaatagctgcccagcctctgaaaggggctgattggattatgtggcaaatggaggtgcaaggatgacttggacggtgacaaatgaagtgggcggagacctgctttgagttaatccaggctattaggaggggaccttttgtcttccagagactggcaggagcttttaccagtggtttttacatccttaatgttcaggacgaataatttatggtcagtgaaaatccaggccccagtgagattcgagtgggctgtaaaatcgagagtcctgctcccagtgagtaatggtagtgaatgtttctgtcactttttgcaaccgtccattcatttgatcctcacaactccctgtcctgagccaggaccggccactgccactcccagggaaacagaggctgtcaagaggctccacagattgggccccactggatcattgaacccctgttccctgagttctagaggaagaattgtacctgtctcagtcccggccacctccagaaggcctccctctgcatttctgactttgctgtgccggcagcctggagcctcccaggtccctgctgtcatcttttctagccactacagtctctgtctttcctttcacagccccaagcttcttgaaaggcctgtctacacttgctgtcttccttcctcacctccaatttcctcttcaacccactgcttcctgactcgctctactccgtggaagcacgctcacaaaggtaaagacttttctgtggcttaatccttgtcatgttttcggctcatggacacaaggacacattttcatgccttctctcacagggctctgcgtctccggttcacttctgtgtctttacactcccttcacagagacacttgctcccccttctctcgttcttagcatcccctaggaacttgcacacccaggtctctcgacttctggacctgcttcttaccatgccgtcttaagcagtcaggagtcgctgcctgggttcgagtcctagttaaattacttagtgctgagaccttggggtaggtaaacttttccaagccaggtttatctcagtttcaaaatagggttaatcgtctttatctggcaggtcaggtgggatgtctcacaggtaagcaccagatgccatttgaaaggcttgaagcaaagtcaataaagcattcatgggaaaatacaactggaggcaccactagattttcgtatacattaggttcccacggggaggaccgaagagagaagaaagaagtggaaagggaggagcgtgcaggagagacaggagaagagaataactaaacaaagacattaaagacaaaaaaaaagtaggaaagggagacttagaaaatattaaaagccaccaaaaacacatccaaagacggtttccccttacgttagttgggctaaaagaaagcaaatgggaagaaggttttaaattgattatcccagtgacaaatcccaggaagctttcacatcaaatcaccctattctgggtttttaactccttccatcgagtttaacctctttacctcccacatcctggtaaaccctgccccctccctaccgccccctttgctggtgattaaatcctgaaggtacacgaagtatttcagtgaatgaatggctaacagaaaagggcctcccctcccccttaccctggcggtgtttttcagttttattccactttccgcccttttcccttaatgaacacagggctaatctcgggccttgtcgaaggaagaggctgcagacgttaatgaggttagctgctggattccagtattcgtcgcataaggatccttctttgtctgcgaaggaaaaacacactgattatcataatgagttcctgacctggccatcccggggtgcccttgaccagccccgtgtctcctcagggtgtcccagcaccagcctggcacagagtggggctcagttagagtatgtgggatgttggtttcgccagtccagcaggttcccagtgcccccgacaagcccctgctggtgtctccatctcctgccaagcatcctccagtgcctcctcctgtgggcctggcctcagggctatggacagactcctgtcccatcccagagacccctcgtgatcgttccctggcacgtgggccgtggcccggctgggtcggctgaagaactgcggatggaagctgcggaagaggccctgatggggcccaccatcccggacccaagtcttcttcctggcgggcctctcgtctccttcctggtttgggcggaagccatcacctggatgcctacgtgggaagggacctcgaatgtgggaccccagcccctctccagctcgaaatccctccacagccacggggacaccctgcacctattcccacgggacaggctggacccagagactctggacccggggcctccccttgagtagagacccgccctctgactgatggacgccgctgacctggggtcagacccgtgggctggacccctgcccaccccgcaggaaccctgaggcctaggggagctgttgagccttcagtgtctgcatgtgggaagtgggctccttcacctacctcacagggctgttgtgaggggcgctgtgatgcggttccaaagcacagggcttggcgcaccccactgtgctctcaataaatgtgtttcctgtcttaacaaaaa

SEQ ID NO: 366314 - DNA, 7682 bp, Homo sapiens
  misc_feature (7272)..(7272): n is a, c, g, or t
  misc_feature (7274)..(7274): n is a, c, g, or t
  misc_feature (7276)..(7276): n is a, c, g, or t
atatcagggtggtttataaagcctgtaaacacacctaagaaaataaacattttacaaatgaaaaaaaaaaaaaaaaaaaaaaaaaagcagagagggagcgcgccttggctcgctggccttggcggcggctcctcaggagagctggggcgcccacgagaggatccctcacccgggtctctcctcagggatgacatcatccgtccacctccttgtcttcaaggaccacctcctctccatgctgagctgctgccaaggggcctgctgcccatctacacctcacgagggcactaggagcacggtttcctggatcccaccaacatacaaagcagccactcactgacccccaggaccaggatggcaaaggatgaagaggaccggaactgaccagccagctgtccctcttacctaaagacttaaaccaatgccctagtgagggggcattgggcattaagccctgacctttgctatgctcatactttgactctatgagtactttcctataagtctttgcttgtgttcacctgctagcaaactggagtgtttccctccccaagggggtgtcagtctttgtcgactgactctgtcatcacccttatgatgtcctgaatggaaggatccctttgggaaattctcaggagggggacctgggccaagggcttggccagcatcctgctggcaactccaaggccctgggtgggcttctggaatgagcatgctactgaatcaccaaaggcacgccccacctctctgaagatcttcctatccttttctgggggaatggggtcgatgagagcaacctcctagggttgttgtgagaattaaatgagataaaagaggcctcaggcaggatctggcatagaggaggtgatcagcaaatgtttgttgaaaaggtttgacaggtcagtcccttcccacccctcttgcttgtcttacttgtcttatttattctccaacagcactccaggcagcccttgtccacgggctctccttgcatcaggtaggggctttgcagagaccatcgacgggctgacttgagtaagaacacgaattatgcatgtggccatttccagagcactttctatgtgatatgaacatgtgatttttatgtaatatgtgtatgtaaacgaggcagcctcatttccaggtgaggatgcatttggtagtgttgatttttgtaatttaaagaagctgaaagggagagaggacccgtgaggactgaactctctgtcccatggggtagggcttacatttacattaaagaaacagaaacttgctgggaggtgtaagtatttggtcacattgctggcaacagaaggggttggagttggacccagggtgccacgctagctgccctcaccccttcttcccctctggcccagagttatactaagagtccttttatttcaaaccaaatgtttgacaatgggacagtctgtttgaaatcccagctgcctggggtggtcttggggggtctgggtggccccagtgctggtaccatgtgctggcttcaccttttaataacagtgtgaccttaaacaagtcgcttaactactctaagtttcagtttctttcatggtctaaatggagattaaaacacacacacacacacacacacacacacacacacacacacaccctcgtgtatctaccccacagggcgcttttgaagaccaaatgctgtaactactatgaaagtgctttgtaaattgctgtggaaagtgtgagctactcaagcacccgaggctgtccctccttgctcacatgtccagcccaattctcccttagtgagaacagcactcagtaggtgctgtgtgtgtttgtgttcaattaagaaattccagaataaataaaaatgaattaattcaacaaacattttctggggcaccgacaatctgcccagtgcaccaggctaggtatctgatacaaagataatgaaaacagtctcttggaacctaattggggtcctcatttgaccaggaatttctttcgtcccgttttaagccaaccagttttgtccggacaagacaaaaacaacttgggctgctttagagaagcccagctcagtgtagacaatagctgcccagcctctgaaaggggctgattggattatgtggcaaatggaggtgcaaggatgacttggacggtgacaaatgaagtgggcggagacctgctttgagttaatccaggctattaggaggggaccttttgtcttccagagactggcaggagcttttaccagtggtttttacatccttaatgttcaggacgaataatttatggtcagtgaaaatccaggccccagtgagattcgagtgggctgtaaaatcgagagtcctgctcccagtgagtaatggtagtgaatgtttctgtcactttttgcaaccgtccattcatttgatcctcacaactccctgtcctgagccaggaccggccactgccactcccagggaaacagaggctgtcaagaggctccacagattgggccccactggatcattgaacccctgttccctgagttctagaggaagaattgtacctgtctcagtcccggccacctccagaaggcctccctctgcatttctgactttgctgtgccggcagcctggagcctcccaggtccctgctgtcatcttttctagccactacagtctctgtctttcctttcacagccccaagcttcttgaaaggcctgtctacacttgctgtcttccttcctcacctccaatttcctcttcaacccactgcttcctgactcgctctactccgtggaagcacgctcacaaaggtaaagacttttctgtggcttaatccttgtcatgttttcggctcatggacacaaggacacattttcatgccttctctcacagggctctgcgtctccggttcacttctgtgtctttacactcccttcacagagacacttgctcccccttctctcgttcttagcatcccctaggaacttgcacacccaggtctctcgacttctggacctgcttcttaccatgccgtcttaagcagtcaggagtcgctgcctgggttcgagtcctagttaaattacttagtgctgagaccttggggtaggtaaacttttccaagccaggtttatctcagtttcaaaatagggttaatcgtctttatctggcaggtcaggtgggatgtctcacaggtaagcaccagatgccatttgaaaggcttgaagcaaagtcaataaagcattcatgggaaaatacaactggaggcaccactagattttcgtatacattaggttcccacggggaggaccgaagagagaagaaagaagtggaaagggaggagcgtgcaggagagacaggagaagagaataactaaacaaagacattaaagacaaaaaaaaagtaggaaagggagacttagaaaatattaaaagccaccaaaaacacatccaaagacggtttccccttacgttagttgggctaaaagaaagcaaatgggaagaaggttttaaattgattatcccagtgacaaatcccaggaagctttcacatcaaatcaccctattctgggtttttaactccttccatcgagtttaacctctttacctcccacatcctggtaaaccctgccccctccctaccgccccctttgctggtgattaaatcctgaaggtacacgaagtatttcagtgaatgaatggctaacagaaaagggcctcccctcccccttaccctggcggtgtttttcagttttattccactttccgcccttttcccttaatgaacacagggctaatctcgggccttgtcgaaggaagaggctgcagacgttaatgaggttagctgctggattccagtattcgtcgcataaggatccttctttgtctgcgaaggaaaaacacactgattatcataatgagtaatgaggtgaactggccaccgccgggccggggcgatgtggcttcttaagccacacttctaattttggtgatggagccgacatttctttggcttctcatttaagtctttgcctctgtcccagtgcgaagtccattcagcggggttgaaagttgcaggcagctttgggaaggggggcgtcggacagggttgcattgtagaaagtggctttgttcgatccttcgcacagatgcaaatggccagagcattcattccctttcttcaagagctgaggactgggggggccactggtgatcagttcccaactctagctctcctctgactcatctcaggacccattgaggacatccaaaactcactcaagatcaccaagtggtaggaaagtactaactcctgggcatagccctaggggagtgactacaatgtgaatactcatggaatgcctagccaggtgaagaagtgaatgcatgttggcatcccagagggaccccccttaagagggcatagtttggggttcagatttgactccagcatactgttgaaattgggcacagggggctagtgattagtcaggatcaatcagtggagaggagattaaaactcacatctgggagtccggaatcagaacttgtagttcttttttttgaaatggagtctcgctctgtcgcccaggctggagtgcagtggcgtgatctcggctcactgcaacctctgccttccgggttcaagcaattctcccacctcagcctcctgagtagctgggattacaggcgcccaccaccacagccggctactttttgtatttttaggagagacggggtttcaccatgttggtcaggctggtcttgaactcctgacctcatgatccacctgccttagcctcccaaagtgctgggattacaggcgtgagccaccatgcccagccctatagtagttcttcttttgccccttaatatcctcacccacatgtcctgtaccctgcctgaaccctcctcctctttttgttctgatctttgagctccctagagcccataattctttagagcaggtatgtcccgagtctgaaacatgcccttatttgtcccaagctctggacatttctcaccccaaggcggatcaatcatgattaaatcactccaattaaactttaggctccagtcagaccttcagccaaatggaaaaaaaaactaggggataagggaggtagttggagcaagaaaatgttattagttgaaaccttacgggaccttcctcccttagtgagtctgttggctaaaggttctctggcttcgtgaattagaatcggatactgtttccaagttagcaaaaccaactctaccccagcaccccacgaggaagaatgtggaaggatctcccattggccggttggggcaaaagcctgaggcaatctttcatccccttttgccaaggcgagactttcccagtgacggtgatgtagttggccactctgactatgggtggactcgggtgtagacctctgaagctgagatcacacgaaaacctggcctccccgccatgtagctgttggagagtagaaaaatagagcacgcctgatgtttctaaatgagaagactttcaatagtaatgaagaatccatggcactctcctcaccctcaaacacatggcagtcattcacatacaggccccaaagccactgttagtgctgcagtagctcctgtggacattggaaagcccggagagggcgtggaagaaatcagctggcccccggcaggttctctggggttttgtgcccaaggctcctggagccctaaaaactttcaaaagttaactccccacgtccccatcctgcttgggtttctggacttttctgaggcaccggcagaggggtctcgttgctcccttgagtgtaggggcagccctttaacctggctccttgagtccctgctttttctgcttctgttgccttcttcctcgtcttcctctctctcaatatctccctctctttgtccctccccagttcctgacctggccatcccggggtgcccttgaccagccccgtgtctcctcagggtgtcccagcaccagcctggcacagagtggggctcagttagagtatgtgggatgttggtttcgccaggtgagtgaatgaaaggactcgaccaccacagctgagccactagctgggccatgcgaagagttctaggtgcaaaggctggagggtggaattcatttttgagaggtgtgtgagcagcttccgacccctgccccatttgaacgggggccttgctggtcgcgtccctgcattcacccgcgcggccatcccgtcatccaacagttgatcctaactgagcacgcccacggccctggtctggcctgggcaccggccaccgtagcccatcccttgatggcctctgtgtccccaggagggcgggccggggggttgcccaggggctggagcagtggactgtggctccatagaggtaggccggagggtgtgagggcagattcaagctatccccagggctctgctctggtcggagccagccccttctccctctctgccttccccgccccattcctgatgctgaactgttctggacccctggccctgagtctctcaggaccaaagtgggcacgggaacagctgtagtgtgtgcccccccgggctttggccacaggtctccctctcgaggtgtggttgtgactgcgacccttcccttgccgtgatgccttcctcccccggggcttggtccagctccttcactctctagcagctgctggggcccacctcccatgccgaggaccagcaggggaaacctccagggagcatctgcaggctctgcttctgcccggctgctggcttgctctccctggtggctctccagcggccagcttcctcacccacccggcactctgctttgctctgtctcctgaggtgggcctgaccaacctccccttctctgcctcagtccctgggctccagggctcagctccacagccctctgcctagcaggctggttctccctgccaagcccatacctgtggtcacctggccctcctgtggtctgagtaccactcccctgccccaggagccactcccactccagctgcctgtttccagcaggttcccagtgcccccgacaagcccctgctggtgtctccatctcctgccaagcatcctccagtgcctcctcctgtgggcctggcctcagggctatggacagactcctgtcccatcccagagacccctcgtgatcgttccctggcacgtgggccgtggcccggctgggtcggctgaagaactgcggatggaagctgcggaagaggccctgatggggcccaccatcccggacccaagtcttcttcctggcgggcctctcgtctccttcctggtttgggncngnaagccatcacctggatcctacgtggaaggacctgggtgggggagggggggggggtgttcattcttaaattcctccacagccacggggacaccctgcacctattcccacgggacaggctggacccagagactctggacccggggcctccccttgagtagagacccgccctctgactgatggacgccgctgacctggggtcagacccgtgggctggacccctgcccaccccgcaggaaccctgaggcctaggggagctgttgagccttcagtgtctgcatgtgggaagtgggctccttcacctacctcacagggctgttgtgaggggcgctgtgatgcggttccaaagcacagggcttggcgcaccccactgtgctctcaataaatgtgtttcctgtcttaacaaaaa

SEQ ID NO: 366315 - DNA, 8769 bp, Homo sapiens
atatcagggtggtttataaagcctgtaaacacacctaagaaaataaacattttacaaatgaaaaaaaaaaaaaaaaaaaaaaaaaagcagagagggagcgcgccttggctcgctggccttggcggcggctcctcaggagagctggggcgcccacgagaggatccctcacccgggtctctcctcagggatgacatcatccgtccacctccttgtcttcaaggaccacctcctctccatgctgagctgctgccaaggggcctgctgcccatctacacctcacgagggcactaggagcacggtttcctggatcccaccaacatacaaagcagccactcactgacccccaggaccaggatggcaaaggatgaagaggaccggaactgaccagccagctgtccctcttacctaaagacttaaaccaatgccctagtgagggggcattgggcattaagccctgacctttgctatgctcatactttgactctatgagtactttcctataagtctttgcttgtgttcacctgctagcaaactggagtgtttccctccccaagggggtgtcagtctttgtcgactgactctgtcatcacccttatgatgtcctgaatggaaggatccctttgggaaattctcaggagggggacctgggccaagggcttggccagcatcctgctggcaactccaaggccctgggtgggcttctggaatgagcatgctactgaatcaccaaaggcacgccccacctctctgaagatcttcctatccttttctgggggaatggggtcgatgagagcaacctcctagggttgttgtgagaattaaatgagataaaagaggcctcaggcaggatctggcatagaggaggtgatcagcaaatgtttgttgaaaaggtttgacaggtcagtcccttcccacccctcttgcttgtcttacttgtcttatttattctccaacagcactccaggcagcccttgtccacgggctctccttgcatcaggtaggggctttgcagagaccatcgacgggctgacttgagtaagaacacgaattatgcatgtggccatttccagagcactttctatgtgatatgaacatgtgatttttatgtaatatgtgtatgtaaacgaggcagcctcatttccaggtgaggatgcatttggtagtgttgatttttgtaatttaaagaagctgaaagggagagaggacccgtgaggactgaactctctgtcccatggggtagggcttacatttacattaaagaaacagaaacttgctgggaggtgtaagtatttggtcacattgctggcaacagaaggggttggagttggacccagggtgccacgctagctgccctcaccccttcttcccctctggcccagagttatactaagagtccttttatttcaaaccaaatgtttgacaatgggacagtctgtttgaaatcccagctgcctggggtggtcttggggggtctgggtggccccagtgctggtaccatgtgctggcttcaccttttaataacagtgtgaccttaaacaagtcgcttaactactctaagtttcagtttctttcatggtctaaatggagattaaaacacacacacacacacacacacacacacacacacacacacaccctcgtgtatctaccccacagggcgcttttgaagaccaaatgctgtaactactatgaaagtgctttgtaaattgctgtggaaagtgtgagctactcaagcacccgaggctgtccctccttgctcacatgtccagcccaattctcccttagtgagaacagcactcagtaggtgctgtgtgtgtttgtgttcaattaagaaattccagaataaataaaaatgaattaattcaacaaacattttctggggcaccgacaatctgcccagtgcaccaggctaggtatctgatacaaagataatgaaaacagtctcttggaacctaattggggtcctcatttgaccaggaatttctttcgtcccgttttaagccaaccagttttgtccggacaagacaaaaacaacttgggctgctttagagaagcccagctcagtgtagacaatagctgcccagcctctgaaaggggctgattggattatgtggcaaatggaggtgcaaggatgacttggacggtgacaaatgaagtgggcggagacctgctttgagttaatccaggctattaggaggggaccttttgtcttccagagactggcaggagcttttaccagtggtttttacatccttaatgttcaggacgaataatttatggtcagtgaaaatccaggccccagtgagattcgagtgggctgtaaaatcgagagtcctgctcccagtgagtaatggtagtgaatgtttctgtcactttttgcaaccgtccattcatttgatcctcacaactccctgtcctgagccaggaccggccactgccactcccagggaaacagaggctgtcaagaggctccacagattgggccccactggatcattgaacccctgttccctgagttctagaggaagaattgtacctgtctcagtcccggccacctccagaaggcctccctctgcatttctgactttgctgtgccggcagcctggagcctcccaggtccctgctgtcatcttttctagccactacagtctctgtctttcctttcacagccccaagcttcttgaaaggcctgtctacacttgctgtcttccttcctcacctccaatttcctcttcaacccactgcttcctgactcgctctactccgtggaagcacgctcacaaaggtaaagacttttctgtggcttaatccttgtcatgttttcggctcatggacacaaggacacattttcatgccttctctcacagggctctgcgtctccggttcacttctgtgtctttacactcccttcacagagacacttgctcccccttctctcgttcttagcatcccctaggaacttgcacacccaggtctctcgacttctggacctgcttcttaccatgccgtcttaagcagtcaggagtcgctgcctgggttcgagtcctagttaaattacttagtgctgagaccttggggtaggtaaacttttccaagccaggtttatctcagtttcaaaatagggttaatcgtctttatctggcaggtcaggtgggatgtctcacaggtaagcaccagatgccatttgaaaggcttgaagcaaagtcaataaagcattcatgggaaaatacaactggaggcaccactagattttcgtatacattaggttcccacggggaggaccgaagagagaagaaagaagtggaaagggaggagcgtgcaggagagacaggagaagagaataactaaacaaagacattaaagacaaaaaaaaagtaggaaagggagacttagaaaatattaaaagccaccaaaaacacatccaaagacggtttccccttacgttagttgggctaaaagaaagcaaatgggaagaaggttttaaattgattatcccagtgacaaatcccaggaagctttcacatcaaatcaccctattctgggtttttaactccttccatcgagtttaacctctttacctcccacatcctggtaaaccctgccccctccctaccgccccctttgctggtgattaaatcctgaaggtacacgaagtatttcagtgaatgaatggctaacagaaaagggcctcccctcccccttaccctggcggtgtttttcagttttattccactttccgcccttttcccttaatgaacacagggctaatctcgggccttgtcgaaggaagaggctgcagacgttaatgaggttagctgctggattccagtattcgtcgcataaggatccttctttgtctgcgaaggaaaaacacactgattatcataatgagtaatgaggtgaactggccaccgccgggccggggcgatgtggcttcttaagccacacttctaattttggtgatggagccgacatttctttggcttctcatttaagtctttgcctctgtcccagtgcgaagtccattcagcggggttgaaagttgcaggcagctttgggaaggggggcgtcggacagggttgcattgtagaaagtggctttgttcgatccttcgcacagatgcaaatggccagagcattcattccctttcttcaagagctgaggactgggggggccactggtgatcagttcccaactctagctctcctctgactcatctcaggacccattgaggacatccaaaactcactcaagatcaccaagtggtaggaaagtactaactcctgggcatagccctaggggagtgactacaatgtgaatactcatggaatgcctagccaggtgaagaagtgaatgcatgttggcatcccagagggaccccccttaagagggcatagtttggggttcagatttgactccagcatactgttgaaattgggcacagggggctagtgattagtcaggatcaatcagtggagaggagattaaaactcacatctgggagtccggaatcagaacttgtagttcttttttttgaaatggagtctcgctctgtcgcccaggctggagtgcagtggcgtgatctcggctcactgcaacctctgccttccgggttcaagcaattctcccacctcagcctcctgagtagctgggattacaggcgcccaccaccacagccggctactttttgtatttttaggagagacggggtttcaccatgttggtcaggctggtcttgaactcctgacctcatgatccacctgccttagcctcccaaagtgctgggattacaggcgtgagccaccatgcccagccctatagtagttcttcttttgccccttaatatcctcacccacatgtcctgtaccctgcctgaaccctcctcctctttttgttctgatctttgagctccctagagcccataattctttagagcaggtatgtcccgagtctgaaacatgcccttatttgtcccaagctctggacatttctcaccccaaggcggatcaatcatgattaaatcactccaattaaactttaggctccagtcagaccttcagccaaatggaaaaaaaaactaggggataagggaggtagttggagcaagaaaatgttattagttgaaaccttacgggaccttcctcccttagtgagtctgttggctaaaggttctctggcttcgtgaattagaatcggatactgtttccaagttagcaaaaccaactctaccccagcaccccacgaggaagaatgtggaaggatctcccattggccggttggggcaaaagcctgaggcaatctttcatccccttttgccaaggcgagactttcccagtgacggtgatgtagttggccactctgactatgggtggactcgggtgtagacctctgaagctgagatcacacgaaaacctggcctccccgccatgtagctgttggagagtagaaaaatagagcacgcctgatgtttctaaatgagaagactttcaatagtaatgaagaatccatggcactctcctcaccctcaaacacatggcagtcattcacatacaggccccaaagccactgttagtgctgcagtagctcctgtggacattggaaagcccggagagggcgtggaagaaatcagctggcccccggcaggttctctggggttttgtgcccaaggctcctggagccctaaaaactttcaaaagttaactccccacgtccccatcctgcttgggtttctggacttttctgaggcaccggcagaggggtctcgttgctcccttgagtgtaggggcagccctttaacctggctccttgagtccctgctttttctgcttctgttgccttcttcctcgtcttcctctctctcaatatctccctctctttgtccctccccagttcctgacctggccatcccggggtgcccttgaccagccccgtgtctcctcagggtgtcccagcaccagcctggcacagagtggggctcagttagagtatgtgggatgttggtttcgccaggtgagtgaatgaaaggactcgaccaccacagctgagccactagctgggccatgcgaagagttctaggtgcaaaggctggagggtggaattcatttttgagaggtgtgtgagcagcttccgacccctgccccatttgaacgggggccttgctggtcgcgtccctgcattcacccgcgcggccatcccgtcatccaacagttgatcctaactgagcacgcccacggccctggtctggcctgggcaccggccaccgtagcccatcccttgatggcctctgtgtccccaggagggcgggccggggggttgcccaggggctggagcagtggactgtggctccatagaggtaggccggagggtgtgagggcagattcaagctatccccagggctctgctctggtcggagccagccccttctccctctctgccttccccgccccattcctgatgctgaactgttctggacccctggccctgagtctctcaggaccaaagtgggcacgggaacagctgtagtgtgtgcccccccgggctttggccacaggtctccctctcgaggtgtggttgtgactgcgacccttcccttgccgtgatgccttcctcccccggggcttggtccagctccttcactctctagcagctgctggggcccacctcccatgccgaggaccagcaggggaaacctccagggagcatctgcaggctctgcttctgcccggctgctggcttgctctccctggtggctctccagcggccagcttcctcacccacccggcactctgctttgctctgtctcctgaggtgggcctgaccaacctccccttctctgcctcagtccctgggctccagggctcagctccacagccctctgcctagcaggctggttctccctgccaagcccatacctgtggtcacctggccctcctgtggtctgagtaccactcccctgccccaggagccactcccactccagctgcctgtttccagcaggttcccagtgcccccgacaagcccctgctggtgtctccatctcctgccaagcatcctccagtgcctcctcctgtgggcctggcctcagggctatggacagactcctgtcccatcccagagacccctcgtgatcgttccctggcacgtgggccgtggcccggctgggtcggctgaagaactgcggatggaagctgcggaagaggccctgatggggcccaccatcccggacccaagtcttcttcctggcgggcctctcgtctccttcctggtttgggcggaagccatcacctggatgcctacgtgggaagggacctcgaatgtgggaccccagcccctctccagctcgaaatcggcagactaggatggaagtgccctgtgagctggggggcccttcaaagggccaaggagaaaacgcaggccgagggaccagccttccaaatgggcttcaagctccaatgacctccgctcgccccctcgaaatgtctggaaaacataatgggcagattttctgtcttcaaagtttccggctaaacctcttcaagttctttattgtttgggactgagacactcagccatgttaatgggtagtttcttttgtatttgccttgaaaggccaaaatatttttatattgccacagacaaagccacctatttaaaaatgaactccatgtccgtcgtttcccaccaggagactatgtaccatgtgtgtgtctctatgtattctggggtcttgaaacaggtttctcatggggatggtcattcaccacggtccagaggggcagaacaggcggcgcttgccttgcccagggggcctggggaacgtgggccctcatctcagatctgcccccagtatgtttaggacgcgagccccagaaggatctgggagtaaacttaacattcactgtgtctctgctctgcatccgccatttgtgtgtgtttctggactgtgggctgtgtgtaccttggttggtgactcagtgagaagaagcaggaatgccaaagatactgtgaatgttctgagttttgttgctgttgttgttgagaggttgtttcactggtatctattgcattgtataataaatgaccagatgaatgaatgagtgaagcaagagagaatgaataaacaagtaaataggtaaagaagtaagcaagccaggatgagagtgtgtgtacacaagaccatggttcatccgctttgatggctaggcaatcaatatataaatagaaaaaacccagtgaatcactaagtaatagggcaacacacaaagcgatatcaggtgattatggactaaggggtatgtgtaactcaaatatatgcctctgacatttgacaatgaaaaagaacctaaatgaaagaaagaatggatgtatgagtagtgaagtgcagaatgagacatagattttgaggcccgtcaaaatgaaaagatgcaagttagggaacaagtgatcaaaagggagaagggaaaggttttttttaaaaaaccaaaacaacaaagaaaggttaaaaaaaaaaacagactagaggatgagtaatgagtaactctgtaaggaggaccatgtcagactattgtaagctaagcattaggactgatacaaataatatatgctcctggcatagaaaaataaaccacagagaacgagttcaaagaatagcaaagaaagaaagaggacccagtgggcgaaagatgagagtgtacttttaccaaaagttatctaagcctgagcacttgaagtctgcacataaataaataaatgacaaaagaaagaaaaaaa

SEQ ID NO: 366316 - DNA, 4438 bp, Homo sapiens
atatcagggtggtttataaagcctgtaaacacacctaagaaaataaacattttacaaatgaaaaaaaaaaaaaaaaaaaaaaaaaagcagagagggagcgcgccttggctcgctggccttggcggcggctcctcaggagagctggggcgcccacgagaggatccctcacccgggtctctcctcagggatgacatcatccgtccacctccttgtcttcaaggaccacctcctctccatgctgagctgctgccaaggggcctgctgcccatctacacctcacgagggcactaggagcacggtttcctggatcccaccaacatacaaagcagccactcactgacccccaggaccaggatggcaaaggatgaagaggaccggaactgaccagccagctgtccctcttacctaaagacttaaaccaatgccctagtgagggggcattgggcattaagccctgacctttgctatgctcatactttgactctatgagtactttcctataagtctttgcttgtgttcacctgctagcaaactggagtgtttccctccccaagggggtgtcagtctttgtcgactgactctgtcatcacccttatgatgtcctgaatggaaggatccctttgggaaattctcaggagggggacctgggccaagggcttggccagcatcctgctggcaactccaaggccctgggtgggcttctggaatgagcatgctactgaatcaccaaaggcacgccccacctctctgaagatcttcctatccttttctgggggaatggggtcgatgagagcaacctcctagggttgttgtgagaattaaatgagataaaagaggcctcaggcaggatctggcatagaggaggtgatcagcaaatgtttgttgaaaaggtttgacaggtcagtcccttcccacccctcttgcttgtcttacttgtcttatttattctccaacagcactccaggcagcccttgtccacgggctctccttgcatcaggtaggggctttgcagagaccatcgacgggctgacttgagtaagaacacgaattatgcatgtggccatttccagagcactttctatgtgatatgaacatgtgatttttatgtaatatgtgtatgtaaacgaggcagcctcatttccaggtgaggatgcatttggtagtgttgatttttgtaatttaaagaagctgaaagggagagaggacccgtgaggactgaactctctgtcccatggggtagggcttacatttacattaaagaaacagaaacttgctgggaggtgtaagtatttggtcacattgctggcaacagaaggggttggagttggacccagggtgccacgctagctgccctcaccccttcttcccctctggcccagagttatactaagagtccttttatttcaaaccaaatgtttgacaatgggacagtctgtttgaaatcccagctgcctggggtggtcttggggggtctgggtggccccagtgctggtaccatgtgctggcttcaccttttaataacagtgtgaccttaaacaagtcgcttaactactctaagtttcagtttctttcatggtctaaatggagattaaaacacacacacacacacacacacacacacacacacacacacaccctcgtgtatctaccccacagggcgcttttgaagaccaaatgctgtaactactatgaaagtgctttgtaaattgctgtggaaagtgtgagctactcaagcacccgaggctgtccctccttgctcacatgtccagcccaattctcccttagtgagaacagcactcagtaggtgctgtgtgtgtttgtgttcaattaagaaattccagaataaataaaaatgaattaattcaacaaacattttctggggcaccgacaatctgcccagtgcaccaggctaggtatctgatacaaagataatgaaaacagtctcttggaacctaattggggtcctcatttgaccaggaatttctttcgtcccgttttaagccaaccagttttgtccggacaagacaaaaacaacttgggctgctttagagaagcccagctcagtgtagacaatagctgcccagcctctgaaaggggctgattggattatgtggcaaatggaggtgcaaggatgacttggacggtgacaaatgaagtgggcggagacctgctttgagttaatccaggctattaggaggggaccttttgtcttccagagactggcaggagcttttaccagtggtttttacatccttaatgttcaggacgaataatttatggtcagtgaaaatccaggccccagtgagattcgagtgggctgtaaaatcgagagtcctgctcccagtgagtaatggtagtgaatgtttctgtcactttttgcaaccgtccattcatttgatcctcacaactccctgtcctgagccaggaccggccactgccactcccagggaaacagaggctgtcaagaggctccacagattgggccccactggatcattgaacccctgttccctgagttctagaggaagaattgtacctgtctcagtcccggccacctccagaaggcctccctctgcatttctgactttgctgtgccggcagcctggagcctcccaggtccctgctgtcatcttttctagccactacagtctctgtctttcctttcacagccccaagcttcttgaaaggcctgtctacacttgctgtcttccttcctcacctccaatttcctcttcaacccactgcttcctgactcgctctactccgtggaagcacgctcacaaaggtaaagacttttctgtggcttaatccttgtcatgttttcggctcatggacacaaggacacattttcatgccttctctcacagggctctgcgtctccggttcacttctgtgtctttacactcccttcacagagacacttgctcccccttctctcgttcttagcatcccctaggaacttgcacacccaggtctctcgacttctggacctgcttcttaccatgccgtcttaagcagtcaggagtcgctgcctgggttcgagtcctagttaaattacttagtgctgagaccttggggtaggtaaacttttccaagccaggtttatctcagtttcaaaatagggttaatcgtctttatctggcaggtcaggtgggatgtctcacaggtaagcaccagatgccatttgaaaggcttgaagcaaagtcaataaagcattcatgggaaaatacaactggaggcaccactagattttcgtatacattaggttcccacggggaggaccgaagagagaagaaagaagtggaaagggaggagcgtgcaggagagacaggagaagagaataactaaacaaagacattaaagacaaaaaaaaagtaggaaagggagacttagaaaatattaaaagccaccaaaaacacatccaaagacggtttccccttacgttagttgggctaaaagaaagcaaatgggaagaaggttttaaattgattatcccagtgacaaatcccaggaagctttcacatcaaatcaccctattctgggtttttaactccttccatcgagtttaacctctttacctcccacatcctggtaaaccctgccccctccctaccgccccctttgctggtgattaaatcctgaaggtacacgaagtatttcagtgaatgaatggctaacagaaaagggcctcccctcccccttaccctggcggtgtttttcagttttattccactttccgcccttttcccttaatgaacacagggctaatctcgggccttgtcgaaggaagaggctgcagacgttaatgaggttagctgctggattccagtattcgtcgcataaggatccttctttgtctgcgaaggaaaaacacactgattatcataatgaggcacgtgggccgtggcccggctgggtcggctgaagaactgcggatggaagctgcggaagaggccctgatggggcccaccatcccggacccaagtcttcttcctggcgggcctctcgtctccttcctggtttgggcggaagccatcacctggatgcctacgtgggaagggacctcgaatgtgggaccccagcccctctccagctcgaaatccctccacagccacggggacaccctgcacctattcccacgggacaggctggacccagagactctggacccggggcctccccttgagtagagacccgccctctgactgatggacgccgctgacctggggtcagacccgtgggctggacccctgcccaccccgcaggaaccctgaggcctaggggagctgttgagccttcagtgtctgcatgtgggaagtgggctccttcacctacctcacagggctgttgtgaggggcgctgtgatgcggttccaaagcacagggcttggcgcaccccactgtgctctcaataaatgtgtttcctgtcttaacaaaaa

SEQ ID NO: 366317 - DNA, 7515 bp, Homo sapiens
atatcagggtggtttataaagcctgtaaacacacctaagaaaataaacattttacaaatgaaaaaaaaaaaaaaaaaaaaaaaaaagcagagagggagcgcgccttggctcgctggccttggcggcggctcctcaggagagctggggcgcccacgagaggatccctcacccgggtctctcctcagggatgacatcatccgtccacctccttgtcttcaaggaccacctcctctccatgctgagctgctgccaaggggcctgctgcccatctacacctcacgagggcactaggagcacggtttcctggatcccaccaacatacaaagcagccactcactgacccccaggaccaggatggcaaaggatgaagaggaccggaactgaccagccagctgtccctcttacctaaagacttaaaccaatgccctagtgagggggcattgggcattaagccctgacctttgctatgctcatactttgactctatgagtactttcctataagtctttgcttgtgttcacctgctagcaaactggagtgtttccctccccaagggggtgtcagtctttgtcgactgactctgtcatcacccttatgatgtcctgaatggaaggatccctttgggaaattctcaggagggggacctgggccaagggcttggccagcatcctgctggcaactccaaggccctgggtgggcttctggaatgagcatgctactgaatcaccaaaggcacgccccacctctctgaagatcttcctatccttttctgggggaatggggtcgatgagagcaacctcctagggttgttgtgagaattaaatgagataaaagaggcctcaggcaggatctggcatagaggaggtgatcagcaaatgtttgttgaaaaggtttgacaggtcagtcccttcccacccctcttgcttgtcttacttgtcttatttattctccaacagcactccaggcagcccttgtccacgggctctccttgcatcaggtaggggctttgcagagaccatcgacgggctgacttgagtaagaacacgaattatgcatgtggccatttccagagcactttctatgtgatatgaacatgtgatttttatgtaatatgtgtatgtaaacgaggcagcctcatttccaggtgaggatgcatttggtagtgttgatttttgtaatttaaagaagctgaaagggagagaggacccgtgaggactgaactctctgtcccatggggtagggcttacatttacattaaagaaacagaaacttgctgggaggtgtaagtatttggtcacattgctggcaacagaaggggttggagttggacccagggtgccacgctagctgccctcaccccttcttcccctctggcccagagttatactaagagtccttttatttcaaaccaaatgtttgacaatgggacagtctgtttgaaatcccagctgcctggggtggtcttggggggtctgggtggccccagtgctggtaccatgtgctggcttcaccttttaataacagtgtgaccttaaacaagtcgcttaactactctaagtttcagtttctttcatggtctaaatggagattaaaacacacacacacacacacacacacacacacacacacacacaccctcgtgtatctaccccacagggcgcttttgaagaccaaatgctgtaactactatgaaagtgctttgtaaattgctgtggaaagtgtgagctactcaagcacccgaggctgtccctccttgctcacatgtccagcccaattctcccttagtgagaacagcactcagtaggtgctgtgtgtgtttgtgttcaattaagaaattccagaataaataaaaatgaattaattcaacaaacattttctggggcaccgacaatctgcccagtgcaccaggctaggtatctgatacaaagataatgaaaacagtctcttggaacctaattggggtcctcatttgaccaggaatttctttcgtcccgttttaagccaaccagttttgtccggacaagacaaaaacaacttgggctgctttagagaagcccagctcagtgtagacaatagctgcccagcctctgaaaggggctgattggattatgtggcaaatggaggtgcaaggatgacttggacggtgacaaatgaagtgggcggagacctgctttgagttaatccaggctattaggaggggaccttttgtcttccagagactggcaggagcttttaccagtggtttttacatccttaatgttcaggacgaataatttatggtcagtgaaaatccaggccccagtgagattcgagtgggctgtaaaatcgagagtcctgctcccagtgagtaatggtagtgaatgtttctgtcactttttgcaaccgtccattcatttgatcctcacaactccctgtcctgagccaggaccggccactgccactcccagggaaacagaggctgtcaagaggctccacagattgggccccactggatcattgaacccctgttccctgagttctagaggaagaattgtacctgtctcagtcccggccacctccagaaggcctccctctgcatttctgactttgctgtgccggcagcctggagcctcccaggtccctgctgtcatcttttctagccactacagtctctgtctttcctttcacagccccaagcttcttgaaaggcctgtctacacttgctgtcttccttcctcacctccaatttcctcttcaacccactgcttcctgactcgctctactccgtggaagcacgctcacaaaggtaaagacttttctgtggcttaatccttgtcatgttttcggctcatggacacaaggacacattttcatgccttctctcacagggctctgcgtctccggttcacttctgtgtctttacactcccttcacagagacacttgctcccccttctctcgttcttagcatcccctaggaacttgcacacccaggtctctcgacttctggacctgcttcttaccatgccgtcttaagcagtcaggagtcgctgcctgggttcgagtcctagttaaattacttagtgctgagaccttggggtaggtaaacttttccaagccaggtttatctcagtttcaaaatagggttaatcgtctttatctggcaggtcaggtgggatgtctcacaggtaagcaccagatgccatttgaaaggcttgaagcaaagtcaataaagcattcatgggaaaatacaactggaggcaccactagattttcgtatacattaggttcccacggggaggaccgaagagagaagaaagaagtggaaagggaggagcgtgcaggagagacaggagaagagaataactaaacaaagacattaaagacaaaaaaaaagtaggaaagggagacttagaaaatattaaaagccaccaaaaacacatccaaagacggtttccccttacgttagttgggctaaaagaaagcaaatgggaagaaggttttaaattgattatcccagtgacaaatcccaggaagctttcacatcaaatcaccctattctgggtttttaactccttccatcgagtttaacctctttacctcccacatcctggtaaaccctgccccctccctaccgccccctttgctggtgattaaatcctgaaggtacacgaagtatttcagtgaatgaatggctaacagaaaagggcctcccctcccccttaccctggcggtgtttttcagttttattccactttccgcccttttcccttaatgaacacagggctaatctcgggccttgtcgaaggaagaggctgcagacgttaatgaggttagctgctggattccagtattcgtcgcataaggatccttctttgtctgcgaaggaaaaacacactgattatcataatgagtaatgaggtgaactggccaccgccgggccggggcgatgtggcttcttaagccacacttctaattttggtgatggagccgacatttctttggcttctcatttaagtctttgcctctgtcccagtgcgaagtccattcagcggggttgaaagttgcaggcagctttgggaaggggggcgtcggacagggttgcattgtagaaagtggctttgttcgatccttcgcacagatgcaaatggccagagcattcattccctttcttcaagagctgaggactgggggggccactggtgatcagttcccaactctagctctcctctgactcatctcaggacccattgaggacatccaaaactcactcaagatcaccaagtggtaggaaagtactaactcctgggcatagccctaggggagtgactacaatgtgaatactcatggaatgcctagccaggtgaagaagtgaatgcatgttggcatcccagagggaccccccttaagagggcatagtttggggttcagatttgactccagcatactgttgaaattgggcacagggggctagtgattagtcaggatcaatcagtggagaggagattaaaactcacatctgggagtccggaatcagaacttgtagttcttttttttgaaatggagtctcgctctgtcgcccaggctggagtgcagtggcgtgatctcggctcactgcaacctctgccttccgggttcaagcaattctcccacctcagcctcctgagtagctgggattacaggcgcccaccaccacagccggctactttttgtatttttaggagagacggggtttcaccatgttggtcaggctggtcttgaactcctgacctcatgatccacctgccttagcctcccaaagtgctgggattacaggcgtgagccaccatgcccagccctatagtagttcttcttttgccccttaatatcctcacccacatgtcctgtaccctgcctgaaccctcctcctctttttgttctgatctttgagctccctagagcccataattctttagagcaggtatgtcccgagtctgaaacatgcccttatttgtcccaagctctggacatttctcaccccaaggcggatcaatcatgattaaatcactccaattaaactttaggctccagtcagaccttcagccaaatggaaaaaaaaactaggggataagggaggtagttggagcaagaaaatgttattagttgaaaccttacgggaccttcctcccttagtgagtctgttggctaaaggttctctggcttcgtgaattagaatcggatactgtttccaagttagcaaaaccaactctaccccagcaccccacgaggaagaatgtggaaggatctcccattggccggttggggcaaaagcctgaggcaatctttcatccccttttgccaaggcgagactttcccagtgacggtgatgtagttggccactctgactatgggtggactcgggtgtagacctctgaagctgagatcacacgaaaacctggcctccccgccatgtagctgttggagagtagaaaaatagagcacgcctgatgtttctaaatgagaagactttcaatagtaatgaagaatccatggcactctcctcaccctcaaacacatggcagtcattcacatacaggccccaaagccactgttagtgctgcagtagctcctgtggacattggaaagcccggagagggcgtggaagaaatcagctggcccccggcaggttctctggggttttgtgcccaaggctcctggagccctaaaaactttcaaaagttaactccccacgtccccatcctgcttgggtttctggacttttctgaggcaccggcagaggggtctcgttgctcccttgagtgtaggggcagccctttaacctggctccttgagtccctgctttttctgcttctgttgccttcttcctcgtcttcctctctctcaatatctccctctctttgtccctccccagttcctgacctggccatcccggggtgcccttgaccagccccgtgtctcctcagggtgtcccagcaccagcctggcacagagtggggctcagttagagtatgtgggatgttggtttcgccaggtgagtgaatgaaaggactcgaccaccacagctgagccactagctgggccatgcgaagagttctaggtgcaaaggctggagggtggaattcatttttgagaggtgtgtgagcagcttccgacccctgccccatttgaacgggggccttgctggtcgcgtccctgcattcacccgcgcggccatcccgtcatccaacagttgatcctaactgagcacgcccacggccctggtctggcctgggcaccggccaccgtagcccatcccttgatggcctctgtgtccccaggagggcgggccggggggttgcccaggggctggagcagtggactgtggctccatagaggtaggccggagggtgtgagggcagattcaagctatccccagggctctgctctggtcggagccagccccttctccctctctgccttccccgccccattcctgatgctgaactgttctggacccctggccctgagtctctcaggaccaaagtgggcacgggaacagctgtagtgtgtgcccccccgggctttggccacaggtctccctctcgaggtgtggttgtgactgcgacccttcccttgccgtgatgccttcctcccccggggcttggtccagctccttcactctctagcagctgctggggcccacctcccatgccgaggaccagcaggggaaacctccagggagcatctgcaggctctgcttctgcccggctgctggcttgctctccctggtggctctccagcggccagcttcctcacccacccggcactctgctttgctctgtctcctgaggtgggcctgaccaacctccccttctctgcctcagtccctgggctccagggctcagctccacagccctctgcctagcaggctggttctccctgccaagcccatacctgtggtcacctggccctcctgtggtctgagtaccactcccctgccccaggagccactcccactccagctgcctgtttccagcaggttcccagtgcccccgacaagcccctgctggtgtctccatctcctgccaagcatcctccagtgcctcctcctgtgggcctggcctcagggctatggacagactcctgtcccatcccagagacccctcgtgatcgttccctggcacgtgggccgtggcccggctgggtcggctgaagaactgcggatggaagctgcggaagaggccctgatggggcccaccatcccggacccaagtcttcagactctggacccggggcctccccttgagtagagacccgccctctgactgatggacgccgctgacctggggtcagacccgtgggctggacccctgcccaccccgcaggaaccctgaggcctaggggagctgttgagccttcagtgtctgcatgtgggaagtgggctccttcacctacctcacagggctgttgtgaggggcgctgtgatgcggttccaaagcacagggcttggcgcaccccactgtgctctcaataaatgtgtttcctgtcttaacaaaaa

SEQ ID NO: 366318 - DNA, 7404 bp, Homo sapiens
atatcagggtggtttataaagcctgtaaacacacctaagaaaataaacattttacaaatgaaaaaaaaaaaaaaaaaaaaaaaaaagcagagagggagcgcgccttggctcgctggccttggcggcggctcctcaggagagctggggcgcccacgagaggatccctcacccgggtctctcctcagggatgacatcatccgtccacctccttgtcttcaaggaccacctcctctccatgctgagctgctgccaaggggcctgctgcccatctacacctcacgagggcactaggagcacggtttcctggatcccaccaacatacaaagcagccactcactgacccccaggaccaggatggcaaaggatgaagaggaccggaactgaccagccagctgtccctcttacctaaagacttaaaccaatgccctagtgagggggcattgggcattaagccctgacctttgctatgctcatactttgactctatgagtactttcctataagtctttgcttgtgttcacctgctagcaaactggagtgtttccctccccaagggggtgtcagtctttgtcgactgactctgtcatcacccttatgatgtcctgaatggaaggatccctttgggaaattctcaggagggggacctgggccaagggcttggccagcatcctgctggcaactccaaggccctgggtgggcttctggaatgagcatgctactgaatcaccaaaggcacgccccacctctctgaagatcttcctatccttttctgggggaatggggtcgatgagagcaacctcctagggttgttgtgagaattaaatgagataaaagaggcctcaggcaggatctggcatagaggaggtgatcagcaaatgtttgttgaaaaggtttgacaggtcagtcccttcccacccctcttgcttgtcttacttgtcttatttattctccaacagcactccaggcagcccttgtccacgggctctccttgcatcaggtaggggctttgcagagaccatcgacgggctgacttgagtaagaacacgaattatgcatgtggccatttccagagcactttctatgtgatatgaacatgtgatttttatgtaatatgtgtatgtaaacgaggcagcctcatttccaggtgaggatgcatttggtagtgttgatttttgtaatttaaagaagctgaaagggagagaggacccgtgaggactgaactctctgtcccatggggtagggcttacatttacattaaagaaacagaaacttgctgggaggtgtaagtatttggtcacattgctggcaacagaaggggttggagttggacccagggtgccacgctagctgccctcaccccttcttcccctctggcccagagttatactaagagtccttttatttcaaaccaaatgtttgacaatgggacagtctgtttgaaatcccagctgcctggggtggtcttggggggtctgggtggccccagtgctggtaccatgtgctggcttcaccttttaataacagtgtgaccttaaacaagtcgcttaactactctaagtttcagtttctttcatggtctaaatggagattaaaacacacacacacacacacacacacacacacacacacacacaccctcgtgtatctaccccacagggcgcttttgaagaccaaatgctgtaactactatgaaagtgctttgtaaattgctgtggaaagtgtgagctactcaagcacccgaggctgtccctccttgctcacatgtccagcccaattctcccttagtgagaacagcactcagtaggtgctgtgtgtgtttgtgttcaattaagaaattccagaataaataaaaatgaattaattcaacaaacattttctggggcaccgacaatctgcccagtgcaccaggctaggtatctgatacaaagataatgaaaacagtctcttggaacctaattggggtcctcatttgaccaggaatttctttcgtcccgttttaagccaaccagttttgtccggacaagacaaaaacaacttgggctgctttagagaagcccagctcagtgtagacaatagctgcccagcctctgaaaggggctgattggattatgtggcaaatggaggtgcaaggatgacttggacggtgacaaatgaagtgggcggagacctgctttgagttaatccaggctattaggaggggaccttttgtcttccagagactggcaggagcttttaccagtggtttttacatccttaatgttcaggacgaataatttatggtcagtgaaaatccaggccccagtgagattcgagtgggctgtaaaatcgagagtcctgctcccagtgagtaatggtagtgaatgtttctgtcactttttgcaaccgtccattcatttgatcctcacaactccctgtcctgagccaggaccggccactgccactcccagggaaacagaggctgtcaagaggctccacagattgggccccactggatcattgaacccctgttccctgagttctagaggaagaattgtacctgtctcagtcccggccacctccagaaggcctccctctgcatttctgactttgctgtgccggcagcctggagcctcccaggtccctgctgtcatcttttctagccactacagtctctgtctttcctttcacagccccaagcttcttgaaaggcctgtctacacttgctgtcttccttcctcacctccaatttcctcttcaacccactgcttcctgactcgctctactccgtggaagcacgctcacaaaggtaaagacttttctgtggcttaatccttgtcatgttttcggctcatggacacaaggacacattttcatgccttctctcacagggctctgcgtctccggttcacttctgtgtctttacactcccttcacagagacacttgctcccccttctctcgttcttagcatcccctaggaacttgcacacccaggtctctcgacttctggacctgcttcttaccatgccgtcttaagcagtcaggagtcgctgcctgggttcgagtcctagttaaattacttagtgctgagaccttggggtaggtaaacttttccaagccaggtttatctcagtttcaaaatagggttaatcgtctttatctggcaggtcaggtgggatgtctcacaggtaagcaccagatgccatttgaaaggcttgaagcaaagtcaataaagcattcatgggaaaatacaactggaggcaccactagattttcgtatacattaggttcccacggggaggaccgaagagagaagaaagaagtggaaagggaggagcgtgcaggagagacaggagaagagaataactaaacaaagacattaaagacaaaaaaaaagtaggaaagggagacttagaaaatattaaaagccaccaaaaacacatccaaagacggtttccccttacgttagttgggctaaaagaaagcaaatgggaagaaggttttaaattgattatcccagtgacaaatcccaggaagctttcacatcaaatcaccctattctgggtttttaactccttccatcgagtttaacctctttacctcccacatcctggtaaaccctgccccctccctaccgccccctttgctggtgattaaatcctgaaggtacacgaagtatttcagtgaatgaatggctaacagaaaagggcctcccctcccccttaccctggcggtgtttttcagttttattccactttccgcccttttcccttaatgaacacagggctaatctcgggccttgtcgaaggaagaggctgcagacgttaatgaggttagctgctggattccagtattcgtcgcataaggatccttctttgtctgcgaaggaaaaacacactgattatcataatgagtaatgaggtgaactggccaccgccgggccggggcgatgtggcttcttaagccacacttctaattttggtgatggagccgacatttctttggcttctcatttaagtctttgcctctgtcccagtgcgaagtccattcagcggggttgaaagttgcaggcagctttgggaaggggggcgtcggacagggttgcattgtagaaagtggctttgttcgatccttcgcacagatgcaaatggccagagcattcattccctttcttcaagagctgaggactgggggggccactggtgatcagttcccaactctagctctcctctgactcatctcaggacccattgaggacatccaaaactcactcaagatcaccaagtggtaggaaagtactaactcctgggcatagccctaggggagtgactacaatgtgaatactcatggaatgcctagccaggtgaagaagtgaatgcatgttggcatcccagagggaccccccttaagagggcatagtttggggttcagatttgactccagcatactgttgaaattgggcacagggggctagtgattagtcaggatcaatcagtggagaggagattaaaactcacatctgggagtccggaatcagaacttgtagttcttttttttgaaatggagtctcgctctgtcgcccaggctggagtgcagtggcgtgatctcggctcactgcaacctctgccttccgggttcaagcaattctcccacctcagcctcctgagtagctgggattacaggcgcccaccaccacagccggctactttttgtatttttaggagagacggggtttcaccatgttggtcaggctggtcttgaactcctgacctcatgatccacctgccttagcctcccaaagtgctgggattacaggcgtgagccaccatgcccagccctatagtagttcttcttttgccccttaatatcctcacccacatgtcctgtaccctgcctgaaccctcctcctctttttgttctgatctttgagctccctagagcccataattctttagagcaggtatgtcccgagtctgaaacatgcccttatttgtcccaagctctggacatttctcaccccaaggcggatcaatcatgattaaatcactccaattaaactttaggctccagtcagaccttcagccaaatggaaaaaaaaactaggggataagggaggtagttggagcaagaaaatgttattagttgaaaccttacgggaccttcctcccttagtgagtctgttggctaaaggttctctggcttcgtgaattagaatcggatactgtttccaagttagcaaaaccaactctaccccagcaccccacgaggaagaatgtggaaggatctcccattggccggttggggcaaaagcctgaggcaatctttcatccccttttgccaaggcgagactttcccagtgacggtgatgtagttggccactctgactatgggtggactcgggtgtagacctctgaagctgagatcacacgaaaacctggcctccccgccatgtagctgttggagagtagaaaaatagagcacgcctgatgtttctaaatgagaagactttcaatagtaatgaagaatccatggcactctcctcaccctcaaacacatggcagtcattcacatacaggccccaaagccactgttagtgctgcagtagctcctgtggacattggaaagcccggagagggcgtggaagaaatcagctggcccccggcaggttctctggggttttgtgcccaaggctcctggagccctaaaaactttcaaaagttaactccccacgtccccatcctgcttgggtttctggacttttctgaggcaccggcagaggggtctcgttgctcccttgagtgtaggggcagccctttaacctggctccttgagtccctgctttttctgcttctgttgccttcttcctcgtcttcctctctctcaatatctccctctctttgtccctccccagttcctgacctggccatcccggggtgcccttgaccagccccgtgtctcctcagggtgtcccagcaccagcctggcacagagtggggctcagttagagtatgtgggatgttggtttcgccaggtgagtgaatgaaaggactcgaccaccacagctgagccactagctgggccatgcgaagagttctaggtgcaaaggctggagggtggaattcatttttgagaggtgtgtgagcagcttccgacccctgccccatttgaacgggggccttgctggtcgcgtccctgcattcacccgcgcggccatcccgtcatccaacagttgatcctaactgagcacgcccacggccctggtctggcctgggcaccggccaccgtagcccatcccttgatggcctctgtgtccccaggagggcgggccggggggttgcccaggggctggagcagtggactgtggctccatagaggtaggccggagggtgtgagggcagattcaagctatccccagggctctgctctggtcggagccagccccttctccctctctgccttccccgccccattcctgatgctgaactgttctggacccctggccctgagtctctcaggaccaaagtgggcacgggaacagctgtagtgtgtgcccccccgggctttggccacaggtctccctctcgaggtgtggttgtgactgcgacccttcccttgccgtgatgccttcctcccccggggcttggtccagctccttcactctctagcagctgctggggcccacctcccatgccgaggaccagcaggggaaacctccagggagcatctgcaggctctgcttctgcccggctgctggcttgctctccctggtggctctccagcggccagcttcctcacccacccggcactctgctttgctctgtctcctgaggtgggcctgaccaacctccccttctctgcctcagtccctgggctccagggctcagctccacagccctctgcctagcaggctggttctccctgccaagcccatacctgtggtcacctggccctcctgtggtctgagtaccactcccctgccccaggagccactcccactccagctgcctgtttccagcaggttcccagtgcccccgacaagcccctgctggtgtctccatctcctgccaagcatcctccagtgcctcctcctgtgggcctggcctcagggctatggacagactcctgtcccatcccagagacccctcgtgatcgttccctggcacgtgggccgtggcccggctgggtcggctgaagaactgcggatggaagctgcggaagaggccctgatggggcccaccatcccggacccaagtcttcttcctggcgggcctctcgtctccttcctggtttgggggtcctaagcctttgggtcccacagagcacgacttcgctccgtgaacagcaccaacccaagtctgttccatgtctccacacctgccccttccgctccataggcagctggtgggtgagtggagtcaggagagaa

SEQ ID NO: 366319 - DNA, 7381 bp, Homo sapiens
atatcagggtggtttataaagcctgtaaacacacctaagaaaataaacattttacaaatgaaaaaaaaaaaaaaaaaaaaaaaaaagcagagagggagcgcgccttggctcgctggccttggcggcggctcctcaggagagctggggcgcccacgagaggatccctcacccgggtctctcctcagggatgacatcatccgtccacctccttgtcttcaaggaccacctcctctccatgctgagctgctgccaaggggcctgctgcccatctacacctcacgagggcactaggagcacggtttcctggatcccaccaacatacaaagcagccactcactgacccccaggaccaggatggcaaaggatgaagaggaccggaactgaccagccagctgtccctcttacctaaagacttaaaccaatgccctagtgagggggcattgggcattaagccctgacctttgctatgctcatactttgactctatgagtactttcctataagtctttgcttgtgttcacctgctagcaaactggagtgtttccctccccaagggggtgtcagtctttgtcgactgactctgtcatcacccttatgatgtcctgaatggaaggatccctttgggaaattctcaggagggggacctgggccaagggcttggccagcatcctgctggcaactccaaggccctgggtgggcttctggaatgagcatgctactgaatcaccaaaggcacgccccacctctctgaagatcttcctatccttttctgggggaatggggtcgatgagagcaacctcctagggttgttgtgagaattaaatgagataaaagaggcctcaggcaggatctggcatagaggaggtgatcagcaaatgtttgttgaaaaggtttgacaggtcagtcccttcccacccctcttgcttgtcttacttgtcttatttattctccaacagcactccaggcagcccttgtccacgggctctccttgcatcaggtaggggctttgcagagaccatcgacgggctgacttgagtaagaacacgaattatgcatgtggccatttccagagcactttctatgtgatatgaacatgtgatttttatgtaatatgtgtatgtaaacgaggcagcctcatttccaggtgaggatgcatttggtagtgttgatttttgtaatttaaagaagctgaaagggagagaggacccgtgaggactgaactctctgtcccatggggtagggcttacatttacattaaagaaacagaaacttgctgggaggtgtaagtatttggtcacattgctggcaacagaaggggttggagttggacccagggtgccacgctagctgccctcaccccttcttcccctctggcccagagttatactaagagtccttttatttcaaaccaaatgtttgacaatgggacagtctgtttgaaatcccagctgcctggggtggtcttggggggtctgggtggccccagtgctggtaccatgtgctggcttcaccttttaataacagtgtgaccttaaacaagtcgcttaactactctaagtttcagtttctttcatggtctaaatggagattaaaacacacacacacacacacacacacacacacacacacacacaccctcgtgtatctaccccacagggcgcttttgaagaccaaatgctgtaactactatgaaagtgctttgtaaattgctgtggaaagtgtgagctactcaagcacccgaggctgtccctccttgctcacatgtccagcccaattctcccttagtgagaacagcactcagtaggtgctgtgtgtgtttgtgttcaattaagaaattccagaataaataaaaatgaattaattcaacaaacattttctggggcaccgacaatctgcccagtgcaccaggctaggtatctgatacaaagataatgaaaacagtctcttggaacctaattggggtcctcatttgaccaggaatttctttcgtcccgttttaagccaaccagttttgtccggacaagacaaaaacaacttgggctgctttagagaagcccagctcagtgtagacaatagctgcccagcctctgaaaggggctgattggattatgtggcaaatggaggtgcaaggatgacttggacggtgacaaatgaagtgggcggagacctgctttgagttaatccaggctattaggaggggaccttttgtcttccagagactggcaggagcttttaccagtggtttttacatccttaatgttcaggacgaataatttatggtcagtgaaaatccaggccccagtgagattcgagtgggctgtaaaatcgagagtcctgctcccagtgagtaatggtagtgaatgtttctgtcactttttgcaaccgtccattcatttgatcctcacaactccctgtcctgagccaggaccggccactgccactcccagggaaacagaggctgtcaagaggctccacagattgggccccactggatcattgaacccctgttccctgagttctagaggaagaattgtacctgtctcagtcccggccacctccagaaggcctccctctgcatttctgactttgctgtgccggcagcctggagcctcccaggtccctgctgtcatcttttctagccactacagtctctgtctttcctttcacagccccaagcttcttgaaaggcctgtctacacttgctgtcttccttcctcacctccaatttcctcttcaacccactgcttcctgactcgctctactccgtggaagcacgctcacaaaggtaaagacttttctgtggcttaatccttgtcatgttttcggctcatggacacaaggacacattttcatgccttctctcacagggctctgcgtctccggttcacttctgtgtctttacactcccttcacagagacacttgctcccccttctctcgttcttagcatcccctaggaacttgcacacccaggtctctcgacttctggacctgcttcttaccatgccgtcttaagcagtcaggagtcgctgcctgggttcgagtcctagttaaattacttagtgctgagaccttggggtaggtaaacttttccaagccaggtttatctcagtttcaaaatagggttaatcgtctttatctggcaggtcaggtgggatgtctcacaggtaagcaccagatgccatttgaaaggcttgaagcaaagtcaataaagcattcatgggaaaatacaactggaggcaccactagattttcgtatacattaggttcccacggggaggaccgaagagagaagaaagaagtggaaagggaggagcgtgcaggagagacaggagaagagaataactaaacaaagacattaaagacaaaaaaaaagtaggaaagggagacttagaaaatattaaaagccaccaaaaacacatccaaagacggtttccccttacgttagttgggctaaaagaaagcaaatgggaagaaggttttaaattgattatcccagtgacaaatcccaggaagctttcacatcaaatcaccctattctgggtttttaactccttccatcgagtttaacctctttacctcccacatcctggtaaaccctgccccctccctaccgccccctttgctggtgattaaatcctgaaggtacacgaagtatttcagtgaatgaatggctaacagaaaagggcctcccctcccccttaccctggcggtgtttttcagttttattccactttccgcccttttcccttaatgaacacagggctaatctcgggccttgtcgaaggaagaggctgcagacgttaatgaggttagctgctggattccagtattcgtcgcataaggatccttctttgtctgcgaaggaaaaacacactgattatcataatgagtaatgaggtgaactggccaccgccgggccggggcgatgtggcttcttaagccacacttctaattttggtgatggagccgacatttctttggcttctcatttaagtctttgcctctgtcccagtgcgaagtccattcagcggggttgaaagttgcaggcagctttgggaaggggggcgtcggacagggttgcattgtagaaagtggctttgttcgatccttcgcacagatgcaaatggccagagcattcattccctttcttcaagagctgaggactgggggggccactggtgatcagttcccaactctagctctcctctgactcatctcaggacccattgaggacatccaaaactcactcaagatcaccaagtggtaggaaagtactaactcctgggcatagccctaggggagtgactacaatgtgaatactcatggaatgcctagccaggtgaagaagtgaatgcatgttggcatcccagagggaccccccttaagagggcatagtttggggttcagatttgactccagcatactgttgaaattgggcacagggggctagtgattagtcaggatcaatcagtggagaggagattaaaactcacatctgggagtccggaatcagaacttgtagttcttttttttgaaatggagtctcgctctgtcgcccaggctggagtgcagtggcgtgatctcggctcactgcaacctctgccttccgggttcaagcaattctcccacctcagcctcctgagtagctgggattacaggcgcccaccaccacagccggctactttttgtatttttaggagagacggggtttcaccatgttggtcaggctggtcttgaactcctgacctcatgatccacctgccttagcctcccaaagtgctgggattacaggcgtgagccaccatgcccagccctatagtagttcttcttttgccccttaatatcctcacccacatgtcctgtaccctgcctgaaccctcctcctctttttgttctgatctttgagctccctagagcccataattctttagagcaggtatgtcccgagtctgaaacatgcccttatttgtcccaagctctggacatttctcaccccaaggcggatcaatcatgattaaatcactccaattaaactttaggctccagtcagaccttcagccaaatggaaaaaaaaactaggggataagggaggtagttggagcaagaaaatgttattagttgaaaccttacgggaccttcctcccttagtgagtctgttggctaaaggttctctggcttcgtgaattagaatcggatactgtttccaagttagcaaaaccaactctaccccagcaccccacgaggaagaatgtggaaggatctcccattggccggttggggcaaaagcctgaggcaatctttcatccccttttgccaaggcgagactttcccagtgacggtgatgtagttggccactctgactatgggtggactcgggtgtagacctctgaagctgagatcacacgaaaacctggcctccccgccatgtagctgttggagagtagaaaaatagagcacgcctgatgtttctaaatgagaagactttcaatagtaatgaagaatccatggcactctcctcaccctcaaacacatggcagtcattcacatacaggccccaaagccactgttagtgctgcagtagctcctgtggacattggaaagcccggagagggcgtggaagaaatcagctggcccccggcaggttctctggggttttgtgcccaaggctcctggagccctaaaaactttcaaaagttaactccccacgtccccatcctgcttgggtttctggacttttctgaggcaccggcagaggggtctcgttgctcccttgagtgtaggggcagccctttaacctggctccttgagtccctgctttttctgcttctgttgccttcttcctcgtcttcctctctctcaatatctccctctctttgtccctccccagttcctgacctggccatcccggggtgcccttgaccagccccgtgtctcctcagggtgtcccagcaccagcctggcacagagtggggctcagttagagtatgtgggatgttggtttcgccaggtgagtgaatgaaaggactcgaccaccacagctgagccactagctgggccatgcgaagagttctaggtgcaaaggctggagggtggaattcatttttgagaggtgtgtgagcagcttccgacccctgccccatttgaacgggggccttgctggtcgcgtccctgcattcacccgcgcggccatcccgtcatccaacagttgatcctaactgagcacgcccacggccctggtctggcctgggcaccggccaccgtagcccatcccttgatggcctctgtgtccccaggagggcgggccggggggttgcccaggggctggagcagtggactgtggctccatagaggtaggccggagggtgtgagggcagattcaagctatccccagggctctgctctggtcggagccagccccttctccctctctgccttccccgccccattcctgatgctgaactgttctggacccctggccctgagtctctcaggaccaaagtgggcacgggaacagctgtagtgtgtgcccccccgggctttggccacaggtctccctctcgaggtgtggttgtgactgcgacccttcccttgccgtgatgccttcctcccccggggcttggtccagctccttcactctctagcagctgctggggcccacctcccatgccgaggaccagcaggggaaacctccagggagcatctgcaggctctgcttctgcccggctgctggcttgctctccctggtggctctccagcggccagcttcctcacccacccggcactctgctttgctctgtctcctgaggtgggcctgaccaacctccccttctctgcctcagtccctgggctccagggctcagctccacagccctctgcctagcaggctggttctccctgccaagcccatacctgtggtcacctggccctcctgtggtctgagtaccactcccctgccccaggagccactcccactccagctgcctgtttccagcaggttcccagtgcccccgacaagcccctgctggtgtctccatctcctgccaagcatcctccagtgcctcctcctgtgggcctggcctcagggctatggacagactcctgtcccatcccagagacccctcgtgatcgttccctggcacgtgggccgtggcccggctgggtcggctggggtcagacccgtgggctggacccctgcccaccccgcaggaaccctgaggcctaggggagctgttgagccttcagtgtctgcatgtgggaagtgggctccttcacctacctcacagggctgttgtgaggggcgctgtgatgcggttccaaagcacagggcttggcgcaccccactgtgctctcaataaatgtgtttcctgtcttaacaaaaa

SEQ ID NO: 366320 - DNA, 7208 bp, Homo sapiens
atatcagggtggtttataaagcctgtaaacacacctaagaaaataaacattttacaaatgaaaaaaaaaaaaaaaaaaaaaaaaaagcagagagggagcgcgccttggctcgctggccttggcggcggctcctcaggagagctggggcgcccacgagaggatccctcacccgggtctctcctcagggatgacatcatccgtccacctccttgtcttcaaggaccacctcctctccatgctgagctgctgccaaggggcctgctgcccatctacacctcacgagggcactaggagcacggtttcctggatcccaccaacatacaaagcagccactcactgacccccaggaccaggatggcaaaggatgaagaggaccggaactgaccagccagctgtccctcttacctaaagacttaaaccaatgccctagtgagggggcattgggcattaagccctgacctttgctatgctcatactttgactctatgagtactttcctataagtctttgcttgtgttcacctgctagcaaactggagtgtttccctccccaagggggtgtcagtctttgtcgactgactctgtcatcacccttatgatgtcctgaatggaaggatccctttgggaaattctcaggagggggacctgggccaagggcttggccagcatcctgctggcaactccaaggccctgggtgggcttctggaatgagcatgctactgaatcaccaaaggcacgccccacctctctgaagatcttcctatccttttctgggggaatggggtcgatgagagcaacctcctagggttgttgtgagaattaaatgagataaaagaggcctcaggcaggatctggcatagaggaggtgatcagcaaatgtttgttgaaaaggtttgacaggtcagtcccttcccacccctcttgcttgtcttacttgtcttatttattctccaacagcactccaggcagcccttgtccacgggctctccttgcatcaggtaggggctttgcagagaccatcgacgggctgacttgagtaagaacacgaattatgcatgtggccatttccagagcactttctatgtgatatgaacatgtgatttttatgtaatatgtgtatgtaaacgaggcagcctcatttccaggtgaggatgcatttggtagtgttgatttttgtaatttaaagaagctgaaagggagagaggacccgtgaggactgaactctctgtcccatggggtagggcttacatttacattaaagaaacagaaacttgctgggaggtgtaagtatttggtcacattgctggcaacagaaggggttggagttggacccagggtgccacgctagctgccctcaccccttcttcccctctggcccagagttatactaagagtccttttatttcaaaccaaatgtttgacaatgggacagtctgtttgaaatcccagctgcctggggtggtcttggggggtctgggtggccccagtgctggtaccatgtgctggcttcaccttttaataacagtgtgaccttaaacaagtcgcttaactactctaagtttcagtttctttcatggtctaaatggagattaaaacacacacacacacacacacacacacacacacacacacacaccctcgtgtatctaccccacagggcgcttttgaagaccaaatgctgtaactactatgaaagtgctttgtaaattgctgtggaaagtgtgagctactcaagcacccgaggctgtccctccttgctcacatgtccagcccaattctcccttagtgagaacagcactcagtaggtgctgtgtgtgtttgtgttcaattaagaaattccagaataaataaaaatgaattaattcaacaaacattttctggggcaccgacaatctgcccagtgcaccaggctaggtatctgatacaaagataatgaaaacagtctcttggaacctaattggggtcctcatttgaccaggaatttctttcgtcccgttttaagccaaccagttttgtccggacaagacaaaaacaacttgggctgctttagagaagcccagctcagtgtagacaatagctgcccagcctctgaaaggggctgattggattatgtggcaaatggaggtgcaaggatgacttggacggtgacaaatgaagtgggcggagacctgctttgagttaatccaggctattaggaggggaccttttgtcttccagagactggcaggagcttttaccagtggtttttacatccttaatgttcaggacgaataatttatggtcagtgaaaatccaggccccagtgagattcgagtgggctgtaaaatcgagagtcctgctcccagtgagtaatggtagtgaatgtttctgtcactttttgcaaccgtccattcatttgatcctcacaactccctgtcctgagccaggaccggccactgccactcccagggaaacagaggctgtcaagaggctccacagattgggccccactggatcattgaacccctgttccctgagttctagaggaagaattgtacctgtctcagtcccggccacctccagaaggcctccctctgcatttctgactttgctgtgccggcagcctggagcctcccaggtccctgctgtcatcttttctagccactacagtctctgtctttcctttcacagccccaagcttcttgaaaggcctgtctacacttgctgtcttccttcctcacctccaatttcctcttcaacccactgcttcctgactcgctctactccgtggaagcacgctcacaaaggtaaagacttttctgtggcttaatccttgtcatgttttcggctcatggacacaaggacacattttcatgccttctctcacagggctctgcgtctccggttcacttctgtgtctttacactcccttcacagagacacttgctcccccttctctcgttcttagcatcccctaggaacttgcacacccaggtctctcgacttctggacctgcttcttaccatgccgtcttaagcagtcaggagtcgctgcctgggttcgagtcctagttaaattacttagtgctgagaccttggggtaggtaaacttttccaagccaggtttatctcagtttcaaaatagggttaatcgtctttatctggcaggtcaggtgggatgtctcacaggtaagcaccagatgccatttgaaaggcttgaagcaaagtcaataaagcattcatgggaaaatacaactggaggcaccactagattttcgtatacattaggttcccacggggaggaccgaagagagaagaaagaagtggaaagggaggagcgtgcaggagagacaggagaagagaataactaaacaaagacattaaagacaaaaaaaaagtaggaaagggagacttagaaaatattaaaagccaccaaaaacacatccaaagacggtttccccttacgttagttgggctaaaagaaagcaaatgggaagaaggttttaaattgattatcccagtgacaaatcccaggaagctttcacatcaaatcaccctattctgggtttttaactccttccatcgagtttaacctctttacctcccacatcctggtaaaccctgccccctccctaccgccccctttgctggtgattaaatcctgaaggtacacgaagtatttcagtgaatgaatggctaacagaaaagggcctcccctcccccttaccctggcggtgtttttcagttttattccactttccgcccttttcccttaatgaacacagggctaatctcgggccttgtcgaaggaagaggctgcagacgttaatgaggttagctgctggattccagtattcgtcgcataaggatccttctttgtctgcgaaggaaaaacacactgattatcataatgagtaatgaggtgaactggccaccgccgggccggggcgatgtggcttcttaagccacacttctaattttggtgatggagccgacatttctttggcttctcatttaagtctttgcctctgtcccagtgcgaagtccattcagcggggttgaaagttgcaggcagctttgggaaggggggcgtcggacagggttgcattgtagaaagtggctttgttcgatccttcgcacagatgcaaatggccagagcattcattccctttcttcaagagctgaggactgggggggccactggtgatcagttcccaactctagctctcctctgactcatctcaggacccattgaggacatccaaaactcactcaagatcaccaagtggtaggaaagtactaactcctgggcatagccctaggggagtgactacaatgtgaatactcatggaatgcctagccaggtgaagaagtgaatgcatgttggcatcccagagggaccccccttaagagggcatagtttggggttcagatttgactccagcatactgttgaaattgggcacagggggctagtgattagtcaggatcaatcagtggagaggagattaaaactcacatctgggagtccggaatcagaacttgtagttcttttttttgaaatggagtctcgctctgtcgcccaggctggagtgcagtggcgtgatctcggctcactgcaacctctgccttccgggttcaagcaattctcccacctcagcctcctgagtagctgggattacaggcgcccaccaccacagccggctactttttgtatttttaggagagacggggtttcaccatgttggtcaggctggtcttgaactcctgacctcatgatccacctgccttagcctcccaaagtgctgggattacaggcgtgagccaccatgcccagccctatagtagttcttcttttgccccttaatatcctcacccacatgtcctgtaccctgcctgaaccctcctcctctttttgttctgatctttgagctccctagagcccataattctttagagcaggtatgtcccgagtctgaaacatgcccttatttgtcccaagctctggacatttctcaccccaaggcggatcaatcatgattaaatcactccaattaaactttaggctccagtcagaccttcagccaaatggaaaaaaaaactaggggataagggaggtagttggagcaagaaaatgttattagttgaaaccttacgggaccttcctcccttagtgagtctgttggctaaaggttctctggcttcgtgaattagaatcggatactgtttccaagttagcaaaaccaactctaccccagcaccccacgaggaagaatgtggaaggatctcccattggccggttggggcaaaagcctgaggcaatctttcatccccttttgccaaggcgagactttcccagtgacggtgatgtagttggccactctgactatgggtggactcgggtgtagacctctgaagctgagatcacacgaaaacctggcctccccgccatgtagctgttggagagtagaaaaatagagcacgcctgatgtttctaaatgagaagactttcaatagtaatgaagaatccatggcactctcctcaccctcaaacacatggcagtcattcacatacaggccccaaagccactgttagtgctgcagtagctcctgtggacattggaaagcccggagagggcgtggaagaaatcagctggcccccggcaggttctctggggttttgtgcccaaggctcctggagccctaaaaactttcaaaagttaactccccacgtccccatcctgcttgggtttctggacttttctgaggcaccggcagaggggtctcgttgctcccttgagtgtaggggcagccctttaacctggctccttgagtccctgctttttctgcttctgttgccttcttcctcgtcttcctctctctcaatatctccctctctttgtccctccccagttcctgacctggccatcccggggtgcccttgaccagccccgtgtctcctcagggtgtcccagcaccagcctggcacagagtggggctcagttagagtatgtgggatgttggtttcgccaggtgagtgaatgaaaggactcgaccaccacagctgagccactagctgggccatgcgaagagttctaggtgcaaaggctggagggtggaattcatttttgagaggtgtgtgagcagcttccgacccctgccccatttgaacgggggccttgctggtcgcgtccctgcattcacccgcgcggccatcccgtcatccaacagttgatcctaactgagcacgcccacggccctggtctggcctgggcaccggccaccgtagcccatcccttgatggcctctgtgtccccaggagggcgggccggggggttgcccaggggctggagcagtggactgtggctccatagaggtaggccggagggtgtgagggcagattcaagctatccccagggctctgctctggtcggagccagccccttctccctctctgccttccccgccccattcctgatgctgaactgttctggacccctggccctgagtctctcaggaccaaagtgggcacgggaacagctgtagtgtgtgcccccccgggctttggccacaggtctccctctcgaggtgtggttgtgactgcgacccttcccttgccgtgatgccttcctcccccggggcttggtccagctccttcactctctagcagctgctggggcccacctcccatgccgaggaccagcaggggaaacctccagggagcatctgcaggctctgcttctgcccggctgctggcttgctctccctggtggctctccagcggccagcttcctcacccacccggcactctgctttgctctgtctcctgaggtgggcctgaccaacctccccttctctgcctcagtccctgggctccagggctcagctccacagccctctgcctagcaggctggttctccctgccaagcccatacctgtggtcacctggccctcctgtggtctgagtaccactcccctgccccaggagccactcccactccagctgcctgtttccagcaggttcccagtgcccccgacaagcccctgctggtgtctccatctcctgccaagcatcctccagtgcctcctcctgtgggcctggcctcagggctatggacagactcctgtcccaacagggctgttgtgaggggcgctgtgatgcggttccaaagcacagggcttggcgcaccccactgtgctctcaataaatgtgtttcctgtcttaacaaaaa

SEQ ID NO: 366321 - DNA, 7202 bp, Homo sapiens
atatcagggtggtttataaagcctgtaaacacacctaagaaaataaacattttacaaatgaaaaaaaaaaaaaaaaaaaaaaaaaagcagagagggagcgcgccttggctcgctggccttggcggcggctcctcaggagagctggggcgcccacgagaggatccctcacccgggtctctcctcagggatgacatcatccgtccacctccttgtcttcaaggaccacctcctctccatgctgagctgctgccaaggggcctgctgcccatctacacctcacgagggcactaggagcacggtttcctggatcccaccaacatacaaagcagccactcactgacccccaggaccaggatggcaaaggatgaagaggaccggaactgaccagccagctgtccctcttacctaaagacttaaaccaatgccctagtgagggggcattgggcattaagccctgacctttgctatgctcatactttgactctatgagtactttcctataagtctttgcttgtgttcacctgctagcaaactggagtgtttccctccccaagggggtgtcagtctttgtcgactgactctgtcatcacccttatgatgtcctgaatggaaggatccctttgggaaattctcaggagggggacctgggccaagggcttggccagcatcctgctggcaactccaaggccctgggtgggcttctggaatgagcatgctactgaatcaccaaaggcacgccccacctctctgaagatcttcctatccttttctgggggaatggggtcgatgagagcaacctcctagggttgttgtgagaattaaatgagataaaagaggcctcaggcaggatctggcatagaggaggtgatcagcaaatgtttgttgaaaaggtttgacaggtcagtcccttcccacccctcttgcttgtcttacttgtcttatttattctccaacagcactccaggcagcccttgtccacgggctctccttgcatcaggtaggggctttgcagagaccatcgacgggctgacttgagtaagaacacgaattatgcatgtggccatttccagagcactttctatgtgatatgaacatgtgatttttatgtaatatgtgtatgtaaacgaggcagcctcatttccaggtgaggatgcatttggtagtgttgatttttgtaatttaaagaagctgaaagggagagaggacccgtgaggactgaactctctgtcccatggggtagggcttacatttacattaaagaaacagaaacttgctgggaggtgtaagtatttggtcacattgctggcaacagaaggggttggagttggacccagggtgccacgctagctgccctcaccccttcttcccctctggcccagagttatactaagagtccttttatttcaaaccaaatgtttgacaatgggacagtctgtttgaaatcccagctgcctggggtggtcttggggggtctgggtggccccagtgctggtaccatgtgctggcttcaccttttaataacagtgtgaccttaaacaagtcgcttaactactctaagtttcagtttctttcatggtctaaatggagattaaaacacacacacacacacacacacacacacacacacacacacaccctcgtgtatctaccccacagggcgcttttgaagaccaaatgctgtaactactatgaaagtgctttgtaaattgctgtggaaagtgtgagctactcaagcacccgaggctgtccctccttgctcacatgtccagcccaattctcccttagtgagaacagcactcagtaggtgctgtgtgtgtttgtgttcaattaagaaattccagaataaataaaaatgaattaattcaacaaacattttctggggcaccgacaatctgcccagtgcaccaggctaggtatctgatacaaagataatgaaaacagtctcttggaacctaattggggtcctcatttgaccaggaatttctttcgtcccgttttaagccaaccagttttgtccggacaagacaaaaacaacttgggctgctttagagaagcccagctcagtgtagacaatagctgcccagcctctgaaaggggctgattggattatgtggcaaatggaggtgcaaggatgacttggacggtgacaaatgaagtgggcggagacctgctttgagttaatccaggctattaggaggggaccttttgtcttccagagactggcaggagcttttaccagtggtttttacatccttaatgttcaggacgaataatttatggtcagtgaaaatccaggccccagtgagattcgagtgggctgtaaaatcgagagtcctgctcccagtgagtaatggtagtgaatgtttctgtcactttttgcaaccgtccattcatttgatcctcacaactccctgtcctgagccaggaccggccactgccactcccagggaaacagaggctgtcaagaggctccacagattgggccccactggatcattgaacccctgttccctgagttctagaggaagaattgtacctgtctcagtcccggccacctccagaaggcctccctctgcatttctgactttgctgtgccggcagcctggagcctcccaggtccctgctgtcatcttttctagccactacagtctctgtctttcctttcacagccccaagcttcttgaaaggcctgtctacacttgctgtcttccttcctcacctccaatttcctcttcaacccactgcttcctgactcgctctactccgtggaagcacgctcacaaaggtaaagacttttctgtggcttaatccttgtcatgttttcggctcatggacacaaggacacattttcatgccttctctcacagggctctgcgtctccggttcacttctgtgtctttacactcccttcacagagacacttgctcccccttctctcgttcttagcatcccctaggaacttgcacacccaggtctctcgacttctggacctgcttcttaccatgccgtcttaagcagtcaggagtcgctgcctgggttcgagtcctagttaaattacttagtgctgagaccttggggtaggtaaacttttccaagccaggtttatctcagtttcaaaatagggttaatcgtctttatctggcaggtcaggtgggatgtctcacaggtaagcaccagatgccatttgaaaggcttgaagcaaagtcaataaagcattcatgggaaaatacaactggaggcaccactagattttcgtatacattaggttcccacggggaggaccgaagagagaagaaagaagtggaaagggaggagcgtgcaggagagacaggagaagagaataactaaacaaagacattaaagacaaaaaaaaagtaggaaagggagacttagaaaatattaaaagccaccaaaaacacatccaaagacggtttccccttacgttagttgggctaaaagaaagcaaatgggaagaaggttttaaattgattatcccagtgacaaatcccaggaagctttcacatcaaatcaccctattctgggtttttaactccttccatcgagtttaacctctttacctcccacatcctggtaaaccctgccccctccctaccgccccctttgctggtgattaaatcctgaaggtacacgaagtatttcagtgaatgaatggctaacagaaaagggcctcccctcccccttaccctggcggtgtttttcagttttattccactttccgcccttttcccttaatgaacacagggctaatctcgggccttgtcgaaggaagaggctgcagacgttaatgaggttagctgctggattccagtattcgtcgcataaggatccttctttgtctgcgaaggaaaaacacactgattatcataatgagtaatgaggtgaactggccaccgccgggccggggcgatgtggcttcttaagccacacttctaattttggtgatggagccgacatttctttggcttctcatttaagtctttgcctctgtcccagtgcgaagtccattcagcggggttgaaagttgcaggcagctttgggaaggggggcgtcggacagggttgcattgtagaaagtggctttgttcgatccttcgcacagatgcaaatggccagagcattcattccctttcttcaagagctgaggactgggggggccactggtgatcagttcccaactctagctctcctctgactcatctcaggacccattgaggacatccaaaactcactcaagatcaccaagtggtaggaaagtactaactcctgggcatagccctaggggagtgactacaatgtgaatactcatggaatgcctagccaggtgaagaagtgaatgcatgttggcatcccagagggaccccccttaagagggcatagtttggggttcagatttgactccagcatactgttgaaattgggcacagggggctagtgattagtcaggatcaatcagtggagaggagattaaaactcacatctgggagtccggaatcagaacttgtagttcttttttttgaaatggagtctcgctctgtcgcccaggctggagtgcagtggcgtgatctcggctcactgcaacctctgccttccgggttcaagcaattctcccacctcagcctcctgagtagctgggattacaggcgcccaccaccacagccggctactttttgtatttttaggagagacggggtttcaccatgttggtcaggctggtcttgaactcctgacctcatgatccacctgccttagcctcccaaagtgctgggattacaggcgtgagccaccatgcccagccctatagtagttcttcttttgccccttaatatcctcacccacatgtcctgtaccctgcctgaaccctcctcctctttttgttctgatctttgagctccctagagcccataattctttagagcaggtatgtcccgagtctgaaacatgcccttatttgtcccaagctctggacatttctcaccccaaggcggatcaatcatgattaaatcactccaattaaactttaggctccagtcagaccttcagccaaatggaaaaaaaaactaggggataagggaggtagttggagcaagaaaatgttattagttgaaaccttacgggaccttcctcccttagtgagtctgttggctaaaggttctctggcttcgtgaattagaatcggatactgtttccaagttagcaaaaccaactctaccccagcaccccacgaggaagaatgtggaaggatctcccattggccggttggggcaaaagcctgaggcaatctttcatccccttttgccaaggcgagactttcccagtgacggtgatgtagttggccactctgactatgggtggactcgggtgtagacctctgaagctgagatcacacgaaaacctggcctccccgccatgtagctgttggagagtagaaaaatagagcacgcctgatgtttctaaatgagaagactttcaatagtaatgaagaatccatggcactctcctcaccctcaaacacatggcagtcattcacatacaggccccaaagccactgttagtgctgcagtagctcctgtggacattggaaagcccggagagggcgtggaagaaatcagctggcccccggcaggttctctggggttttgtgcccaaggctcctggagccctaaaaactttcaaaagttaactccccacgtccccatcctgcttgggtttctggacttttctgaggcaccggcagaggggtctcgttgctcccttgagtgtaggggcagccctttaacctggctccttgagtccctgctttttctgcttctgttgccttcttcctcgtcttcctctctctcaatatctccctctctttgtccctccccagttcctgacctggccatcccggggtgcccttgaccagccccgtgtctcctcagggtgtcccagcaccagcctggcacagagtggggctcagttagagtatgtgggatgttggtttcgccaggtgagtgaatgaaaggactcgaccaccacagctgagccactagctgggccatgcgaagagttctaggtgcaaaggctggagggtggaattcatttttgagaggtgtgtgagcagcttccgacccctgccccatttgaacgggggccttgctggtcgcgtccctgcattcacccgcgcggccatcccgtcatccaacagttgatcctaactgagcacgcccacggccctggtctggcctgggcaccggccaccgtagcccatcccttgatggcctctgtgtccccaggagggcgggccggggggttgcccaggggctggagcagtggactgtggctccatagaggtaggccggagggtgtgagggcagattcaagctatccccagggctctgctctggtcggagccagccccttctccctctctgccttccccgccccattcctgatgctgaactgttctggacccctggccctgagtctctcaggaccaaagtgggcacgggaacagctgtagtgtgtgcccccccgggctttggccacaggtctccctctcgaggtgtggttgtgactgcgacccttcccttgccgtgatgccttcctcccccggggcttggtccagctccttcactctctagcagctgctggggcccacctcccatgccgaggaccagcaggggaaacctccagggagcatctgcaggctctgcttctgcccggctgctggcttgctctccctggtggctctccagcggccagcttcctcacccacccggcactctgctttgctctgtctcctgaggtgggcctgaccaacctccccttctctgcctcagtccctgggctccagggctcagctccacagccctctgcctagcaggctggttctccctgccaagcccatacctgtggtcacctggccctcctgtggtctgagtagagccactcccactccagctgcctgtttccagcaggttcccagtgcccccgacaagcccctgctggtgtctccatctcctgccaagcatcctccagtgcctcctcctgtgggcctggcctcagggctatggacagactcctgtcccatcccagagacccctcgtgatcgttccctggtgggtgttgcccccgcctgcctttgcctccgccgtggccctgagagtcctgggctctgccccgcccggtcccttgctcccc

SEQ ID NO: 366322 - DNA, 3480 bp, Homo sapiens
atatcagggtggtttataaagcctgtaaacacacctaagaaaataaacattttacaaatgaaaaaaaaaaaaaaaaaaaaaaaaaagcagagagggagcgcgccttggctcgctggccttggcggcggctcctcaggagagctggggcgcccacgagaggatccctcacccgggtctctcctcagggatgacatcatccgtccacctccttgtcttcaaggaccacctcctctccatgctgagctgctgccaaggggcctgctgcccatctacacctcacgagggcactaggagcacggtttcctggatcccaccaacatacaaagcagccactcactgacccccaggaccaggatggcaaaggatgaagaggaccggaactgaccagccagctgtccctcttacctaaagacttaaaccaatgccctagtgagggggcattgggcattaagccctgacctttgctatgctcatactttgactctatgagtactttcctataagtctttgcttgtgttcacctgctagcaaactggagtgtttccctccccaagggggtgtcagtctttgtcgactgactctgtcatcacccttatgatgtcctgaatggaaggatccctttgggaaattctcaggagggggacctgggccaagggcttggccagcatcctgctggcaactccaaggccctgggtgggcttctggaatgagcatgctactgaatcaccaaaggcacgccccacctctctgaagatcttcctatccttttctgggggaatggggtcgatgagagcaacctcctagggttgttgtgagaattaaatgagataaaagaggcctcaggcaggatctggcatagaggaggtgatcagcaaatgtttgttgaaaaggtttgacaggtcagtcccttcccacccctcttgcttgtcttacttgtcttatttattctccaacagcactccaggcagcccttgtccacgggctctccttgcatcaggtaggggctttgcagagaccatcgacgggctgacttgagtaagaacacgaattatgcatgtggccatttccagagcactttctatgtgatatgaacatgtgatttttatgtaatatgtgtatgtaaacgaggcagcctcatttccaggtgaggatgcatttggtagtgttgatttttgtaatttaaagaagctgaaagggagagaggacccgtgaggactgaactctctgtcccatggggtagggcttacatttacattaaagaaacagaaacttgctgggaggtgtaagtatttggtcacattgctggcaacagaaggggttggagttggacccagggtgccacgctagctgccctcaccccttcttcccctctggcccagagttatactaagagtccttttatttcaaaccaaatgtttgacaatgggacagtctgtttgaaatcccagctgcctggggtggtcttggggggtctgggtggccccagtgctggtaccatgtgctggcttcaccttttaataacagtgtgaccttaaacaagtcgcttaactactctaagtttcagtttctttcatggtctaaatggagattaaaacacacacacacacacacacacacacacacacacacacacaccctcgtgtatctaccccacagggcgcttttgaagaccaaatgctgtaactactatgaaagtgctttgtaaattgctgtggaaagtgtgagctactcaagcacccgaggctgtccctccttgctcacatgtccagcccaattctcccttagtgagaacagcactcagtaggtgctgtgtgtgtttgtgttcaattaagaaattccagaataaataaaaatgaattaattcaacaaacattttctggggcaccgacaatctgcccagtgcaccaggctaggtatctgatacaaagataatgaaaacagtctcttggaacctaattggggtcctcatttgaccaggaatttctttcgtcccgttttaagccaaccagttttgtccggacaagacaaaaacaacttgggctgctttagagaagcccagctcagtgtagacaatagctgcccagcctctgaaaggggctgattggattatgtggcaaatggaggtgcaaggatgacttggacggtgacaaatgaagtgggcggagacctgctttgagttaatccaggctattaggaggggaccttttgtcttccagagactggcaggagcttttaccagtggtttttacatccttaatgttcaggacgaataatttatggtcagtgaaaatccaggccccagtgagattcgagtgggctgtaaaatcgagagtcctgctcccagtgagtaatggtagtgaatgtttctgtcactttttgcaaccgtccattcatttgatcctcacaactccctgtcctgagccaggaccggccactgccactcccagggaaacagaggctgtcaagaggctccacagattgggccccactggatcattgaacccctgttccctgagttctagaggaagaattgtacctgtctcagtcccggccacctccagaaggcctccctctgcatttctgactttgctgtgccggcagcctggagcctcccaggtccctgctgtcatcttttctagccactacagtctctgtctttcctttcacagccccaagcttcttgaaaggcctgtctacacttgctgtcttccttcctcacctccaatttcctcttcaacccactgcttcctgactcgctctactccgtggaagcacgctcacaaagtccagcaggttcccagtgcccccgacaagcccctgctggtgtctccatctcctgccaagcatcctccagtgcctcctcctgtgggcctggcctcagggctatggacagactcctgtcccatcccagagacccctcgtgatcgttccctggcacgtgggccgtggcccggctgggtcggctgaagaactgcggatggaagctgcggaagaggccctgatggggcccaccatcccggacccaagtcttcttcctggcgggcctctcgtctccttcctggtttgggcggaagccatcacctggatgcctacgtgggaagggacctcgaatgtgggaccccagcccctctccagctcgaaatccctccacagccacggggacaccctgcacctattcccacgggacaggctggacccagagactctggacccggggcctccccttgagtagagacccgccctctgactgatggacgccgctgacctggggtcagacccgtgggctggacccctgcccaccccgcaggaaccctgaggcctaggggagctgttgagccttcagtgtctgcatgtgggaagtgggctccttcacctacctcacagggctgttgtgaggggcgctgtgatgcggttccaaagcacagggcttggcgcaccccactgtgctctcaataaatgtgtttcctgtcttaacaaaaa

SEQ ID NO: 366323 - DNA, 7008 bp, Homo sapiens
atatcagggtggtttataaagcctgtaaacacacctaagaaaataaacattttacaaatgaaaaaaaaaaaaaaaaaaaaaaaaaagcagagagggagcgcgccttggctcgctggccttggcggcggctcctcaggagagctggggcgcccacgagaggatccctcacccgggtctctcctcagggatgacatcatccgtccacctccttgtcttcaaggaccacctcctctccatgctgagctgctgccaaggggcctgctgcccatctacacctcacgagggcactaggagcacggtttcctggatcccaccaacatacaaagcagccactcactgacccccaggaccaggatggcaaaggatgaagaggaccggaactgaccagccagctgtccctcttacctaaagacttaaaccaatgccctagtgagggggcattgggcattaagccctgacctttgctatgctcatactttgactctatgagtactttcctataagtctttgcttgtgttcacctgctagcaaactggagtgtttccctccccaagggggtgtcagtctttgtcgactgactctgtcatcacccttatgatgtcctgaatggaaggatccctttgggaaattctcaggagggggacctgggccaagggcttggccagcatcctgctggcaactccaaggccctgggtgggcttctggaatgagcatgctactgaatcaccaaaggcacgccccacctctctgaagatcttcctatccttttctgggggaatggggtcgatgagagcaacctcctagggttgttgtgagaattaaatgagataaaagaggcctcaggcaggatctggcatagaggaggtgatcagcaaatgtttgttgaaaaggtttgacaggtcagtcccttcccacccctcttgcttgtcttacttgtcttatttattctccaacagcactccaggcagcccttgtccacgggctctccttgcatcaggtaggggctttgcagagaccatcgacgggctgacttgagtaagaacacgaattatgcatgtggccatttccagagcactttctatgtgatatgaacatgtgatttttatgtaatatgtgtatgtaaacgaggcagcctcatttccaggtgaggatgcatttggtagtgttgatttttgtaatttaaagaagctgaaagggagagaggacccgtgaggactgaactctctgtcccatggggtagggcttacatttacattaaagaaacagaaacttgctgggaggtgtaagtatttggtcacattgctggcaacagaaggggttggagttggacccagggtgccacgctagctgccctcaccccttcttcccctctggcccagagttatactaagagtccttttatttcaaaccaaatgtttgacaatgggacagtctgtttgaaatcccagctgcctggggtggtcttggggggtctgggtggccccagtgctggtaccatgtgctggcttcaccttttaataacagtgtgaccttaaacaagtcgcttaactactctaagtttcagtttctttcatggtctaaatggagattaaaacacacacacacacacacacacacacacacacacacacacaccctcgtgtatctaccccacagggcgcttttgaagaccaaatgctgtaactactatgaaagtgctttgtaaattgctgtggaaagtgtgagctactcaagcacccgaggctgtccctccttgctcacatgtccagcccaattctcccttagtgagaacagcactcagtaggtgctgtgtgtgtttgtgttcaattaagaaattccagaataaataaaaatgaattaattcaacaaacattttctggggcaccgacaatctgcccagtgcaccaggctaggtatctgatacaaagataatgaaaacagtctcttggaacctaattggggtcctcatttgaccaggaatttctttcgtcccgttttaagccaaccagttttgtccggacaagacaaaaacaacttgggctgctttagagaagcccagctcagtgtagacaatagctgcccagcctctgaaaggggctgattggattatgtggcaaatggaggtgcaaggatgacttggacggtgacaaatgaagtgggcggagacctgctttgagttaatccaggctattaggaggggaccttttgtcttccagagactggcaggagcttttaccagtggtttttacatccttaatgttcaggacgaataatttatggtcagtgaaaatccaggccccagtgagattcgagtgggctgtaaaatcgagagtcctgctcccagtgagtaatggtagtgaatgtttctgtcactttttgcaaccgtccattcatttgatcctcacaactccctgtcctgagccaggaccggccactgccactcccagggaaacagaggctgtcaagaggctccacagattgggccccactggatcattgaacccctgttccctgagttctagaggaagaattgtacctgtctcagtcccggccacctccagaaggcctccctctgcatttctgactttgctgtgccggcagcctggagcctcccaggtccctgctgtcatcttttctagccactacagtctctgtctttcctttcacagccccaagcttcttgaaaggcctgtctacacttgctgtcttccttcctcacctccaatttcctcttcaacccactgcttcctgactcgctctactccgtggaagcacgctcacaaaggtaaagacttttctgtggcttaatccttgtcatgttttcggctcatggacacaaggacacattttcatgccttctctcacagggctctgcgtctccggttcacttctgtgtctttacactcccttcacagagacacttgctcccccttctctcgttcttagcatcccctaggaacttgcacacccaggtctctcgacttctggacctgcttcttaccatgccgtcttaagcagtcaggagtcgctgcctgggttcgagtcctagttaaattacttagtgctgagaccttggggtaggtaaacttttccaagccaggtttatctcagtttcaaaatagggttaatcgtctttatctggcaggtcaggtgggatgtctcacaggtaagcaccagatgccatttgaaaggcttgaagcaaagtcaataaagcattcatgggaaaatacaactggaggcaccactagattttcgtatacattaggttcccacggggaggaccgaagagagaagaaagaagtggaaagggaggagcgtgcaggagagacaggagaagagaataactaaacaaagacattaaagacaaaaaaaaagtaggaaagggagacttagaaaatattaaaagccaccaaaaacacatccaaagacggtttccccttacgttagttgggctaaaagaaagcaaatgggaagaaggttttaaattgattatcccagtgacaaatcccaggaagctttcacatcaaatcaccctattctgggtttttaactccttccatcgagtttaacctctttacctcccacatcctggtaaaccctgccccctccctaccgccccctttgctggtgattaaatcctgaaggtacacgaagtatttcagtgaatgaatggctaacagaaaagggcctcccctcccccttaccctggcggtgtttttcagttttattccactttccgcccttttcccttaatgaacacagggctaatctcgggccttgtcgaaggaagaggctgcagacgttaatgaggttagctgctggattccagtattcgtcgcataaggatccttctttgtctgcgaaggaaaaacacactgattatcataatgagtaatgaggtgaactggccaccgccgggccggggcgatgtggcttcttaagccacacttctaattttggtgatggagccgacatttctttggcttctcatttaagtctttgcctctgtcccagtgcgaagtccattcagcggggttgaaagttgcaggcagctttgggaaggggggcgtcggacagggttgcattgtagaaagtggctttgttcgatccttcgcacagatgcaaatggccagagcattcattccctttcttcaagagctgaggactgggggggccactggtgatcagttcccaactctagctctcctctgactcatctcaggacccattgaggacatccaaaactcactcaagatcaccaagtggtaggaaagtactaactcctgggcatagccctaggggagtgactacaatgtgaatactcatggaatgcctagccaggtgaagaagtgaatgcatgttggcatcccagagggaccccccttaagagggcatagtttggggttcagatttgactccagcatactgttgaaattgggcacagggggctagtgattagtcaggatcaatcagtggagaggagattaaaactcacatctgggagtccggaatcagaacttgtagttcttttttttgaaatggagtctcgctctgtcgcccaggctggagtgcagtggcgtgatctcggctcactgcaacctctgccttccgggttcaagcaattctcccacctcagcctcctgagtagctgggattacaggcgcccaccaccacagccggctactttttgtatttttaggagagacggggtttcaccatgttggtcaggctggtcttgaactcctgacctcatgatccacctgccttagcctcccaaagtgctgggattacaggcgtgagccaccatgcccagccctatagtagttcttcttttgccccttaatatcctcacccacatgtcctgtaccctgcctgaaccctcctcctctttttgttctgatctttgagctccctagagcccataattctttagagcaggtatgtcccgagtctgaaacatgcccttatttgtcccaagctctggacatttctcaccccaaggcggatcaatcatgattaaatcactccaattaaactttaggctccagtcagaccttcagccaaatggaaaaaaaaactaggggataagggaggtagttggagcaagaaaatgttattagttgaaaccttacgggaccttcctcccttagtgagtctgttggctaaaggttctctggcttcgtgaattagaatcggatactgtttccaagttagcaaaaccaactctaccccagcaccccacgaggaagaatgtggaaggatctcccattggccggttggggcaaaagcctgaggcaatctttcatccccttttgccaaggcgagactttcccagtgacggtgatgtagttggccactctgactatgggtggactcgggtgtagacctctgaagctgagatcacacgaaaacctggcctccccgccatgtagctgttggagagtagaaaaatagagcacgcctgatgtttctaaatgagaagactttcaatagtaatgaagaatccatggcactctcctcaccctcaaacacatggcagtcattcacatacaggccccaaagccactgttagtgctgcagtagctcctgtggacattggaaagcccggagagggcgtggaagaaatcagctggcccccggcaggttctctggggttttgtgcccaaggctcctggagccctaaaaactttcaaaagttaactccccacgtccccatcctgcttgggtttctggacttttctgaggcaccggcagaggggtctcgttgctcccttgagtgtaggggcagccctttaacctggctccttgagtccctgctttttctgcttctgttgccttcttcctcgtcttcctctctctcaatatctccctctctttgtccctccccagttcctgacctggccatcccggggtgcccttgaccagccccgtgtctcctcagggtgtcccagcaccagcctggcacagagtggggctcagttagagtatgtgggatgttggtttcgccaggtgagtgaatgaaaggactcgaccaccacagctgagccactagctgggccatgcgaagagttctaggtgcaaaggctggagggtggaattcatttttgagaggtgtgtgagcagcttccgacccctgccccatttgaacgggggccttgctggtcgcgtccctgcattcacccgcgcggccatcccgtcatccaacagttgatcctaactgagcacgcccacggccctggtctggcctgggcaccggccaccgtagcccatcccttgatggcctctgtgtccccaggagggcgggccggggggttgcccaggggctggagcagtggactgtggctccatagaggtaggccggagggtgtgagggcagattcaagctatccccagggctctgctctggtcggagccagccccttctccctctctgccttccccgccccattcctgatgctgaactgttctggacccctggccctgagtctctcaggaccaaagtgggcacgggaacagctgtagtgtgtgcccccccgggctttggccacaggtctccctctcgaggtgtggttgtgactgcgacccttcccttgccgtgatgccttcctcccccggggcttggtccagctccttcactctctagcagctgctggggcccacctcccatgccgaggaccagcaggggaaacctccagggagcatctgcaggctctgcttctgcccggctgctggcttgctctccctggtggctctccagcggccagcttcctcacccacccggcactctgctttgctctgtctcctgaggtgggcctgaccaacctccccttctctgcctcagtccctgggctccagggctcagctccacagccctctgcatgtgggaagtgggctccttcacctacctcacagggctgttgtgaggggcgctgtgatgcggttccaaagcacagggcttggcgcaccccactgtgctctcaataaatgtgtttcctgtcttaacaaaaa

SEQ ID NO: 366324 - DNA, 3331 bp, Homo sapiens
atatcagggtggtttataaagcctgtaaacacacctaagaaaataaacattttacaaatgaaaaaaaaaaaaaaaaaaaaaaaaaagcagagagggagcgcgccttggctcgctggccttggcggcggctcctcaggagagctggggcgcccacgagaggatccctcacccgggtctctcctcagggatgacatcatccgtccacctccttgtcttcaaggaccacctcctctccatgctgagctgctgccaaggggcctgctgcccatctacacctcacgagggcactaggagcacggtttcctggatcccaccaacatacaaagcagccactcactgacccccaggaccaggatggcaaaggatgaagaggaccggaactgaccagccagctgtccctcttacctaaagacttaaaccaatgccctagtgagggggcattgggcattaagccctgacctttgctatgctcatactttgactctatgagtactttcctataagtctttgcttgtgttcacctgctagcaaactggagtgtttccctccccaagggggtgtcagtctttgtcgactgactctgtcatcacccttatgatgtcctgaatggaaggatccctttgggaaattctcaggagggggacctgggccaagggcttggccagcatcctgctggcaactccaaggccctgggtgggcttctggaatgagcatgctactgaatcaccaaaggcacgccccacctctctgaagatcttcctatccttttctgggggaatggggtcgatgagagcaacctcctagggttgttgtgagaattaaatgagataaaagaggcctcaggcaggatctggcatagaggaggtgatcagcaaatgtttgttgaaaaggtttgacaggtcagtcccttcccacccctcttgcttgtcttacttgtcttatttattctccaacagcactccaggcagcccttgtccacgggctctccttgcatcaggtaggggctttgcagagaccatcgacgggctgacttgagtaagaacacgaattatgcatgtggccatttccagagcactttctatgtgatatgaacatgtgatttttatgtaatatgtgtatgtaaacgaggcagcctcatttccaggtgaggatgcatttggtagtgttgatttttgtaatttaaagaagctgaaagggagagaggacccgtgaggactgaactctctgtcccatggggtagggcttacatttacattaaagaaacagaaacttgctgggaggtgtaagtatttggtcacattgctggcaacagaaggggttggagttggacccagggtgccacgctagctgccctcaccccttcttcccctctggcccagagttatactaagagtccttttatttcaaaccaaatgtttgacaatgggacagtctgtttgaaatcccagctgcctggggtggtcttggggggtctgggtggccccagtgctggtaccatgtgctggcttcaccttttaataacagtgtgaccttaaacaagtcgcttaactactctaagtttcagtttctttcatggtctaaatggagattaaaacacacacacacacacacacacacacacacacacacacacaccctcgtgtatctaccccacagggcgcttttgaagaccaaatgctgtaactactatgaaagtgctttgtaaattgctgtggaaagtgtgagctactcaagcacccgaggctgtccctccttgctcacatgtccagcccaattctcccttagtgagaacagcactcagtaggtgctgtgtgtgtttgtgttcaattaagaaattccagaataaataaaaatgaattaattcaacaaacattttctggggcaccgacaatctgcccagtgcaccaggctaggtatctgatacaaagataatgaaaacagtctcttggaacctaattggggtcctcatttgaccaggaatttctttcgtcccgttttaagccaaccagttttgtccggacaagacaaaaacaacttgggctgctttagagaagcccagctcagtgtagacaatagctgcccagcctctgaaaggggctgattggattatgtggcaaatggaggtgcaaggatgacttggacggtgacaaatgaagtgggcggagacctgctttgagttaatccaggctattaggaggggaccttttgtcttccagagactggcaggagcttttaccagtggtttttacatccttaatgttcaggacgaataatttatggtcagtgaaaatccaggccccagtgagattcgagtgggctgtaaaatcgagagtcctgctcccagtgagtaatggtagtgaatgtttctgtcactttttgcaaccgtccattcatttgatcctcacaactccctgtcctgagccaggaccggccactgccactcccagggaaacagaggctgtcaagaggctccacagattgggccccactggatcattgaacccctgttccctgagttctagaggaagaattgtacctgtctcagtcccggccacctccagaaggcctccctctgcatttctgactttgctgtgccggcagcctggagcctcccaggtccctgctgtcatcttttctagccactacagtctctgtctttcctttcacagccccaagcttcttgaaaggcctgtctacacttgctgtcttccttcctcacctccaatttcctcttcaacccactgcttcctgactcgctctactccgtggaagcacgctcacaaaggcacgtgggccgtggcccggctgggtcggctgaagaactgcggatggaagctgcggaagaggccctgatggggcccaccatcccggacccaagtcttcttcctggcgggcctctcgtctccttcctggtttgggcggaagccatcacctggatgcctacgtgggaagggacctcgaatgtgggaccccagcccctctccagctcgaaatccctccacagccacggggacaccctgcacctattcccacgggacaggctggacccagagactctggacccggggcctccccttgagtagagacccgccctctgactgatggacgccgctgacctggggtcagacccgtgggctggacccctgcccaccccgcaggaaccctgaggcctaggggagctgttgagccttcagtgtctgcatgtgggaagtgggctccttcacctacctcacagggctgttgtgaggggcgctgtgatgcggttccaaagcacagggcttggcgcaccccactgtgctctcaataaatgtgtttcctgtcttaacaaaaa

SEQ ID NO: 366325 - DNA, 3451 bp, Homo sapiens
atatcagggtggtttataaagcctgtaaacacacctaagaaaataaacattttacaaatgaaaaaaaaaaaaaaaaaaaaaaaaaagcagagagggagcgcgccttggctcgctggccttggcggcggctcctcaggagagctggggcgcccacgagaggatccctcacccgggtctctcctcagggatgacatcatccgtccacctccttgtcttcaaggaccacctcctctccatgctgagctgctgccaaggggcctgctgcccatctacacctcacgagggcactaggagcacggtttcctggatcccaccaacatacaaagcagccactcactgacccccaggaccaggatggcaaaggatgaagaggaccggaactgaccagccagctgtccctcttacctaaagacttaaaccaatgccctagtgagggggcattgggcattaagccctgacctttgctatgctcatactttgactctatgagtactttcctataagtctttgcttgtgttcacctgctagcaaactggagtgtttccctccccaagggggtgtcagtctttgtcgactgactctgtcatcacccttatgatgtcctgaatggaaggatccctttgggaaattctcaggagggggacctgggccaagggcttggccagcatcctgctggcaactccaaggccctgggtgggcttctggaatgagcatgctactgaatcaccaaaggcacgccccacctctctgaagatcttcctatccttttctgggggaatggggtcgatgagagcaacctcctagggttgttgtgagaattaaatgagataaaagaggcctcaggcaggatctggcatagaggaggtgatcagcaaatgtttgttgaaaaggtttgacaggtcagtcccttcccacccctcttgcttgtcttacttgtcttatttattctccaacagcactccaggcagcccttgtccacgggctctccttgcatcaggtaggggctttgcagagaccatcgacgggctgacttgagtaagaacacgaattatgcatgtggccatttccagagcactttctatgtgatatgaacatgtgatttttatgtaatatgtgtatgtaaacgaggcagcctcatttccaggtgaggatgcatttggtagtgttgatttttgtaatttaaagaagctgaaagggagagaggacccgtgaggactgaactctctgtcccatggggtagggcttacatttacattaaagaaacagaaacttgctgggaggtgtaagtatttggtcacattgctggcaacagaaggggttggagttggacccagggtgccacgctagctgccctcaccccttcttcccctctggcccagagttatactaagagtccttttatttcaaaccaaatgtttgacaatgggacagtctgtttgaaatcccagctgcctggggtggtcttggggggtctgggtggccccagtgctggtaccatgtgctggcttcaccttttaataacagtgtgaccttaaacaagtcgcttaactactctaagtttcagtttctttcatggtctaaatggagattaaaacacacacacacacacacacacacacacacacacacacacaccctcgtgtatctaccccacagggcgcttttgaagaccaaatgctgtaactactatgaaagtgctttgtaaattgctgtggaaagtgtgagctactcaagcacccgaggctgtccctccttgctcacatgtccagcccaattctcccttagtgagaacagcactcagtaggtgctgtgtgtgtttgtgttcaattaagaaattccagaataaataaaaatgaattaattcaacaaacattttctggggcaccgacaatctgcccagtgcaccaggctaggtatctgatacaaagataatgaaaacagtctcttggaacctaattggggtcctcatttgaccaggaatttctttcgtcccgttttaagccaaccagttttgtccggacaagacaaaaacaacttgggctgctttagagaagcccagctcagtgtagacaatagctgcccagcctctgaaaggggctgattggattatgtggcaaatggaggtgcaaggatgacttggacggtgacaaatgaagtgggcggagacctgctttgagttaatccaggctattaggaggggaccttttgtcttccagagactggcaggagcttttaccagtggtttttacatccttaatgttcaggacgaataatttatggtcagtgaaaatccaggccccagtgagattcgagtgggctgtaaaatcgagagtcctgctcccagtgagtaatggtagtgaatgtttctgtcactttttgcaaccgtccattcatttgatcctcacaactccctgtcctgagccaggaccggccactgccactcccagggaaacagaggctgtcaagaggctccacagattgggccccactggatcattgaacccctgttccctgagttctagaggaagaattgtacctgtctcagtcccggccacctccagaaggcctccctctgcatttctgactttgctgtgccggcagcctggagcctcccaggtccctgctgtcatcttttctagccactacagtctctgtctttcctttcacagccccaagcttcttgaaaggcctgtctacacttgctgtcttccttcctcacctccaatttcctcttcaacccactgcttcctgactcgctctactccgtggaagcacgctcacaaagttcctgacctggccatcccggggtgcccttgaccagccccgtgtctcctcagggtgtcccagcaccagcctggcacagagtggggctcagttagagtatgtgggatgttggtttcgccaggcacgtgggccgtggcccggctgggtcggctgaagaactgcggatggaagctgcggaagaggccctgatggggcccaccatcccggacccaagtcttcttcctggcgggcctctcgtctccttcctggtttgggcggaagccatcacctggatgcctacgtgggaagggacctcgaatgtgggaccccagcccctctccagctcgaaatccctccacagccacggggacaccctgcacctattcccacgggacaggctggacccagagactctggacccggggcctccccttgagtagagacccgccctctgactgatggacgccgctgacctggggtcagacccgtgggctggacccctgcccaccccgcaggaaccctgaggcctaggggagctgttgagccttcagtgtctgcatgtgggaagtgggctccttcacctacctcacagggctgttgtgaggggcgctgtgatgcggttccaaagcacagggcttggcgcaccccactgtgctctcaataaatgtgtttcctgtcttaacaaaaa

SEQ ID NO: 366326 - DNA, 6453 bp, Homo sapiens
atatcagggtggtttataaagcctgtaaacacacctaagaaaataaacattttacaaatgaaaaaaaaaaaaaaaaaaaaaaaaaagcagagagggagcgcgccttggctcgctggccttggcggcggctcctcaggagagctggggcgcccacgagaggatccctcacccgggtctctcctcagggatgacatcatccgtccacctccttgtcttcaaggaccacctcctctccatgctgagctgctgccaaggggcctgctgcccatctacacctcacgagggcactaggagcacggtttcctggatcccaccaacatacaaagcagccactcactgacccccaggaccaggatggcaaaggatgaagaggaccggaactgaccagccagctgtccctcttacctaaagacttaaaccaatgccctagtgagggggcattgggcattaagccctgacctttgctatgctcatactttgactctatgagtactttcctataagtctttgcttgtgttcacctgctagcaaactggagtgtttccctccccaagggggtgtcagtctttgtcgactgactctgtcatcacccttatgatgtcctgaatggaaggatccctttgggaaattctcaggagggggacctgggccaagggcttggccagcatcctgctggcaactccaaggccctgggtgggcttctggaatgagcatgctactgaatcaccaaaggcacgccccacctctctgaagatcttcctatccttttctgggggaatggggtcgatgagagcaacctcctagggttgttgtgagaattaaatgagataaaagaggcctcaggcaggatctggcatagaggaggtgatcagcaaatgtttgttgaaaaggtttgacaggtcagtcccttcccacccctcttgcttgtcttacttgtcttatttattctccaacagcactccaggcagcccttgtccacgggctctccttgcatcaggtaggggctttgcagagaccatcgacgggctgacttgagtaagaacacgaattatgcatgtggccatttccagagcactttctatgtgatatgaacatgtgatttttatgtaatatgtgtatgtaaacgaggcagcctcatttccaggtgaggatgcatttggtagtgttgatttttgtaatttaaagaagctgaaagggagagaggacccgtgaggactgaactctctgtcccatggggtagggcttacatttacattaaagaaacagaaacttgctgggaggtgtaagtatttggtcacattgctggcaacagaaggggttggagttggacccagggtgccacgctagctgccctcaccccttcttcccctctggcccagagttatactaagagtccttttatttcaaaccaaatgtttgacaatgggacagtctgtttgaaatcccagctgcctggggtggtcttggggggtctgggtggccccagtgctggtaccatgtgctggcttcaccttttaataacagtgtgaccttaaacaagtcgcttaactactctaagtttcagtttctttcatggtctaaatggagattaaaacacacacacacacacacacacacacacacacacacacacaccctcgtgtatctaccccacagggcgcttttgaagaccaaatgctgtaactactatgaaagtgctttgtaaattgctgtggaaagtgtgagctactcaagcacccgaggctgtccctccttgctcacatgtccagcccaattctcccttagtgagaacagcactcagtaggtgctgtgtgtgtttgtgttcaattaagaaattccagaataaataaaaatgaattaattcaacaaacattttctggggcaccgacaatctgcccagtgcaccaggctaggtatctgatacaaagataatgaaaacagtctcttggaacctaattggggtcctcatttgaccaggaatttctttcgtcccgttttaagccaaccagttttgtccggacaagacaaaaacaacttgggctgctttagagaagcccagctcagtgtagacaatagctgcccagcctctgaaaggggctgattggattatgtggcaaatggaggtgcaaggatgacttggacggtgacaaatgaagtgggcggagacctgctttgagttaatccaggctattaggaggggaccttttgtcttccagagactggcaggagcttttaccagtggtttttacatccttaatgttcaggacgaataatttatggtcagtgaaaatccaggccccagtgagattcgagtgggctgtaaaatcgagagtcctgctcccagtgagtaatggtagtgaatgtttctgtcactttttgcaaccgtccattcatttgatcctcacaactccctgtcctgagccaggaccggccactgccactcccagggaaacagaggctgtcaagaggctccacagattgggccccactggatcattgaacccctgttccctgagttctagaggaagaattgtacctgtctcagtcccggccacctccagaaggcctccctctgcatttctgactttgctgtgccggcagcctggagcctcccaggtccctgctgtcatcttttctagccactacagtctctgtctttcctttcacagccccaagcttcttgaaaggcctgtctacacttgctgtcttccttcctcacctccaatttcctcttcaacccactgcttcctgactcgctctactccgtggaagcacgctcacaaaggtaaagacttttctgtggcttaatccttgtcatgttttcggctcatggacacaaggacacattttcatgccttctctcacagggctctgcgtctccggttcacttctgtgtctttacactcccttcacagagacacttgctcccccttctctcgttcttagcatcccctaggaacttgcacacccaggtctctcgacttctggacctgcttcttaccatgccgtcttaagcagtcaggagtcgctgcctgggttcgagtcctagttaaattacttagtgctgagaccttggggtaggtaaacttttccaagccaggtttatctcagtttcaaaatagggttaatcgtctttatctggcaggtcaggtgggatgtctcacaggtaagcaccagatgccatttgaaaggcttgaagcaaagtcaataaagcattcatgggaaaatacaactggaggcaccactagattttcgtatacattaggttcccacggggaggaccgaagagagaagaaagaagtggaaagggaggagcgtgcaggagagacaggagaagagaataactaaacaaagacattaaagacaaaaaaaaagtaggaaagggagacttagaaaatattaaaagccaccaaaaacacatccaaagacggtttccccttacgttagttgggctaaaagaaagcaaatgggaagaaggttttaaattgattatcccagtgacaaatcccaggaagctttcacatcaaatcaccctattctgggtttttaactccttccatcgagtttaacctctttacctcccacatcctggtaaaccctgccccctccctaccgccccctttgctggtgattaaatcctgaaggtacacgaagtatttcagtgaatgaatggctaacagaaaagggcctcccctcccccttaccctggcggtgtttttcagttttattccactttccgcccttttcccttaatgaacacagggctaatctcgggccttgtcgaaggaagaggctgcagacgttaatgaggttagctgctggattccagtattcgtcgcataaggatccttctttgtctgcgaaggaaaaacacactgattatcataatgagtaatgaggtgaactggccaccgccgggccggggcgatgtggcttcttaagccacacttctaattttggtgatggagccgacatttctttggcttctcatttaagtctttgcctctgtcccagtgcgaagtccattcagcggggttgaaagttgcaggcagctttgggaaggggggcgtcggacagggttgcattgtagaaagtggctttgttcgatccttcgcacagatgcaaatggccagagcattcattccctttcttcaagagctgaggactgggggggccactggtgatcagttcccaactctagctctcctctgactcatctcaggacccattgaggacatccaaaactcactcaagatcaccaagtggtaggaaagtactaactcctgggcatagccctaggggagtgactacaatgtgaatactcatggaatgcctagccaggtgaagaagtgaatgcatgttggcatcccagagggaccccccttaagagggcatagtttggggttcagatttgactccagcatactgttgaaattgggcacagggggctagtgattagtcaggatcaatcagtggagaggagattaaaactcacatctgggagtccggaatcagaacttgtagttcttttttttgaaatggagtctcgctctgtcgcccaggctggagtgcagtggcgtgatctcggctcactgcaacctctgccttccgggttcaagcaattctcccacctcagcctcctgagtagctgggattacaggcgcccaccaccacagccggctactttttgtatttttaggagagacggggtttcaccatgttggtcaggctggtcttgaactcctgacctcatgatccacctgccttagcctcccaaagtgctgggattacaggcgtgagccaccatgcccagccctatagtagttcttcttttgccccttaatatcctcacccacatgtcctgtaccctgcctgaaccctcctcctctttttgttctgatctttgagctccctagagcccataattctttagagcaggtatgtcccgagtctgaaacatgcccttatttgtcccaagctctggacatttctcaccccaaggcggatcaatcatgattaaatcactccaattaaactttaggctccagtcagaccttcagccaaatggaaaaaaaaactaggggataagggaggtagttggagcaagaaaatgttattagttgaaaccttacgggaccttcctcccttagtgagtctgttggctaaaggttctctggcttcgtgaattagaatcggatactgtttccaagttagcaaaaccaactctaccccagcaccccacgaggaagaatgtggaaggatctcccattggccggttggggcaaaagcctgaggcaatctttcatccccttttgccaaggcgagactttcccagtgacggtgatgtagttggccactctgactatgggtggactcgggtgtagacctctgaagctgagatcacacgaaaacctggcctccccgccatgtagctgttggagagtagaaaaatagagcacgcctgatgtttctaaatgagaagactttcaatagtaatgaagaatccatggcactctcctcaccctcaaacacatggcagtcattcacatacaggccccaaagccactgttagtgctgcagtagctcctgtggacattggaaagcccggagagggcgtggaagaaatcagctggcccccggcaggttctctggggttttgtgcccaaggctcctggagccctaaaaactttcaaaagttaactccccacgtccccatcctgcttgggtttctggacttttctgaggcaccggcagaggggtctcgttgctcccttgagtgtaggggcagccctttaacctggctccttgagtccctgctttttctgcttctgttgccttcttcctcgtcttcctctctctcaatatctccctctctttgtccctccccagttcctgacctggccatcccggggtgcccttgaccagccccgtgtctcctcagggtgtcccagcaccagcctggcacagagtggggctcagttagagtatgtgggatgttggtttcgccaggtgagtgaatgaaaggactcgaccaccacagctgagccactagctgggccatgcgaagagttctaggtgcaaaggctggagggtggaattcatttttgagaggtgtgtgagcagcttccgacccctgccccatttgaacgggggccttgctggtcgcgtccctgcattcacccgcgcggccatcccgtcatccaacagttgatcctaactgagcacgcccacggccctgctggggtcagacccgtgggctggacccctgcccaccccgcaggaaccctgaggcctaggggagctgttgagccttcagtgtctgcatgtgggaagtgggctccttcacctacctcacagggctgttgtgaggggcgctgtgatgcggttccaaagcacagggcttggcgcaccccactgtgctctcaataaatgtgtttcctgtcttaacaaaaa

SEQ ID NO: 366327 - DNA, 6263 bp, Homo sapiens
atatcagggtggtttataaagcctgtaaacacacctaagaaaataaacattttacaaatgaaaaaaaaaaaaaaaaaaaaaaaaaagcagagagggagcgcgccttggctcgctggccttggcggcggctcctcaggagagctggggcgcccacgagaggatccctcacccgggtctctcctcagggatgacatcatccgtccacctccttgtcttcaaggaccacctcctctccatgctgagctgctgccaaggggcctgctgcccatctacacctcacgagggcactaggagcacggtttcctggatcccaccaacatacaaagcagccactcactgacccccaggaccaggatggcaaaggatgaagaggaccggaactgaccagccagctgtccctcttacctaaagacttaaaccaatgccctagtgagggggcattgggcattaagccctgacctttgctatgctcatactttgactctatgagtactttcctataagtctttgcttgtgttcacctgctagcaaactggagtgtttccctccccaagggggtgtcagtctttgtcgactgactctgtcatcacccttatgatgtcctgaatggaaggatccctttgggaaattctcaggagggggacctgggccaagggcttggccagcatcctgctggcaactccaaggccctgggtgggcttctggaatgagcatgctactgaatcaccaaaggcacgccccacctctctgaagatcttcctatccttttctgggggaatggggtcgatgagagcaacctcctagggttgttgtgagaattaaatgagataaaagaggcctcaggcaggatctggcatagaggaggtgatcagcaaatgtttgttgaaaaggtttgacaggtcagtcccttcccacccctcttgcttgtcttacttgtcttatttattctccaacagcactccaggcagcccttgtccacgggctctccttgcatcaggtaggggctttgcagagaccatcgacgggctgacttgagtaagaacacgaattatgcatgtggccatttccagagcactttctatgtgatatgaacatgtgatttttatgtaatatgtgtatgtaaacgaggcagcctcatttccaggtgaggatgcatttggtagtgttgatttttgtaatttaaagaagctgaaagggagagaggacccgtgaggactgaactctctgtcccatggggtagggcttacatttacattaaagaaacagaaacttgctgggaggtgtaagtatttggtcacattgctggcaacagaaggggttggagttggacccagggtgccacgctagctgccctcaccccttcttcccctctggcccagagttatactaagagtccttttatttcaaaccaaatgtttgacaatgggacagtctgtttgaaatcccagctgcctggggtggtcttggggggtctgggtggccccagtgctggtaccatgtgctggcttcaccttttaataacagtgtgaccttaaacaagtcgcttaactactctaagtttcagtttctttcatggtctaaatggagattaaaacacacacacacacacacacacacacacacacacacacacaccctcgtgtatctaccccacagggcgcttttgaagaccaaatgctgtaactactatgaaagtgctttgtaaattgctgtggaaagtgtgagctactcaagcacccgaggctgtccctccttgctcacatgtccagcccaattctcccttagtgagaacagcactcagtaggtgctgtgtgtgtttgtgttcaattaagaaattccagaataaataaaaatgaattaattcaacaaacattttctggggcaccgacaatctgcccagtgcaccaggctaggtatctgatacaaagataatgaaaacagtctcttggaacctaattggggtcctcatttgaccaggaatttctttcgtcccgttttaagccaaccagttttgtccggacaagacaaaaacaacttgggctgctttagagaagcccagctcagtgtagacaatagctgcccagcctctgaaaggggctgattggattatgtggcaaatggaggtgcaaggatgacttggacggtgacaaatgaagtgggcggagacctgctttgagttaatccaggctattaggaggggaccttttgtcttccagagactggcaggagcttttaccagtggtttttacatccttaatgttcaggacgaataatttatggtcagtgaaaatccaggccccagtgagattcgagtgggctgtaaaatcgagagtcctgctcccagtgagtaatggtagtgaatgtttctgtcactttttgcaaccgtccattcatttgatcctcacaactccctgtcctgagccaggaccggccactgccactcccagggaaacagaggctgtcaagaggctccacagattgggccccactggatcattgaacccctgttccctgagttctagaggaagaattgtacctgtctcagtcccggccacctccagaaggcctccctctgcatttctgactttgctgtgccggcagcctggagcctcccaggtccctgctgtcatcttttctagccactacagtctctgtctttcctttcacagccccaagcttcttgaaaggcctgtctacacttgctgtcttccttcctcacctccaatttcctcttcaacccactgcttcctgactcgctctactccgtggaagcacgctcacaaaggtaaagacttttctgtggcttaatccttgtcatgttttcggctcatggacacaaggacacattttcatgccttctctcacagggctctgcgtctccggttcacttctgtgtctttacactcccttcacagagacacttgctcccccttctctcgttcttagcatcccctaggaacttgcacacccaggtctctcgacttctggacctgcttcttaccatgccgtcttaagcagtcaggagtcgctgcctgggttcgagtcctagttaaattacttagtgctgagaccttggggtaggtaaacttttccaagccaggtttatctcagtttcaaaatagggttaatcgtctttatctggcaggtcaggtgggatgtctcacaggtaagcaccagatgccatttgaaaggcttgaagcaaagtcaataaagcattcatgggaaaatacaactggaggcaccactagattttcgtatacattaggttcccacggggaggaccgaagagagaagaaagaagtggaaagggaggagcgtgcaggagagacaggagaagagaataactaaacaaagacattaaagacaaaaaaaaagtaggaaagggagacttagaaaatattaaaagccaccaaaaacacatccaaagacggtttccccttacgttagttgggctaaaagaaagcaaatgggaagaaggttttaaattgattatcccagtgacaaatcccaggaagctttcacatcaaatcaccctattctgggtttttaactccttccatcgagtttaacctctttacctcccacatcctggtaaaccctgccccctccctaccgccccctttgctggtgattaaatcctgaaggtacacgaagtatttcagtgaatgaatggctaacagaaaagggcctcccctcccccttaccctggcggtgtttttcagttttattccactttccgcccttttcccttaatgaacacagggctaatctcgggccttgtcgaaggaagaggctgcagacgttaatgaggttagctgctggattccagtattcgtcgcataaggatccttctttgtctgcgaaggaaaaacacactgattatcataatgagtaatgaggtgaactggccaccgccgggccggggcgatgtggcttcttaagccacacttctaattttggtgatggagccgacatttctttggcttctcatttaagtctttgcctctgtcccagtgcgaagtccattcagcggggttgaaagttgcaggcagctttgggaaggggggcgtcggacagggttgcattgtagaaagtggctttgttcgatccttcgcacagatgcaaatggccagagcattcattccctttcttcaagagctgaggactgggggggccactggtgatcagttcccaactctagctctcctctgactcatctcaggacccattgaggacatccaaaactcactcaagatcaccaagtggtaggaaagtactaactcctgggcatagccctaggggagtgactacaatgtgaatactcatggaatgcctagccaggtgaagaagtgaatgcatgttggcatcccagagggaccccccttaagagggcatagtttggggttcagatttgactccagcatactgttgaaattgggcacagggggctagtgattagtcaggatcaatcagtggagaggagattaaaactcacatctgggagtccggaatcagaacttgtagttcttttttttgaaatggagtctcgctctgtcgcccaggctggagtgcagtggcgtgatctcggctcactgcaacctctgccttccgggttcaagcaattctcccacctcagcctcctgagtagctgggattacaggcgcccaccaccacagccggctactttttgtatttttaggagagacggggtttcaccatgttggtcaggctggtcttgaactcctgacctcatgatccacctgccttagcctcccaaagtgctgggattacaggcgtgagccaccatgcccagccctatagtagttcttcttttgccccttaatatcctcacccacatgtcctgtaccctgcctgaaccctcctcctctttttgttctgatctttgagctccctagagcccataattctttagagcaggtatgtcccgagtctgaaacatgcccttatttgtcccaagctctggacatttctcaccccaaggcggatcaatcatgattaaatcactccaattaaactttaggctccagtcagaccttcagccaaatggaaaaaaaaactaggggataagggaggtagttggagcaagaaaatgttattagttgaaaccttacgggaccttcctcccttagtgagtctgttggctaaaggttctctggcttcgtgaattagaatcggatactgtttccaagttagcaaaaccaactctaccccagcaccccacgaggaagaatgtggaaggatctcccattggccggttggggcaaaagcctgaggcaatctttcatccccttttgccaaggcgagactttcccagtgacggtgatgtagttggccactctgactatgggtggactcgggtgtagacctctgaagctgagatcacacgaaaacctggcctccccgccatgtagctgttggagagtagaaaaatagagcacgcctgatgtttctaaatgagaagactttcaatagtaatgaagaatccatggcactctcctcaccctcaaacacatggcagtcattcacatacaggccccaaagccactgttagtgctgcagtagctcctgtggacattggaaagcccggagagggcgtggaagaaatcagctggcccccggcaggttctctggggttttgtgcccaaggctcctggagccctaaaaactttcaaaagttaactccccacgtccccatcctgcttgggtttctggacttttctgaggcaccggcagaggggtctcgttgctcccttgagtgtaggggcagccctttaacctggctccttgagtccctgctttttctgcttctgttgccttcttcctcgtcttcctctctctcaatatctccctctctttgtccctccccagttcctgacctggccatcccggggtgcccttgaccagccccgtgtctcctcagggtgtcccagcaccagcctggcacagagtggggctcagttagagtatgtgggatgttggtttcgccaggtgagtgaatgaaaggactcgaccaccacagctgagccactagctgggccatgcgaagagttctaggtgcaaaggctggagggtggaattcatttttgagaggtgtgtgagcagcttccgacccctgccccatttgaacgggggccttgctggtcgcgtccctgcattcatgtatcctctcctcgcatctcctcacatggaaagaaataaatgtatttgtgccttctgtgaggaatggggggacaaatgtccca

SEQ ID NO: 366328 - DNA, 4585 bp, Homo sapiens
atatcagggtggtttataaagcctgtaaacacacctaagaaaataaacattttacaaatgaaaaaaaaaaaaaaaaaaaaaaaaaagcagagagggagcgcgccttggctcgctggccttggcggcggctcctcaggagagctggggcgcccacgagaggatccctcacccgggtctctcctcagggatgacatcatccgtccacctccttgtcttcaaggaccacctcctctccatgctgagctgctgccaaggggcctgctgcccatctacacctcacgagggcactaggagcacggtttcctggatcccaccaacatacaaagcagccactcactgacccccaggaccaggatggcaaaggatgaagaggaccggaactgaccagccagctgtccctcttacctaaagacttaaaccaatgccctagtgagggggcattgggcattaagccctgacctttgctatgctcatactttgactctatgagtactttcctataagtctttgcttgtgttcacctgctagcaaactggagtgtttccctccccaagggggtgtcagtctttgtcgactgactctgtcatcacccttatgatgtcctgaatggaaggatccctttgggaaattctcaggagggggacctgggccaagggcttggccagcatcctgctggcaactccaaggccctgggtgggcttctggaatgagcatgctactgaatcaccaaaggcacgccccacctctctgaagatcttcctatccttttctgggggaatggggtcgatgagagcaacctcctagggttgttgtgagaattaaatgagataaaagaggcctcaggcaggatctggcatagaggaggtgatcagcaaatgtttgttgaaaaggtttgacaggtcagtcccttcccacccctcttgcttgtcttacttgtcttatttattctccaacagcactccaggcagcccttgtccacgggctctccttgcatcaggtaggggctttgcagagaccatcgacgggctgacttgagtaagaacacgaattatgcatgtggccatttccagagcactttctatgtgatatgaacatgtgatttttatgtaatatgtgtatgtaaacgaggcagcctcatttccaggtgaggatgcatttggtagtgttgatttttgtaatttaaagaagctgaaagggagagaggacccgtgaggactgaactctctgtcccatggggtagggcttacatttacattaaagaaacagaaacttgctgggaggtgtaagtatttggtcacattgctggcaacagaaggggttggagttggacccagggtgccacgctagctgccctcaccccttcttcccctctggcccagagttatactaagagtccttttatttcaaaccaaatgtttgacaatgggacagtctgtttgaaatcccagctgcctggggtggtcttggggggtctgggtggccccagtgctggtaccatgtgctggcttcaccttttaataacagtgtgaccttaaacaagtcgcttaactactctaagtttcagtttctttcatggtctaaatggagattaaaacacacacacacacacacacacacacacacacacacacacaccctcgtgtatctaccccacagggcgcttttgaagaccaaatgctgtaactactatgaaagtgctttgtaaattgctgtggaaagtgtgagctactcaagcacccgaggctgtccctccttgctcacatgtccagcccaattctcccttagtgagaacagcactcagtaggtgctgtgtgtgtttgtgttcaattaagaaattccagaataaataaaaatgaattaattcaacaaacattttctggggcaccgacaatctgcccagtgcaccaggctaggtatctgatacaaagataatgaaaacagtctcttggaacctaattggggtcctcatttgaccaggaatttctttcgtcccgttttaagccaaccagttttgtccggacaagacaaaaacaacttgggctgctttagagaagcccagctcagtgtagacaatagctgcccagcctctgaaaggggctgattggattatgtggcaaatggaggtgcaaggatgacttggacggtgacaaatgaagtgggcggagacctgctttgagttaatccaggctattaggaggggaccttttgtcttccagagactggcaggagcttttaccagtggtttttacatccttaatgttcaggacgaataatttatggtcagtgaaaatccaggccccagtgagattcgagtgggctgtaaaatcgagagtcctgctcccagtgagtaatggtagtgaatgtttctgtcactttttgcaaccgtccattcatttgatcctcacaactccctgtcctgagccaggaccggccactgccactcccagggaaacagaggctgtcaagaggctccacagattgggccccactggatcattgaacccctgttccctgagttctagaggaagaattgtacctgtctcagtcccggccacctccagaaggcctccctctgcatttctgactttgctgtgccggcagcctggagcctcccaggtccctgctgtcatcttttctagccactacagtctctgtctttcctttcacagccccaagcttcttgaaaggcctgtctacacttgctgtcttccttcctcacctccaatttcctcttcaacccactgcttcctgactcgctctactccgtggaagcacgctcacaaaggtaaagacttttctgtggcttaatccttgtcatgttttcggctcatggacacaaggacacattttcatgccttctctcacagggctctgcgtctccggttcacttctgtgtctttacactcccttcacagagacacttgctcccccttctctcgttcttagcatcccctaggaacttgcacacccaggtctctcgacttctggacctgcttcttaccatgccgtcttaagcagtcaggagtcgctgcctgggttcgagtcctagttaaattacttagtgctgagaccttggggtaggtaaacttttccaagccaggtttatctcagtttcaaaatagggttaatcgtctttatctggcaggtcaggtgggatgtctcacaggtaagcaccagatgccatttgaaaggcttgaagcaaagtcaataaagcattcatgggaaaatacaactggaggcaccactagattttcgtatacattaggttcccacggggaggaccgaagagagaagaaagaagtggaaagggaggagcgtgcaggagagacaggagaagagaataactaaacaaagacattaaagacaaaaaaaaagtaggaaagggagacttagaaaatattaaaagccaccaaaaacacatccaaagacggtttccccttacgttagttgggctaaaagaaagcaaatgggaagaaggttttaaattgattatcccagtgacaaatcccaggaagctttcacatcaaatcaccctattctgggtttttaactccttccatcgagtttaacctctttacctcccacatcctggtaaaccctgccccctccctaccgccccctttgctggtgattaaatcctgaaggtacacgaagtatttcagtgaatgaatggctaacagaaaagggcctcccctcccccttaccctggcggtgtttttcagttttattccactttccgcccttttcccttaatgaacacagggctaatctcgggccttgtcgaaggaagaggctgcagacgttaatgaggttagctgctggattccagtattcgtcgcataaggatccttctttgtctgcgaaggaaaaacacactgattatcataatgagtaatgaggtgaactggccaccgccgggccggggcgatgtggcttcttaagccacacttctaattttggtgatggagccgacatttctttggcttctcatttaagtctttgcctctgtcccagtgcgaagtccattcagcggggttgaaagttgcaggcagctttgggaaggggggcgtcggacagggttgcattgtagaaagtggctttgttcgatccttcgcacagatgcaaatggccagagcattcattccctttcttcaagagctgaggactgggggggccactggtgatcagttcccaactctagctctcctctgactcatctcaggacccattgaggacatccaaaactcactcaagatcaccaagtggtaggaaagtactaactcctgggcatagccctaggggagtgactacaatgtgaatactcatggaatgcctagccaggtgaagaagtgaatgcatgttggcatcccagagggaccccccttaagagggcatagtttggggttcagatttgactccagcatactgttgaaattgggcacagggggctagtgattagtcaggatcaatcagtggagaggagattaaaactcacatctgggagtccggaatcagaacttgtagttcttttttttgaaatggagcctgggctacagagcaagacactatcttagatccaaaaaag

SEQ ID NO: 366329 - DNA, 7732 bp, Homo sapiens
atatcagggtggtttataaagcctgtaaacacacctaagaaaataaacattttacaaatgaaaaaaaaaaaaaaaaaaaaaaaaaagcagagagggagcgcgccttggctcgctggccttggcggcggctcctcaggagagctggggcgcccacgagaggatccctcacccgggtctctcctcagggatgacatcatccgtccacctccttgtcttcaaggaccacctcctctccatgctgagctgctgccaaggggcctgctgcccatctacacctcacgagggcactaggagcacggtttcctggatcccaccaacatacaaagcagccactcactgacccccaggaccaggatggcaaaggatgaagaggaccggaactgaccagccagctgtccctcttacctaaagacttaaaccaatgccctagtgagggggcattgggcattaagccctgacctttgctatgctcatactttgactctatgagtactttcctataagtctttgcttgtgttcacctgctagcaaactggagtgtttccctccccaagggggtgtcagtctttgtcgactgactctgtcatcacccttatgatgtcctgaatggaaggatccctttgggaaattctcaggagggggacctgggccaagggcttggccagcatcctgctggcaactccaaggccctgggtgggcttctggaatgagcatgctactgaatcaccaaaggcacgccccacctctctgaagatcttcctatccttttctgggggaatggggtcgatgagagcaacctcctagggttgttgtgagaattaaatgagataaaagaggcctcaggcaggatctggcatagaggaggtgatcagcaaatgtttgttgaaaaggtttgacaggtcagtcccttcccacccctcttgcttgtcttacttgtcttatttattctccaacagcactccaggcagcccttgtccacgggctctccttgcatcaggtaggggctttgcagagaccatcgacgggctgacttgagtaagaacacgaattatgcatgtggccatttccagagcactttctatgtgatatgaacatgtgatttttatgtaatatgtgtatgtaaacgaggcagcctcatttccaggtgaggatgcatttggtagtgttgatttttgtaatttaaagaagctgaaagggagagaggacccgtgaggactgaactctctgtcccatggggtagggcttacatttacattaaagaaacagaaacttgctgggaggtgtaagtatttggtcacattgctggcaacagaaggggttggagttggacccagggtgccacgctagctgccctcaccccttcttcccctctggcccagagttatactaagagtccttttatttcaaaccaaatgtttgacaatgggacagtctgtttgaaatcccagctgcctggggtggtcttggggggtctgggtggccccagtgctggtaccatgtgctggcttcaccttttaataacagtgtgaccttaaacaagtcgcttaactactctaagtttcagtttctttcatggtctaaatggagattaaaacacacacacacacacacacacacacacacacacacacacaccctcgtgtatctaccccacagggcgcttttgaagaccaaatgctgtaactactatgaaagtgctttgtaaattgctgtggaaagtgtgagctactcaagcacccgaggctgtccctccttgctcacatgtccagcccaattctcccttagtgagaacagcactcagtaggtgctgtgtgtgtttgtgttcaattaagaaattccagaataaataaaaatgaattaattcaacaaacattttctggggcaccgacaatctgcccagtgcaccaggctaggtatctgatacaaagataatgaaaacagtctcttggaacctaattggggtcctcatttgaccaggaatttctttcgtcccgttttaagccaaccagttttgtccggacaagacaaaaacaacttgggctgctttagagaagcccagctcagtgtagacaatagctgcccagcctctgaaaggggctgattggattatgtggcaaatggaggtgcaaggatgacttggacggtgacaaatgaagtgggcggagacctgctttgagttaatccaggctattaggaggggaccttttgtcttccagagactggcaggagcttttaccagtggtttttacatccttaatgttcaggacgaataatttatggtcagtgaaaatccaggccccagtgagattcgagtgggctgtaaaatcgagagtcctgctcccagtgagtaatggtagtgaatgtttctgtcactttttgcaaccgtccattcatttgatcctcacaactccctgtcctgagccaggaccggccactgccactcccagggaaacagaggctgtcaagaggctccacagattgggccccactggatcattgaacccctgttccctgagttctagaggaagaattgtacctgtctcagtcccggccacctccagaaggcctccctctgcatttctgactttgctgtgccggcagcctggagcctcccaggtccctgctgtcatcttttctagccactacagtctctgtctttcctttcacagccccaagcttcttgaaaggcctgtctacacttgctgtcttccttcctcacctccaatttcctcttcaacccactgcttcctgactcgctctactccgtggaagcacgctcacaaaggcacgtgggccgtggcccggctgggtcggctgaagaactgcggatggaagctgcggaagaggccctgatggggcccaccatcccggacccaagtcttcttcctggcgggcctctcgtctccttcctggtttgggcggaagccatcacctggatgcctacgtgggaagggacctcgaatgtgggaccccagcccctctccagctcgaaatcggcagactaggatggaagtgccctgtgagctggggggcccttcaaagggccaaggagaaaacgcaggccgagggaccagccttccaaatgggcttcaagctccaatgacctccgctcgccccctcgaaatgtctggaaaacataatgggcagattttctgtcttcaaagtttccggctaaacctcttcaagttctttattgtttgggactgagacactcagccatgttaatgggtagtttcttttgtatttgccttgaaaggccaaaatatttttatattgccacagacaaagccacctatttaaaaatgaactccatgtccgtcgtttcccaccaggagactatgtaccatgtgtgtgtctctatgtattctggggtcttgaaacaggtttctcatggggatggtcattcaccacggtccagaggggcagaacaggcggcgcttgccttgcccagggggcctggggaacgtgggccctcatctcagatctgcccccagtatgtttaggacgcgagccccagaaggatctgggagtaaacttaacattcactgtgtctctgctctgcatccgccatttgtgtgtgtttctggactgtgggctgtgtgtaccttggttggtgactcagtgagaagaagcaggaatgccaaagatactgtgaatgttctgagttttgttgctgttgttgttgagaggttgtttcactggtatctattgcattgtataataaatgaccagatgaatgaatgagtgaagcaagagagaatgaataaacaagtaaataggtaaagaagtaagcaagccaggatgagagtgtgtgtacacaagaccatggttcatccgctttgatggctaggcaatcaatatataaatagaaaaaacccagtgaatcactaagtaatagggcaacacacaaagcgatatcaggtgattatggactaaggggtatgtgtaactcaaatatatgcctctgacatttgacaatgaaaaagaacctaaatgaaagaaagaatggatgtatgagtagtgaagtgcagaatgagacatagattttgaggcccgtcaaaatgaaaagatgcaagttagggaacaagtgatcaaaagggagaagggaaaggttttttttaaaaaaccaaaacaacaaagaaaggttaaaaaaaaaaacagactagaggatgagtaatgagtaactctgtaaggaggaccatgtcagactattgtaagctaagcattaggactgatacaaataatatatgctcctggcatagaaaaataaaccacagagaacgagttcaaagaatagcaaagaaagaaagaggacccagtgggcgaaagatgagagtgtacttttaccaaaagttatctaagcctgagcacttgaagtctgcacataaataaataaatgacaaaagaaagaaaaaaaggccaaaaagtctacattgcgtgtgtggatggatgaatgagcagtgggagtgcagcgccaggtgacaagatgttgtgaggggttttgagtcatccagtcctgggcactgaggtctgttagatgaaaggatatgagaaaggtaatattggtaaataaagaaataggaaacaatgtaacaaatgttaagtacagaaatacattaatgggtggtaaataaagatgtaaaagaaggcaatgcgatcgatggtggcaaaagatcatcacagattaagggctatggctggtccacttctagaaaaccacaggctgtccattaaataatgaacatctaagtgaacaagtcagtgagtacctaaatagacaaggatgaggtgaatgagaagacatggccccatgggtcctcctgatgagggtgttggggtcccccctgggcaccccagctgcatgaaaatgaaggacaggaggtatggaaagctatgacagaagagagaaaggaacggtaaaaagaaataacaaccaaatggataaatgggtagatccacgagaagagttaggctaggacttgtcataagggcacctgactccactaatagaggaataaatgcctaataaaaagagagcaagcaggaaggaaggatgctatgaatgcaggaaggaagtaatgagtgagacgtggaaccgcacggccaaggatggacgtttgcgggtggctttttgatgcgtacagccaagccactccatggcaatgagctccgaagacaaagtgcaagagagaatgagtgagagagtgagagagagagaaacaataaaaaatgggaagaaatgtaaaaaggaagaaaggaagagaggtaatatattaaggaataaatacatgcatgcagatttaagacagagccatgctagaacaggaatgaaaggctgtgtgaaccaagcagaccgcttaattggcaccagtgctgctggtatggtcaatcacctactcaactaaggaacggctcaaagcatacacatgggagggaggagtggggccacagagagagggcccattagttgcagattacgatgtatccagttaggtgcacctgccttcgagaagtgtaaaaataagtatttacatagaaagaaagactgaatggatgcacggtgaatgcatgaatgattgaacgacagaaaagatttgcattgaccgatgaggagggcattgtagacagggatgagggtcattgatcctgggtgcagatctccaaaagaatgacagaaagaaagagggagtggtggaaagaaacaataggatgggaaaaaatgaaaatagaaaaaaggaagtgaaagagataataaataattagatcaaataagttgatgaaaggggactggtttagcacaagccatccacattaattcaaacctgtggctctgaagtttgttttttaaatgaccacaagtgtaagactgaatgaaagaataaatgcgtgcattccataggatgcaagaaaaggagtgaggaatgggaaaattggaagaacgagagagggagagatgtaagaaaagaaaggaaaagtgaagtaggcatatgaaagaaaaggcacttcttggacaagcactgaaatataatgagacagttttacccattaaatataataaacagtaaacgttgaggttcatcaataaaagcacagatacctgaatagaggagtgacctgaatagaattcgttcagccgaacgaatgagaatggatgattttcactatcctgtgcactcaaggcccaaaagagaaagcaagagaggagagaatatggaaacgtatgacaggatgtatataagcaatacaaacatattgaatgaataaataaagacataaatatgtgggagagtggaccacgcaaggacaaaaagaggagagaaggcagcaagaattatgactaattcaaaactgggttcctgagatagttaaataaatcctgcaccaaatccccagggggagaaattaacaaacaaaagacagccccacacggaccagtgtgcagaaggctccaggaaccgcagattatggttaatccaattctgtgcacctgaggtccataaataaaagaataagtattgaaatgaaagaatgacagaaagaatgaatggacacatgaacgactgaattagaaatggaaatgcctggcacagccaggaaggagctgcccatgggattgtcattcatctcactctgggcacctgaggtccataagcgtgaaaagaggcaggaagagaagtgtcagggagtcaaagatagagctaaggaaaggcaaaaatgaaactaaatgaaagcgaaagggaaaataaagaaaaaccaataaaaaagagaacgaatacgtgggtgtatctgtaagagtaggatctgttaggattagtcataagactgtcagtaatcctgaagatggatgagataatccaggcccaggttcccagggggagggaaaatggagaaaatataaaaagatgtgaaaaaggaaaaaggaaaggtaataaacaaacaaccaaagtgataaatggatagttaagggaggttgtctgaacagggattataattagtttacatacatactccttaaacagataaatacattacacctttcaaagaataaatgaaaaatagagagacatacctggctccaaaacaaggctgtatcttctgccactgtaataaaatagatgcaattgaggttcataaataaaagaataaatacttaaacgtgaaaggtgactaaatgcggggaagaaagattgcaaataaatacatgggccaaagatgtttggtttgcccatggagttttaattaaaaaaattaataaggaaaacaaatacccaaaataaggaagactgacaaatgagtgagtggatgagagagtgaatggtgcttgacgtaggagcagtagtgctttagggaccagcatgaaggtggtgaccgggagccctgattcatgggattctgtccacctgactttataagaaccaagaatggctgggaatggtggctcacgcctgtaatcccagcactttgggaggccgaggtgggcggatcatgaggtcaggagtttgagaccagccagtttgagatcagcctggccaacatggtgaaattccatctctactaaaaaaatacaaaaattatgggcgtggtggcacctgtctgtaatcctagctactcgggaggctgagagaggagaattgcttgaacccgggaggtgggaggttgtagtgagccaagattgcaccactgcactccagcctgggctacagagcaagacactatcttagatccaaaaaag

SEQ ID NO: 366330 - DNA, 4538 bp, Homo sapiens
atatcagggtggtttataaagcctgtaaacacacctaagaaaataaacattttacaaatgaaaaaaaaaaaaaaaaaaaaaaaaaagcagagagggagcgcgccttggctcgctggccttggcggcggctcctcaggagagctggggcgcccacgagaggatccctcacccgggtctctcctcagggatgacatcatccgtccacctccttgtcttcaaggaccacctcctctccatgctgagctgctgccaaggggcctgctgcccatctacacctcacgagggcactaggagcacggtttcctggatcccaccaacatacaaagcagccactcactgacccccaggaccaggatggcaaaggatgaagaggaccggaactgaccagccagctgtccctcttacctaaagacttaaaccaatgccctagtgagggggcattgggcattaagccctgacctttgctatgctcatactttgactctatgagtactttcctataagtctttgcttgtgttcacctgctagcaaactggagtgtttccctccccaagggggtgtcagtctttgtcgactgactctgtcatcacccttatgatgtcctgaatggaaggatccctttgggaaattctcaggagggggacctgggccaagggcttggccagcatcctgctggcaactccaaggccctgggtgggcttctggaatgagcatgctactgaatcaccaaaggcacgccccacctctctgaagatcttcctatccttttctgggggaatggggtcgatgagagcaacctcctagggttgttgtgagaattaaatgagataaaagaggcctcaggcaggatctggcatagaggaggtgatcagcaaatgtttgttgaaaaggtttgacaggtcagtcccttcccacccctcttgcttgtcttacttgtcttatttattctccaacagcactccaggcagcccttgtccacgggctctccttgcatcaggtaggggctttgcagagaccatcgacgggctgacttgagtaagaacacgaattatgcatgtggccatttccagagcactttctatgtgatatgaacatgtgatttttatgtaatatgtgtatgtaaacgaggcagcctcatttccaggtgaggatgcatttggtagtgttgatttttgtaatttaaagaagctgaaagggagagaggacccgtgaggactgaactctctgtcccatggggtagggcttacatttacattaaagaaacagaaacttgctgggaggtgtaagtatttggtcacattgctggcaacagaaggggttggagttggacccagggtgccacgctagctgccctcaccccttcttcccctctggcccagagttatactaagagtccttttatttcaaaccaaatgtttgacaatgggacagtctgtttgaaatcccagctgcctggggtggtcttggggggtctgggtggccccagtgctggtaccatgtgctggcttcaccttttaataacagtgtgaccttaaacaagtcgcttaactactctaagtttcagtttctttcatggtctaaatggagattaaaacacacacacacacacacacacacacacacacacacacacaccctcgtgtatctaccccacagggcgcttttgaagaccaaatgctgtaactactatgaaagtgctttgtaaattgctgtggaaagtgtgagctactcaagcacccgaggctgtccctccttgctcacatgtccagcccaattctcccttagtgagaacagcactcagtaggtgctgtgtgtgtttgtgttcaattaagaaattccagaataaataaaaatgaattaattcaacaaacattttctggggcaccgacaatctgcccagtgcaccaggctaggtatctgatacaaagataatgaaaacagtctcttggaacctaattggggtcctcatttgaccaggaatttctttcgtcccgttttaagccaaccagttttgtccggacaagacaaaaacaacttgggctgctttagagaagcccagctcagtgtagacaatagctgcccagcctctgaaaggggctgattggattatgtggcaaatggaggtgcaaggatgacttggacggtgacaaatgaagtgggcggagacctgctttgagttaatccaggctattaggaggggaccttttgtcttccagagactggcaggagcttttaccagtggtttttacatccttaatgttcaggacgaataatttatggtcagtgaaaatccaggccccagtgagattcgagtgggctgtaaaatcgagagtcctgctcccagtgagtaatggtagtgaatgtttctgtcactttttgcaaccgtccattcatttgatcctcacaactccctgtcctgagccaggaccggccactgccactcccagggaaacagaggctgtcaagaggctccacagattgggccccactggatcattgaacccctgttccctgagttctagaggaagaattgtacctgtctcagtcccggccacctccagaaggcctccctctgcatttctgactttgctgtgccggcagcctggagcctcccaggtccctgctgtcatcttttctagccactacagtctctgtctttcctttcacagccccaagcttcttgaaaggcctgtctacacttgctgtcttccttcctcacctccaatttcctcttcaacccactgcttcctgactcgctctactccgtggaagcacgctcacaaaggtaaagacttttctgtggcttaatccttgtcatgttttcggctcatggacacaaggacacattttcatgccttctctcacagggctctgcgtctccggttcacttctgtgtctttacactcccttcacagagacacttgctcccccttctctcgttcttagcatcccctaggaacttgcacacccaggtctctcgacttctggacctgcttcttaccatgccgtcttaagcagtcaggagtcgctgcctgggttcgagtcctagttaaattacttagtgctgagaccttggggtaggtaaacttttccaagccaggtttatctcagtttcaaaatagggttaatcgtctttatctggcaggtcaggtgggatgtctcacaggtaagcaccagatgccatttgaaaggcttgaagcaaagtcaataaagcattcatgggaaaatacaactggaggcaccactagattttcgtatacattaggttcccacggggaggaccgaagagagaagaaagaagtggaaagggaggagcgtgcaggagagacaggagaagagaataactaaacaaagacattaaagacaaaaaaaaagtaggaaagggagacttagaaaatattaaaagccaccaaaaacacatccaaagacggtttccccttacgttagttgggctaaaagaaagcaaatgggaagaaggttttaaattgattatcccagtgacaaatcccaggaagctttcacatcaaatcaccctattctgggtttttaactccttccatcgagtttaacctctttacctcccacatcctggtaaaccctgccccctccctaccgccccctttgctggtgattaaatcctgaaggtacacgaagtatttcagtgaatgaatggctaacagaaaagggcctcccctcccccttaccctggcggtgtttttcagttttattccactttccgcccttttcccttaatgaacacagggctaatctcgggccttgtcgaaggaagaggctgcagacgttaatgaggttagctgctggattccagtattcgtcgcataaggatccttctttgtctgcgaaggaaaaacacactgattatcataatgagtaatgaggtgaactggccaccgccgggccggggcgatgtggcttcttaagccacacttctaattttggtgatggagccgacatttctttggcttctcatttaagtctttgcctctgtcccagtgcgaagtccattcagcggggttgaaagttgcaggcagctttgggaaggggggcgtcggacagggttgcattgtagaaagtggctttgttcgatccttcgcacagatgcaaatggccagagcattcattccctttcttcaagagctgaggactgggggggccactggtgatcagttcccaactctagctctcctctgactcatctcaggacccattgaggacatccaaaactcactcaagatcaccaagtggtaggaaagtactaactcctgggcatagccctaggggagtgactacaatgtgaatactcatggaatgcctagccaggtgaagaagtgaatgcatgttggcatcccagagggaccccccttaagagggcatagtttggggttcagatttgactccagcatactgttgaaattgggcacagggggctagtgattagtcaggatcaatcagtggagaggagattaaaactcacatcctgggctacagagcaagacactatcttagatccaaaaaag

SEQ ID NO: 366331 - DNA, 4466 bp, Homo sapiens
atatcagggtggtttataaagcctgtaaacacacctaagaaaataaacattttacaaatgaaaaaaaaaaaaaaaaaaaaaaaaaagcagagagggagcgcgccttggctcgctggccttggcggcggctcctcaggagagctggggcgcccacgagaggatccctcacccgggtctctcctcagggatgacatcatccgtccacctccttgtcttcaaggaccacctcctctccatgctgagctgctgccaaggggcctgctgcccatctacacctcacgagggcactaggagcacggtttcctggatcccaccaacatacaaagcagccactcactgacccccaggaccaggatggcaaaggatgaagaggaccggaactgaccagccagctgtccctcttacctaaagacttaaaccaatgccctagtgagggggcattgggcattaagccctgacctttgctatgctcatactttgactctatgagtactttcctataagtctttgcttgtgttcacctgctagcaaactggagtgtttccctccccaagggggtgtcagtctttgtcgactgactctgtcatcacccttatgatgtcctgaatggaaggatccctttgggaaattctcaggagggggacctgggccaagggcttggccagcatcctgctggcaactccaaggccctgggtgggcttctggaatgagcatgctactgaatcaccaaaggcacgccccacctctctgaagatcttcctatccttttctgggggaatggggtcgatgagagcaacctcctagggttgttgtgagaattaaatgagataaaagaggcctcaggcaggatctggcatagaggaggtgatcagcaaatgtttgttgaaaaggtttgacaggtcagtcccttcccacccctcttgcttgtcttacttgtcttatttattctccaacagcactccaggcagcccttgtccacgggctctccttgcatcaggtaggggctttgcagagaccatcgacgggctgacttgagtaagaacacgaattatgcatgtggccatttccagagcactttctatgtgatatgaacatgtgatttttatgtaatatgtgtatgtaaacgaggcagcctcatttccaggtgaggatgcatttggtagtgttgatttttgtaatttaaagaagctgaaagggagagaggacccgtgaggactgaactctctgtcccatggggtagggcttacatttacattaaagaaacagaaacttgctgggaggtgtaagtatttggtcacattgctggcaacagaaggggttggagttggacccagggtgccacgctagctgccctcaccccttcttcccctctggcccagagttatactaagagtccttttatttcaaaccaaatgtttgacaatgggacagtctgtttgaaatcccagctgcctggggtggtcttggggggtctgggtggccccagtgctggtaccatgtgctggcttcaccttttaataacagtgtgaccttaaacaagtcgcttaactactctaagtttcagtttctttcatggtctaaatggagattaaaacacacacacacacacacacacacacacacacacacacacaccctcgtgtatctaccccacagggcgcttttgaagaccaaatgctgtaactactatgaaagtgctttgtaaattgctgtggaaagtgtgagctactcaagcacccgaggctgtccctccttgctcacatgtccagcccaattctcccttagtgagaacagcactcagtaggtgctgtgtgtgtttgtgttcaattaagaaattccagaataaataaaaatgaattaattcaacaaacattttctggggcaccgacaatctgcccagtgcaccaggctaggtatctgatacaaagataatgaaaacagtctcttggaacctaattggggtcctcatttgaccaggaatttctttcgtcccgttttaagccaaccagttttgtccggacaagacaaaaacaacttgggctgctttagagaagcccagctcagtgtagacaatagctgcccagcctctgaaaggggctgattggattatgtggcaaatggaggtgcaaggatgacttggacggtgacaaatgaagtgggcggagacctgctttgagttaatccaggctattaggaggggaccttttgtcttccagagactggcaggagcttttaccagtggtttttacatccttaatgttcaggacgaataatttatggtcagtgaaaatccaggccccagtgagattcgagtgggctgtaaaatcgagagtcctgctcccagtgagtaatggtagtgaatgtttctgtcactttttgcaaccgtccattcatttgatcctcacaactccctgtcctgagccaggaccggccactgccactcccagggaaacagaggctgtcaagaggctccacagattgggccccactggatcattgaacccctgttccctgagttctagaggaagaattgtacctgtctcagtcccggccacctccagaaggcctccctctgcatttctgactttgctgtgccggcagcctggagcctcccaggtccctgctgtcatcttttctagccactacagtctctgtctttcctttcacagccccaagcttcttgaaaggcctgtctacacttgctgtcttccttcctcacctccaatttcctcttcaacccactgcttcctgactcgctctactccgtggaagcacgctcacaaaggtaaagacttttctgtggcttaatccttgtcatgttttcggctcatggacacaaggacacattttcatgccttctctcacagggctctgcgtctccggttcacttctgtgtctttacactcccttcacagagacacttgctcccccttctctcgttcttagcatcccctaggaacttgcacacccaggtctctcgacttctggacctgcttcttaccatgccgtcttaagcagtcaggagtcgctgcctgggttcgagtcctagttaaattacttagtgctgagaccttggggtaggtaaacttttccaagccaggtttatctcagtttcaaaatagggttaatcgtctttatctggcaggtcaggtgggatgtctcacaggtaagcaccagatgccatttgaaaggcttgaagcaaagtcaataaagcattcatgggaaaatacaactggaggcaccactagattttcgtatacattaggttcccacggggaggaccgaagagagaagaaagaagtggaaagggaggagcgtgcaggagagacaggagaagagaataactaaacaaagacattaaagacaaaaaaaaagtaggaaagggagacttagaaaatattaaaagccaccaaaaacacatccaaagacggtttccccttacgttagttgggctaaaagaaagcaaatgggaagaaggttttaaattgattatcccagtgacaaatcccaggaagctttcacatcaaatcaccctattctgggtttttaactccttccatcgagtttaacctctttacctcccacatcctggtaaaccctgccccctccctaccgccccctttgctggtgattaaatcctgaaggtacacgaagtatttcagtgaatgaatggctaacagaaaagggcctcccctcccccttaccctggcggtgtttttcagttttattccactttccgcccttttcccttaatgaacacagggctaatctcgggccttgtcgaaggaagaggctgcagacgttaatgaggttagctgctggattccagtattcgtcgcataaggatccttctttgtctgcgaaggaaaaacacactgattatcataatgagtaatgaggtgaactggccaccgccgggccggggcgatgtggcttcttaagccacacttctaattttggtgatggagccgacatttctttggcttctcatttaagtctttgcctctgtcccagtgcgaagtccattcagcggggttgaaagttgcaggcagctttgggaaggggggcgtcggacagggttgcattgtagaaagtggctttgttcgatccttcgcacagatgcaaatggccagagcattcattccctttcttcaagagctgaggactgggggggccactggtgatcagttcccaactctagctctcctctgactcatctcaggacccattgaggacatccaaaactcactcaagatcaccaagtggtaggaaagtactaactcctgggcatagccctaggggagtgactacaatgtgaatactcatggaatgcctagccaggtgaagaagtgaatgcatgttggcatcccagagggaccccccttaagagggcatagtttggggttcagatttgactccagcatactgcactctagcctgggcagcagagcaagactccgcctcaa

SEQ ID NO: 366332 - DNA, 3365 bp, Homo sapiens
atatcagggtggtttataaagcctgtaaacacacctaagaaaataaacattttacaaatgaaaaaaaaaaaaaaaaaaaaaaaaaagcagagagggagcgcgccttggctcgctggccttggcggcggctcctcaggagagctggggcgcccacgagaggatccctcacccgggtctctcctcagggatgacatcatccgtccacctccttgtcttcaaggaccacctcctctccatgctgagctgctgccaaggggcctgctgcccatctacacctcacgagggcactaggagcacggtttcctggatcccaccaacatacaaagcagccactcactgacccccaggaccaggatggcaaaggatgaagaggaccggaactgaccagccagctgtccctcttacctaaagacttaaaccaatgccctagtgagggggcattgggcattaagccctgacctttgctatgctcatactttgactctatgagtactttcctataagtctttgcttgtgttcacctgctagcaaactggagtgtttccctccccaagggggtgtcagtctttgtcgactgactctgtcatcacccttatgatgtcctgaatggaaggatccctttgggaaattctcaggagggggacctgggccaagggcttggccagcatcctgctggcaactccaaggccctgggtgggcttctggaatgagcatgctactgaatcaccaaaggcacgccccacctctctgaagatcttcctatccttttctgggggaatggggtcgatgagagcaacctcctagggttgttgtgagaattaaatgagataaaagaggcctcaggcaggatctggcatagaggaggtgatcagcaaatgtttgttgaaaaggtttgacaggtcagtcccttcccacccctcttgcttgtcttacttgtcttatttattctccaacagcactccaggcagcccttgtccacgggctctccttgcatcaggtaggggctttgcagagaccatcgacgggctgacttgagtaagaacacgaattatgcatgtggccatttccagagcactttctatgtgatatgaacatgtgatttttatgtaatatgtgtatgtaaacgaggcagcctcatttccaggtgaggatgcatttggtagtgttgatttttgtaatttaaagaagctgaaagggagagaggacccgtgaggactgaactctctgtcccatggggtagggcttacatttacattaaagaaacagaaacttgctgggaggtgtaagtatttggtcacattgctggcaacagaaggggttggagttggacccagggtgccacgctagctgccctcaccccttcttcccctctggcccagagttatactaagagtccttttatttcaaaccaaatgtttgacaatgggacagtctgtttgaaatcccagctgcctggggtggtcttggggggtctgggtggccccagtgctggtaccatgtgctggcttcaccttttaataacagtgtgaccttaaacaagtcgcttaactactctaagtttcagtttctttcatggtctaaatggagattaaaacacacacacacacacacacacacacacacacacacacacaccctcgtgtatctaccccacagggcgcttttgaagaccaaatgctgtaactactatgaaagtgctttgtaaattgctgtggaaagtgtgagctactcaagcacccgaggctgtccctccttgctcacatgtccagcccaattctcccttagtgagaacagcactcagtaggtgctgtgtgtgtttgtgttcaattaagaaattccagaataaataaaaatgaattaattcaacaaacattttctggggcaccgacaatctgcccagtgcaccaggctaggtatctgatacaaagataatgaaaacagtctcttggaacctaattggggtcctcatttgaccaggaatttctttcgtcccgttttaagccaaccagttttgtccggacaagacaaaaacaacttgggctgctttagagaagcccagctcagtgtagacaatagctgcccagcctctgaaaggggctgattggattatgtggcaaatggaggtgcaaggatgacttggacggtgacaaatgaagtgggcggagacctgctttgagttaatccaggctattaggaggggaccttttgtcttccagagactggcaggagcttttaccagtggtttttacatccttaatgttcaggacgaataatttatggtcagtgaaaatccaggccccagtgagattcgagtgggctgtaaaatcgagagtcctgctcccagtgagtaatggtagtgaatgtttctgtcactttttgcaaccgtccattcatttgatcctcacaactccctgtcctgagccaggaccggccactgccactcccagggaaacagaggctgtcaagaggctccacagattgggccccactggatcattgaacccctgttccctgagttctagaggaagaattgtacctgtctcagtcccggccacctccagaaggcctccctctgcatttctgactttgctgtgccggcagcctggagcctcccaggtccctgctgtcatcttttctagccactacagtctctgtctttcctttcacagccccaagcttcttgaaaggcctgtctacacttgctgtcttccttcctcacctccaatttcctcttcaacccactgcttcctgactcgctctactccgtggaagcacgctcacaaaggtaaagacttttctgtggcttaatccttgtcatgttttcggctcatggacacaaggacacattttcatgccttctctcacagggctctgcgtctccggttcacttctgtgtctttacactcccttcacagagacacttgctcccccttctctcgttcttagcatcccctaggaacttgcacacccaggtctctcgacttctggacctgcttcttaccatgccgtcttaagcagtcaggagtcgctgcctgggttcgagtcctagttaaattacttagtgctgagaccttggggtaggtaaacttttccaagccaggtttatctcagtttcaaaatagggttaatcgtctttatctggcaggtcaggtgggatgtctcacaggtaagcaccagatgccatttgaaaggcttgaagcaaagtcaataaagcattcatgggaaaatacaactggaggcaccactagattttcgtatacattaggttcccacggggaggaccgaagagagaagaaagaagtggaaagggaggagcgtgcaggagagacaggagaagagaataactaaacaaagacattaaagac

SEQ ID NO: 366333 - DNA, 3739 bp, Homo sapiens
atatcagggtggtttataaagcctgtaaacacacctaagaaaataaacattttacaaatgaaaaaaaaaaaaaaaaaaaaaaaaaagcagagagggagcgcgccttggctcgctggccttggcggcggctcctcaggagagctggggcgcccacgagaggatccctcacccgggtctctcctcagggatgacatcatccgtccacctccttgtcttcaaggaccacctcctctccatgctgagctgctgccaaggggcctgctgcccatctacacctcacgagggcactaggagcacggtttcctggatcccaccaacatacaaagcagccactcactgacccccaggaccaggatggcaaaggatgaagaggaccggaactgaccagccagctgtccctcttacctaaagacttaaaccaatgccctagtgagggggcattgggcattaagccctgacctttgctatgctcatactttgactctatgagtactttcctataagtctttgcttgtgttcacctgctagcaaactggagtgtttccctccccaagggggtgtcagtctttgtcgactgactctgtcatcacccttatgatgtcctgaatggaaggatccctttgggaaattctcaggagggggacctgggccaagggcttggccagcatcctgctggcaactccaaggccctgggtgggcttctggaatgagcatgctactgaatcaccaaaggcacgccccacctctctgaagatcttcctatccttttctgggggaatggggtcgatgagagcaacctcctagggttgttgtgagaattaaatgagataaaagaggcctcaggcaggatctggcatagaggaggtgatcagcaaatgtttgttgaaaaggtttgacaggtcagtcccttcccacccctcttgcttgtcttacttgtcttatttattctccaacagcactccaggcagcccttgtccacgggctctccttgcatcaggtaggggctttgcagagaccatcgacgggctgacttgagtaagaacacgaattatgcatgtggccatttccagagcactttctatgtgatatgaacatgtgatttttatgtaatatgtgtatgtaaacgaggcagcctcatttccaggtgaggatgcatttggtagtgttgatttttgtaatttaaagaagctgaaagggagagaggacccgtgaggactgaactctctgtcccatggggtagggcttacatttacattaaagaaacagaaacttgctgggaggtgtaagtatttggtcacattgctggcaacagaaggggttggagttggacccagggtgccacgctagctgccctcaccccttcttcccctctggcccagagttatactaagagtccttttatttcaaaccaaatgtttgacaatgggacagtctgtttgaaatcccagctgcctggggtggtcttggggggtctgggtggccccagtgctggtaccatgtgctggcttcaccttttaataacagtgtgaccttaaacaagtcgcttaactactctaagtttcagtttctttcatggtctaaatggagattaaaacacacacacacacacacacacacacacacacacacacacaccctcgtgtatctaccccacagggcgcttttgaagaccaaatgctgtaactactatgaaagtgctttgtaaattgctgtggaaagtgtgagctactcaagcacccgaggctgtccctccttgctcacatgtccagcccaattctcccttagtgagaacagcactcagtaggtgctgtgtgtgtttgtgttcaattaagaaattccagaataaataaaaatgaattaattcaacaaacattttctggggcaccgacaatctgcccagtgcaccaggctaggtatctgatacaaagataatgaaaacagtctcttggaacctaattggggtcctcatttgaccaggaatttctttcgtcccgttttaagccaaccagttttgtccggacaagacaaaaacaacttgggctgctttagagaagcccagctcagtgtagacaatagctgcccagcctctgaaaggggctgattggattatgtggcaaatggaggtgcaaggatgacttggacggtgacaaatgaagtgggcggagacctgctttgagttaatccaggctattaggaggggaccttttgtcttccagagactggcaggagcttttaccagtggtttttacatccttaatgttcaggacgaataatttatggtcagtgaaaatccaggccccagtgagattcgagtgggctgtaaaatcgagagtcctgctcccagtgagtaatggtagtgaatgtttctgtcactttttgcaaccgtccattcatttgatcctcacaactccctgtcctgagccaggaccggccactgccactcccagggaaacagaggctgtcaagaggctccacagattgggccccactggatcattgaacccctgttccctgagttctagaggaagaattgtacctgtctcagtcccggccacctccagaaggcctccctctgcatttctgactttgctgtgccggcagcctggagcctcccaggtccctgctgtcatcttttctagccactacagtctctgtctttcctttcacagccccaagcttcttgaaaggcctgtctacacttgctgtcttccttcctcacctccaatttcctcttcaacccactgcttcctgactcgctctactccgtggaagcacgctcacaaaggcacgtgggccgtggcccggctgggtcggctgaagaactgcggatggaagctgcggaagaggccctgatggggcccaccatcccggacccaagtcttcttcctggcgggcctctcgtctccttcctggtttgggcggaagccatcacctggatgcctacgtgggaagggacctcgaatgtgggaccccagcccctctccagctcgaaatccctccacagccacggggacaccctgcacctattcccacgggacaggctggacccagagactctggacccggggcctccccttgagtagagacccgccctctgactgatggacgccgctgacctggggtcagacccgtgggctggacccctgcccaccccgcaggaaccctgaggcctaggggagctgttgagccttcagtgtctgcatgtgggaagtgggctccttcacctacctcacagggctgttgtgaggggcgctgtgatgcggttccaaagcacagggcttggcgcaccccactgtgctctcaataaatgtgtttcctgtcttaacaaaaaaaaaacaaaaaaacaaagaacgaaaagagcacaacagacgaagaacagaaaaagaaagggggggggcgccgccaaagaaccccccggggggcgcccgagtaggggacccggcgtttgcgtacgaggggggccccaaaagaggcaccagctatataaaagcgaggacgcgggcggccgcggcttaaaccgagggggggggaggcgaaaaaccggcgactgggacaacacttgtgtgaggagaaaccccatatgggaggggggcacacattgtgggggacaactccccgaagagaatattatgcgctcgtgggggacatattcaccttgagggttatcggtgttaacgcagcgaggtaatgcgcggcgcgagacaatgtgtccacggcagtgtattgagacaatttccgg

SEQ ID NO: 366334 - DNA, 656 bp, Homo sapiens
agttctggatttggggctgcccctaacccagcccgttgctgctttgcaccttttcctgtcattgggcatcccccagtagtcaccccactccaccgaaaagtaaactgcaggcacgtgggccgtggcccggctgggtcggctgaagaactgcggatggaagctgcggaagaggccctgatggggcccaccatcccggacccaagtcttcttcctggcgggcctctcgtctccttcctggtttgggcggaagccatcacctggatgcctacgtgggaagggacctcgaatgtgggaccccagcccctctccagctcgaaatccctccacagccacggggacaccctgcacctattcccacgggacaggctggacccagagactctggacccggggcctccccttgagtagagacccgccctctgactgatggacgccgctgacctggggtcagacccgtgggctggacccctgcccaccccgcaggaaccctgaggcctaggggagctgttgagccttcagtgtctgcatgtgggaagtgggctccttcacctacctcacagggctgttgtgaggggcgctgtgatgcggttccaaagcacagggcttggcgcaccccactgtgctctcaataaatgtgtttcctgtcttaacaaaaa

SEQ ID NO: 366335 - DNA, 403 bp, Homo sapiens
atatcagggtggtttataaagcctgtaaacacacctaagaaaataaacattttacaaatgaaaaaaaaaaaaaaaaaaaaaaaaaagcagagagggagcgcgccttggctcgctggccttggcggcggctcctcaggagagctggggcgcccacgagaggatccctcacccgggtctctcctcagggatgacatcatccgtccacctccttgtcttcaaggaccacctcctctccatgctgagctgctgccaaggggcctgctgcccatctacacctcacggtacttcaaccctcctgctatcatttcataaccaacgtggcgggcagaatctcccaaccccaccaccatccttgcaccacccccagacccactagcaattaaaagacaattttaaattttaa

SEQ ID NO: 366336 - DNA, 451 bp, Homo sapiens
cctgatagctgcatcaaacccactattatccagccacatggaaccattacattctctgaaaacacctcttgctttttcccctattttgctcacactattacacgacctgaagtgtcctttattcctctttaaggacctccacatgggtgccccctccaagagttgcctgccccgcatgaccatcccacattcagctcgctctaccctctctgcttggggactctcttccactctccttgctttagctccaccattaggctgatggttccgaaatctttttctagcctatgtttctatcacgaactttgattcagattcccagtttcttgtgggactgcttcatctagatgtctcactggagcttccaactcaacatgaccaaagctgaactcatcacctaacccccaaacctgctttctccttatttggtggcaacaccatccatctactc

SEQ ID NO: 366337 - DNA, 1047 bp, Homo sapiens
  misc_feature (95)..(95): n is a, c, g, or t
  misc_feature (107)..(107): n is a, c, g, or t
  misc_feature (117)..(117): n is a, c, g, or t
  misc_feature (126)..(126): n is a, c, g, or t
  misc_feature (1023)..(1024): n is a, c, g, or t
cccccccccagaagcgttttttaaaaccccctacgccgagagccaccaacaaccggaggagaaaaaacggcgcagagaagaaagaccaaaaaaanggccggccaggncacacctaanccacgccancggcaacttgagccccggagttcaagaccagcttgggcaacatggcaaaaccctgtctctacaaaaaatacaaaaattagctaggcatggtggtgtgcaccagtatttctagctactcaggaggctgaggtgggagaatcacccgagcccgagaaggttgaggctgcagtgagccatgattgtgccattgcactcccgcctggggaagagtgagaccgtcttaaaacaagcaaacaaaaaaccatcaaggaatagtcatgaaaacatgttcatattgagacatggaggtaaatacaaacaaatcagccaagagttggacagactactgtgaggcaaggaaagtggggtaaaggcagggtaggagggctactgtttttcataataaaccttatggaacaacttgttttcaatctgcgtcaactgattttcccccctaagatgcaggatataaaactgtttacaaagctacatattttaggttgatcccccttcacttttcagatctaggtagggttatagccagtttccattgcgtggagaatctgcaaggctggtgttcctgtacgggtccagagtgaactacatcaaaagtcgcttttgatatcgaggatgcagttcactactattaagtgtaatgtgttattactcaaagtaagtactgtttactgtaaaagtatgatgaattcagtaatgattatactaaaataacatactagtacagggtcaaaatacggctttaggtctacttaagatagaatacttaagaattacttatctggggaccagggaattgtttaaaatgcagattcctgggccccactccaggtgtgcggcttgcagtcttcatttctaataagatccttagttgatgttgaaaaccactgctttcatttgtcnnccccagcctcgctaacctagcct

SEQ ID NO: 366338 - DNA, 1900 bp, Homo sapiens
tttttgagacagagtcttgctctgttgcccaggctggagtgcagtggcgcgatctcagctcactgcaatcccgcctggggaagagtgagaccgtcttaaaacaagcaaacaaaaaaccatcaaggaatagtcatgaaaacatgttcatattgagacatggaggtaaatacaaacaaatcagccaagagttggacagactactgtgaggcaaggaaagtggggtaaaggcagggtaggagggctactgtttttcataataaaccttatggaacaacttgttttcaatctgcgtcaactgattttcccccctaagatgcaggatataaaactgtttacaaagctacatattttaggttgatcccccttcacttttcagatctaggtagggttatagccagtttccattgcgtggagaatctgcaaggctggtgttcctgtacgggtccagagtgaactacatcaaaagtcgcttttgatatcgaggatgcagttcactactattaagtgtaatgtgttattactcaaagtaagtactgtttactgtaaaagtatgatgaattcagtaatgattatactaaaataacatactagtacagggtcaaaatacggctttaggtctacttaagatagaatacttaagaattacttatctggggaccagggaattgtttaaaatgcagattcctgggccccactccaggtgtgcggcttgcagtcttcatttctaataagatccttagttgatgttgaaaaccactgctttcatttgttttttatttaagagacagggtctcactgtcatccaggctggagtgcagtggtgcaattatagctcactgcagccttaatctcctgggctcatgtggtcgtcctgcctcaacctccaggatagctgggactgcaggcatcagctgtgcccagctacttttcaattttttgtagagatgcggtcttggttaacaaagcttaacagcccaggctagtctcaaactcctaggttcaagtgatcctcccgcctcgacctcccaaagtgctggcattataggcgtggggcaccatgtttggcctgaagccctattttaaacgtctattgtatctgaccaactcactgatgcttattcctcagaataccagctctgtaacctccaggtagtatcataagacaaagcttattagaacctcattaattgatgccaggttaactaatgtgctggatttttttcccctcctctttcattacttgaataatctgttcaatgagcaatattctaaaagccaataattgatcagttttcctcttgatggcttatgctgtagctcataccataatgaatacctggcaagacctctttttggtgatttgattttttcaggctgcttttccagtttctgtgtttttgtcacaattattcaccctgtgtatcttatactctttactactacttatttttctttaaagacaaagtcttgctcttttgcccaggctggagtacagtggcaaggtcatagctcactgcagcctcatactcccaggctcaagtgatcctcccacctcagcctccctagtagcgaggactacaggtgtgcaccaccatgccaagttaatttttaaaattttttgtagagacagggtctcaccatgtctcgcgggctggttttgaactcctctcaaacaatcctctacctcagcctcccagagtgctggaagcaagccactgtgctgagctgctggtcacccttcctacattaacaactatggatgtgccaatcaatgctgagatgctctgatatgctcccaagaatctgtttccacaaatcaccacaaaactacttgttgtagccagtatacgagccaaggaagctggccactaggatcccctgaattatcttttttttttga

SEQ ID NO: 366339 - DNA, 964 bp, Homo sapiens
tcccccgccctgttttattctcctcctgtggcccgcgggagagcccccttgccctctgatcccccccttgggagtttctccaaaccccggtgtcccccacgcggtttttatatgggtgaaaggcgcccgccccactgtgttgctgtgcccacggtgtcctcctttgggacccgacgctatggcccgcgtgacaagcataccccatctgggtccacgcccccctcaccacacggtggtgtactaaaaacctctttctcacgggcccgcgccgccccacacaactgttttttttttttttttttttcttttttctttgtttttttaaaaagtttaatcacatcttaataatttgacactgaatatgatctaaccagaattacaatatcagggagatgggtgagaggaagtaaattcatggtgggcaggaggaagagaggattcaaaagataatggtggccgggtgcagtggctcacacctataatcccagcaggccgaggcgggcagatcacttgagccccggagttcaagaccagcttgggcaacatggcaaaaccctgtctctacaaaaaatacaaaaattagctaggcatggtggtgtgcaccagtatttctagctactcaggaggctgaggtgggagaatcacccgagcccgagaaggttgaggctgcagtgagccatgattgtgccattgcactcccgcctggggaagagtgagaccgtcttaaaacaagcaaacaaaaaaccatcaaggaatagtcatgaaaacatgttcatattgagacatggaggtaaatacaaacaaatcagccaagagttggacagactactgtgaggcaaggaaagtggggtaaaggcagggtaggagggctactgtttttcataataaaccttatggaacaaagataaatggaaaaacaggagtgggaggtagaagaaggaataaaacaaagaactgacattcc

SEQ ID NO: 366340 - DNA, 959 bp, Homo sapiens
tcccccgccctgttttattctcctcctgtggcccgcgggagagcccccttgccctctgatcccccccttgggagtttctccaaaccccggtgtcccccacgcggtttttatatgggtgaaaggcgcccgccccactgtgttgctgtgcccacggtgtcctcctttgggacccgacgctatggcccgcgtgacaagcataccccatctgggtccacgcccccctcaccacacggtggtgtactaaaaacctctttctcacgggcccgcgccgccccacacaactgttttttttttttttttttttcttttttctttgtttttttaaaaagtttaatcacatcttaataatttgacactgaatatgatctaaccagaattacaatatcagggagatgggtgagaggaagtaaattcatggtgggcaggaggaagagaggattcaaaagataatggtggccgggtgcagtggctcacacctataatcccagcaggccgaggcgggcagatcacttgagccccggagttcaagaccagcttgggcaacatggcaaaaccctgtctctacaaaaaatacaaaaattagctaggcatggtggtgtgcaccagtatttctagctactcaggaggctgaggactacaggtgtgcaccaccatgccaagttaatttttaaaattttttgtagagacagggtctcaccatgtctcgcgggctggttttgaactcctctcaaacaatcctctacctcagcctcccagagtgctggaagcaagccactgtgctgagctgctggtcacccttcctacattaacaactatggatgtgccaatcaatgctgagatgctctgatatgctcccaagaatctgtttccacaaatcaccacaaaactacttgttgtagccagtatacgagccaaggaagctggccactaggatcccctgaattatcttttttttttga

SEQ ID NO: 366341 - DNA, 1363 bp, Homo sapiens
tcccccgccctgttttattctcctcctgtggcccgcgggagagcccccttgccctctgatcccccccttgggagtttctccaaaccccggtgtcccccacgcggtttttatatgggtgaaaggcgcccgccccactgtgttgctgtgcccacggtgtcctcctttgggacccgacgctatggcccgcgtgacaagcataccccatctgggtccacgcccccctcaccacacggtggtgtactaaaaacctctttctcacgggcccgcgccgccccacacaactgttttttttttttttttttttcttttttctttgtttttttaaaaagtttaatcacatcttaataatttgacactgaatatgatctaaccagaattacaatatcagggagatgggtgagaggaagtaaattcatggtgggcaggaggaagagaggattcaaaagataatggtggccgggtgcagtggctcacacctataatcccagcaggccgaggcgggcagatcgcgtggggcaccatgtttggcctgaagccctattttaaacgtctattgtatctgaccaactcactgatgcttattcctcagaataccagctctgtaacctccaggtagtatcataagacaaagcttattagaacctcattaattgatgccaggttaactaatgtgctggatttttttcccctcctctttcattacttgaataatctgttcaatgagcaatattctaaaagccaataattgatcagttttcctcttgatggcttatgctgtagctcataccataatgaatacctggcaagacctctttttggtgatttgattttttcaggctgcttttccagtttctgtgtttttgtcacaattattcaccctgtgtatcttatactctttactactacttatttttctttaaagacaaagtcttgctcttttgcccaggctggagtacagtggcaaggtcatagctcactgcagcctcatactcccaggctcaagtgatcctcccacctcagcctccctagtagcgaggactacaggtgtgcaccaccatgccaagttaatttttaaaattttttgtagagacagggtctcaccatgtctcgcgggctggttttgaactcctctcaaacaatcctctacctcagcctcccagagtgctggaagcaagccactgtgctgagctgctggtcacccttcctacattaacaactatggatgtgccaatcaatgctgagatgctctgatatgctcccaagaatctgtttccacaaatcaccacaaaactacttgttgtagccagtatacgagccaaggaagctggccactaggatcccctgaattatcttttttttttga

SEQ ID NO: 366342 - DNA, 2528 bp, Homo sapiens
tcccccgccctgttttattctcctcctgtggcccgcgggagagcccccttgccctctgatcccccccttgggagtttctccaaaccccggtgtcccccacgcggtttttatatgggtgaaaggcgcccgccccactgtgttgctgtgcccacggtgtcctcctttgggacccgacgctatggcccgcgtgacaagcataccccatctgggtccacgcccccctcaccacacggtggtgtactaaaaacctctttctcacgggcccgcgccgccccacacaactgttttttttttttttttttttcttttttctttgtttttttaaaaagtttaatcacatcttaataatttgacactgaatatgatctaaccagaattacaatatcagggagatgggtgagaggaagtaaattcatggtgggcaggaggaagagaggattcaaaagataatggtggccgggtgcagtggctcacacctataatcccagcaggccgaggcgggcagatcacttgagccccggagttcaagaccagcttgggcaacatggcaaaaccctgtctctacaaaaaatacaaaaattagctaggcatggtggtgtgcaccagtatttctagctactcaggaggctgaggtgggagaatcacccgagcccgagaaggttgaggctgcagtgagccatgattgtgccattgcactcccgcctggggaagagtgagaccgtcttaaaacaagcaaacaaaaaaccatcaaggaatagtcatgaaaacatgttcatattgagacatggaggtaaatacaaacaaatcagccaagagttggacagactactgtgaggcaaggaaagtggggtaaaggcagggtaggagggctactgtttttcataataaaccttatggaacaacttgttttcaatctgcgtcaactgattttcccccctaagatgcaggatataaaactgtttacaaagctacatattttaggttgatcccccttcacttttcagatctaggtagggttatagccagtttccattgcgtggagaatctgcaaggctggtgttcctgtacgggtccagagtgaactacatcaaaagtcgcttttgatatcgaggatgcagttcactactattaagtgtaatgtgttattactcaaagtaagtactgtttactgtaaaagtatgatgaattcagtaatgattatactaaaataacatactagtacagggtcaaaatacggctttaggtctacttaagatagaatacttaagaattacttatctggggaccagggaattgtttaaaatgcagattcctgggccccactccaggtgtgcggcttgcagtcttcatttctaataagatccttagttgatgttgaaaaccactgctttcatttgttttttatttaagagacagggtctcactgtcatccaggctggagtgcagtggtgcaattatagctcactgcagccttaatctcctgggctcatgtggtcgtcctgcctcaacctccaggatagctgggactgcaggcatcagctgtgcccagctacttttcaattttttgtagagatgcggtcttggttaacaaagcttaacagcccaggctagtctcaaactcctaggttcaagtgatcctcccgcctcgacctcccaaagtgctggcattataggcgtggggcaccatgtttggcctgaagccctattttaaacgtctattgtatctgaccaactcactgatgcttattcctcagaataccagctctgtaacctccaggtagtatcataagacaaagcttattagaacctcattaattgatgccaggttaactaatgtgctggatttttttcccctcctctttcattacttgaataatctgttcaatgagcaatattctaaaagccaataattgatcagttttcctcttgatggcttatgctgtagctcataccataatgaatacctggcaagacctctttttggtgatttgattttttcaggctgcttttccagtttctgtgtttttgtcacaattattcaccctgtgtatcttatactctttactactacttatttttctttaaagacaaagtcttgctcttttgcccaggctggagtacagtggcaaggtcatagctcactgcagcctcatactcccaggctcaagtgatcctcccacctcagcctccctagtagcgaggactacaggtgtgcaccaccatgccaagttaatttttaaaattttttgtagagacagggtctcaccatgtctcgcgggctggttttgaactcctctcaaacaatcctctacctcagcctcccagagtgctggaagcaagccactgtgctgagctgctggtcacccttcctacattaacaactatggatgtgccaatcaatgctgagatgctctgatatgctcccaagaatctgtttccacaaatcaccacaaaactacttgttgtagccagtatacgagccaaggaagctggccactaggatcccctgaattatcttttttttttga

SEQ ID NO: 366343 - DNA, 1200 bp, Homo sapiens
tcccccgccctgttttattctcctcctgtggcccgcgggagagcccccttgccctctgatcccccccttgggagtttctccaaaccccggtgtcccccacgcggtttttatatgggtgaaaggcgcccgccccactgtgttgctgtgcccacggtgtcctcctttgggacccgacgctatggcccgcgtgacaagcataccccatctgggtccacgcccccctcaccacacggtggtgtactaaaaacctctttctcacgggcccgcgccgccccacacaactgttttttttttttttttttttcttttttctttgtttttttaaaaagtttaatcacatcttaataatttgacactgaatatgatctaaccagaattacaatatcagggagatgggtgagaggaagtaaattcatggtgggcaggaggaagagaggattcaaaagataatggtggccgggtgcagtggctcacacctataatcccagcaggccgaggcgggcagatcacttgagccccggagttcaagaccagcttgggcaacatggcaaaaccctgtctctacaaaaaatacaaaaattagctaggcatggtggtgtgcaccagtatttctagctactcaggaggctgaggtgggagaatcacccgagcccgagaaggttgaggctgcagtgagccatgattgtgccattgcactcccgcctggggaagagtgagaccgtcttaaaacaagcaaacaaaaaaccatcaaggaatagtcatgaaaacatgttcatattgagacatggaggtaaatacaaacaaatcagccaagagttggacagactactgtgaggcaaggaaagtggggtaaaggcagggtaggagggctactgtttttcataataaaccttatggaacaacttgttttcaatctgcgtcaactgattttcccccctaagatgcaggatataaaactgtttacaaagctacatattttaggttgatcccccttcacttttcagatctaggtagggttatagccagtttccattgcgtggagaatctgcaaggctcctcgtgccgaattcggcacgaggcgcaatgctttttttttttttttttttaaataaaaatgctgcaaggtttccgcctctgcgttccccttgtgatggctggcaggtggtctggaagcgtcccggatggcggccaagccgcgct

SEQ ID NO: 366344 - DNA, 1411 bp, Homo sapiens
tcccccgccctgttttattctcctcctgtggcccgcgggagagcccccttgccctctgatcccccccttgggagtttctccaaaccccggtgtcccccacgcggtttttatatgggtgaaaggcgcccgccccactgtgttgctgtgcccacggtgtcctcctttgggacccgacgctatggcccgcgtgacaagcataccccatctgggtccacgcccccctcaccacacggtggtgtactaaaaacctctttctcacgggcccgcgccgccccacacaactgttttttttttttttttttttcttttttctttgtttttttaaaaagtttaatcacatcttaataatttgacactgaatatgatctaaccagaattacaatatcagggagatgggtgagaggaagtaaattcatggtgggcaggaggaagagaggattcaaaagataatggtggccgggtgcagtggctcacacctataatcccagcaggccgaggcgggcagatcgttcaagtgatcctcccgcctcgacctcccaaagtgctggcattataggcgtggggcaccatgtttggcctgaagccctattttaaacgtctattgtatctgaccaactcactgatgcttattcctcagaataccagctctgtaacctccaggtagtatcataagacaaagcttattagaacctcattaattgatgccaggttaactaatgtgctggatttttttcccctcctctttcattacttgaataatctgttcaatgagcaatattctaaaagccaataattgatcagttttcctcttgatggcttatgctgtagctcataccataatgaatacctggcaagacctctttttggtgatttgattttttcaggctgcttttccagtttctgtgtttttgtcacaattattcaccctgtgtatcttatactctttactactacttatttttctttaaagacaaagtcttgctcttttgcccaggctggagtacagtggcaaggtcatagctcactgcagcctcatactcccaggctcaagtgatcctcccacctcagcctccctagtagcgaggactacaggtgtgcaccaccatgccaagttaatttttaaaattttttgtagagacagggtctcaccatgtctcgcgggctggttttgaactcctctcaaacaatcctctacctcagcctcccagagtgctggaagcaagccactgtgctgagctgctggtcacccttcctacattaacaactatggatgtgccaatcaatgctgagatgctctgatatgctcccaagaatctgtttccacaaatcaccacaaaactacttgttgtagccagtatacgagccaaggaagctggccactaggatcccctgaattatcttttttttttga

SEQ ID NO: 366345 - DNA, 676 bp, Homo sapiens
acataacttttattactgtgtattgttataattgttttctcattagttattgttaatttgttactgtgcctaatttataaattaaactttatcataggtatgtatgtaaaggggaaacacagcatatatagggttcagtactcgccaccatttcgggcatccactggggttggaggtcttggaacatccccccatagataaggagtgactatatagcactatagtgtattatggcaattaaaaaccttgtatctgtgaattagacaaaggtgaagagacaattagtgaatgggaagctagatctgaagttttccaaaatgcagcccagcaagataaacagtgataatgtaaagcaagtggctgagagacatggagagtagaatgaagagatccaacgtaaagtgacggagttccaggtgggaaaaaaaaaaaatgaaaatgaggcagaagcaatatttaaaaactggctgagaactttccagaaaaaatcaccaattcacagattcaagaagaccagtaagtctcaggcaggttaataggaagaactatacatccaaatgttctgtttcttcatctgggtgatgattaggtatttttactttatgaatattcattgaactgtatacatgttttatgccctttttgtatgtttattctaagtaagcaaatttactta

SEQ ID NO: 366346 - DNA, 235 bp, Homo sapiens
gggtagacaaattcttctccgttgcttttggtccaagtagggcttctgattaatactgaagagcatttaaaaagtacttttgccgtttcgctctttaaatcagtatagcttatgtcccctgaggagtgtggtttaattattcttggttcatttttaccccaggccaaaagtagaaatgtaaaacatacaagttttatgttatttccagatgttagtgtaagaacattaagtggat

SEQ ID NO: 366347 - DNA, 1804 bp, Homo sapiens
agcaggggccttcgtggccagcagcctgcactctcagaaatcagacttgagtggccggaacccttgagaccagaggcttaccatgctgctccctaggagggccaggaactgctgacgtgaccactggacagttattcgtgtctcttacaattaccaaacagaatggacaagcttaataaaataaccgtccccgccagtcagaagttgaggcagcttcaaaagatggtccatgatattaaaaacaatgaaggtggaataatgaataaaatcaaaaagctaaaagtcaaagcacctccaagtgttcctcgaagggactacgcttcagagagccccgctgacgaagaggagcagtggtccgatgactttgacagcgactatgaaaatccagatgagcactcggactcagagatgtacgtgatgcccgccgaggagaacgctgatgacagctacgagccgcctccagtagagcaggaaaccaggccggttcacccagccctgcccttcgccagaggcgagtatatagacaatcgatcaagccagaggcattccccacccttcagcaagacacttcccagtaagcccagctggccttcagagaaagcaaggctcacctccaccctgccggccctgactgctttgcagaaacctcaagtcccacccaaacccaaaggcctccttgaggatgaggctgattatgtggtccccgtggaagataatgatgaaaactatattcatcccacagaaagcagttcacctccacctgaaaaagctcccatggtgaatagatcaaccaagccaaattcctcaacgcccgcctctcctccaggaacagcttcaggtcgaaacagtggggcctgggaaaccaagtcacctccaccagctgcaccatccccgttgccacgggccgggaaaaaaccaacgacaccactgaagacaactccagttgcctctcaacagaatgcttcaagtgtttgtgaagaaaaacctatacctgctgaacgccaccgagggtcaagtcacagacaagaagctgtgcagtcaccagtgtttcctcctgcccagaaacaaatccaccaaaaacccatacctctgccaagatttacagaagggggaaacccaactgtggatgggcccctacccagcttttcatctaattccactatttcagaacaggaagctggcgttctctgcaagccatggtatgctggagcctgtgatcgaaagtctgctgaagaggcattgcacagatcaaacaaggatggatcatttcttattcggaaaagctctggccatgattccaaacaaccatatacactagttgtattctttaataagcgagtatataatattcctgtgcgatttattgaagcaacaaaacaatatgccttgggcagaaagaaaaatggtgaagagtactttggaagtgttgctgaaatcatcaggaatcatcaacatagtcctttggttcttattgacagtcagaataacacaaaagattccaccagactgaagtatgcagttaaagtttcataaagggggaaaaaaaagatcaataccattgcttcagacactttcccaaagtttctccttttgagaaaaagtcccaaaacttcatattttggattatgaatcatccagtaataaaatggaagatggagtcagctattgaagtggtcatccatttctttttaagaagctcatgtggacttgttctattgcctgacctgatgaactgttaatatctggtgaggttgagttatcatgctactaatattttccaaataaatatttttatttttaaaaa

SEQ ID NO: 366348 - DNA, 535 bp, Homo sapiens
ttgttaaactagatttttttgtgcagaatgtcagctggggtgtaataacttttactaacttgagaatgagagaagatgggaggagtggagctcaaatttaacacaaatgccaaagtataattcatctatgttttcttcctctagtactttggaagtgttgctgaaatcatcaggaatcatcaacatagtcctttggttcttattgacagtcagaataacacaaaagattccaccagactgaagtatgcagttaaagtttcataaagggggaaaaaaaagatcaataccattgcttcagacactttcccaaagtttctccttttgagaaaaagtcccaaaacttcatattttggattatgaatcatccagtaataaaatggaagatggagtcagctattgaagtggtcatccatttctttttaagaagctcatgtggacttgttctattgcctgacctgatgaactgttaatatctggtgaggttgagttatcatgctactaatattttccaaataaatatttttatttttaaaaa

SEQ ID NO: 366349 - DNA, 469 bp, Homo sapiens
agcaggggccttcgtggccagcagcctgcactctcagaaatcagacttgagtggccggaacccttgagaccagaggcttaccatgctgctccctaggagggccaggaactgctgacgtgaccactggacagttattcgtgtctcttacaattaccaaacagaatggacaagcttaataaaataaccgtccccgccagtcagaagttgaggtaagattttccccacccaatacccttcttcatctcctttttttccccccagtgctcttatggcatctcagaaatactgaaatcctggaatgctttgctagtttccagtgggtggcacttactatagggaggtggactgagcttttagggaaagcattgggtggcacttgctatagggaagtgaactgagttcttaaagaaatgtgtaggaacaagagagacttgctttagctgcctcttacaataaagtgtaaagctct

SEQ ID NO: 366350 - DNA, 605 bp, Homo sapiens
agcaggggccttcgtggccagcagcctgcactctcagaaatcagacttgagtggccggaacccttgagaccagaggcttaccatgctgctccctaggagggccaggaactgctgacgtgaccactggacagttattcgtgtctcttacaattaccaaacagaatggacaagcttaataaaataaccgtccccgccagtcagaagttgaggcagcttcaaaagatggtccatgatattaaaaacaatgaaggtggaataatgaataaaatcaaaaagctaaaagtcaaagcacctccaagtgttcctcgaagggactacgcttcagacacctgctccctttcctggaacccttccaaatagtcttgatgtcagaacatttaatctctcctggaatgcagaagtgtggcccaacaggatcttctaagcctttgcaacacaaagtttgattcccagcaagatagcatcaacctcatctggagcttgttagaaatgcagaatcttggccccaccctagaactactggatcagaatttacattttagcaagatctccaggggatctgaatgtaaatcatatttaagaaaccctgctataaaccaccatct

SEQ ID NO: 366351 - DNA, 1640 bp, Homo sapiens
agcaggggccttcgtggccagcagcctgcactctcagaaatcagacttgagtggccggaacccttgagaccagaggcttaccatgctgctccctaggagggccaggaactgctgacgtgaccactggacagttattcgtgtctcttacaattaccaaacagaatggacaagcttaataaaataaccgtccccgccagtcagaagttgaggcagcttcaaaagatggtccatgatattaaaaacaatgaaggtggaataatgaataaaatcaaaaagctaaaagtcaaagcacctccaagtgttcctcgaagggactacgcttcagagagccccgctgacgaagaggagcagtggtccgatgactttgacagcgactatgaaaatccagatgagcactcggactcagagatgtacgtgatgcccgccgaggagaacgctgatgacagctacgagccgcctccagtagagcaggaaaccaggccggttcacccagccctgcccttcgccagaggcgagtatataggctgattatgtggtccccgtggaagataatgatgaaaactatattcatcccacagaaagcagttcacctccacctgaaaaagctcccatggtgaatagatcaaccaagccaaattcctcaacgcccgcctctcctccaggaacagcttcaggtcgaaacagtggggcctgggaaaccaagtcacctccaccagctgcaccatccccgttgccacgggccgggaaaaaaccaacgacaccactgaagacaactccagttgcctctcaacagaatgcttcaagtgtttgtgaagaaaaacctatacctgctgaacgccaccgagggtcaagtcacagacaagaagctgtgcagtcaccagtgtttcctcctgcccagaaacaaatccaccaaaaacccatacctctgccaagatttacagaagggggaaacccaactgtggatgggcccctacccagcttttcatctaattccactatttcagaacaggaagctggcgttctctgcaagccatggtatgctggagcctgtgatcgaaagtctgctgaagaggcattgcacagatcaaacaaggatggatcatttcttattcggaaaagctctggccatgattccaaacaaccatatacactagttgtattctttaataagcgagtatataatattcctgtgcgatttattgaagcaacaaaacaatatgccttgggcagaaagaaaaatggtgaagagtactttggaagtgttgctgaaatcatcaggaatcatcaacatagtcctttggttcttattgacagtcagaataacacaaaagattccaccagactgaagtatgcagttaaagtttcataaagggggaaaaaaaagatcaataccattgcttcagacactttcccaaagtttctccttttgagaaaaagtcccaaaacttcatattttggattatgaatcatccagtaataaaatggaagatggagtcagctattgaagtggtcatccatttctttttaagaagctcatgtggacttgttctattgcctgacctgatgaactgttaatatctggtgaggttgagttatcatgctactaatattttccaaataaatatttttatttttaaaaa

SEQ ID NO: 366352 - DNA, 2170 bp, Homo sapiens
agcaggggccttcgtggccagcagcctgcactctcagaaatcagacttgagtggccggaacccttgagaccagaggcttaccatgctgctccctaggagggccaggaactgctgacgtgaccactggacagttattcgtgtctcttacaattaccaaacagaatggacaagcttaataaaataaccgtccccgccagtcagaagttgaggcagcttcaaaagatggtccatgatattaaaaacaatgaaggtggaataatgaataaaatcaaaaagctaaaagtcaaagcacctccaagtgttcctcgaagggactacgcttcagagagccccgctgacgaagaggagcagtggtccgatgactttgacagcgactatgaaaatccagatgagcactcggactcagagatgtacgtgatgcccgccgaggagaacgctgatgacagctacgagccgcctccagtagagcaggaaaccaggccggttcacccagccctgcccttcgccagaggcgagtatatagacaatcgatcaagccagaggcattccccacccttcagcaagacacttcccagtaagcccagctggccttcagagaaagcaaggctcacctccaccctgccggccctgactgctttgcagaaacctcaagtcccacccaaacccaaaggcctccttgaggatgaggctgattatgtggtccccgtggaagataatgatgaaaactatattcatcccacagaaagcagttcacctccacctgaaaaaggtcgaaacagtggggcctgggaaaccaagtcacctccaccagctgcaccatccccgttgccacgggccgggaaaaaaccaacgacaccactgaagacaactccagttgcctctcaacagaatgcttcaagtgtttgtgaagaaaaacctatacctgctgaacgccaccgagggtcaagtcacagacaagaagctgtgcagtcaccagtgtttcctcctgcccagaaacaaatccaccaaaaacccatacctctgccaagatttacagaagggggaaacccaactgtggatgggcccctacccagcttttcatctaattccactatttcagaacaggaagctggcgttctctgcaagccatggtatgctggagcctgtgatcgaaagtctgctgaagaggcattgcacagatcaaacaaggatggatcatttcttattcggaaaagctctggccatgattccaaacaaccatatacactagttgtattctttaataagcgagtatataatattcctgtgcgatttattgaagcaacaaaacaatatgccttgggcagaaagaaaaatggtgaagagtactttggaagtgttgctgaaatcatcaggaatcatcaacatagtcctttggttcttattgacagtcagaataacacaaaagattccaccagactgaagtatgcagttaaagtttcataaagggggaaaaaaaagatcaataccattgcttcagacactttcccaaagtttctccttttgagaaaaagtcccaaaacttcatattttggattatgaatcatccagtaataaaatggaagatggagtcagctattgaagtggtcatccatttctttttaagaagctcatgtggacttgttctattgcctgacctgatgaactgttaatatctggtgaggttgagttatcatgctactaatattttccaaataaatatttttatttttaaaaataagtgtaaagtatattatcaaaataagaaaataatgctcttgcataaaacaaagtggctggaaatttaaacctccacaatgatcattggtacactaatgtagctgggctctccactgccaatgcttgacaattaagtcttggttaaaattttaatttgtagaaaataaggtattaaaggtaatgtatgatatctgtaagtataggcaagaaggatgtaatggttcctttttgtgagcactctcaaccatgggatatatatatatatggatatgaactttctataagttcttgtctaggattatgctgttagttttgcttactaaagataattataccctctttgatctacatgtctatcaaatagaacctaaacttgatatgaggtttgtattagtccattatcacgctgctaataaagacatactcaagactg

SEQ ID NO: 366353 - DNA, 1810 bp, Homo sapiens
agcaggggccttcgtggccagcagcctgcactctcagaaatcagacttgagtggccggaacccttgagaccagaggcttaccatgctgctccctaggagggccaggaactgctgacgtgaccactggacagttattcgtgtctcttacaattaccaaacagaatggacaagcttaataaaataaccgtccccgccagtcagaagttgaggcagcttcaaaagatggtccatgatattaaaaacaatgaaggtggaataatgaataaaatcaaaaagctaaaagtcaaagcacctccaagtgttcctcgaagggactacgcttcagagagccccgctgacgaagaggagcagtggtccgatgactttgacagcgactatgaaaatccagatgagcactcggactcagagatgtacgtgatgcccgccgaggagaacgctgatgacagctacgagccgcctccagtagagcaggaaaccaggccggttcacccagccctgcccttcgccagaggcgagtatatagacaatcgatcaagccagaggcattccccacccttcagcaagacacttcccagtaagcccagctggccttcagagaaagcaaggctcacctccaccctgccggccctgactgctttgcagaaacctcaagtcccacccaaacccaaaggcctccttgaggatgaggctgattatgtggtccccgtggaagataatgatgaaaactatattcatcccacagaaagcagttcacctccacctgaaaaaggtaagagtttgtcgccttaagcacctgaaaatttttagcagttgatcaggatgtataagagtatttggtagtaagcactaagaggctcagaaatgacagtgcccaggactttctcccctgggccacagtgtgtgcttctttggctggttgggcagacagcatcagtgacaacccatctctgtgtatcatagcccttccctgccttccccttcctcttccatgctttaatcttcccatctcacattatgaaagcacctgggtagttctcttcagctgccctcgcttcaaatggatttctcataaaacctaatacaatgtcacaagccaccatgttggccttgtaaacattgcaccaagaacagtttctgcagaggagtgaaaaaatgaaagagtgaaatatgccctgagtcctggttctttaaatttagtagtatgataagcctatgaaacatttcatccgtaaacccttcacagaacaacaaatgctatgaccaatgaattaccttaaaaagccagtgctacataagattaggcatggaaacagggtatgtttactctgaatatagtcactatggagaatatgatccagtacaagtgatacctcttcaggtaacattactcatctactactctcaactccatggtagccatattcaggtttcagtccgccatcatgtagcaaccctctcccgtactccgtacctatcaccaacagcttcaagacccacctgaattcccaagccacccattaccacaaaagaacaaatacacattccctccttaccaacccctctttaaaaaaacaaaaaagaacagaaaaaaacccatgaaatcccagagcaatggtgtgtattgcatctggtaggggaggtggagctattaattgggcccctccagtaaggggttcaatacactcttgatgaaaaacaaaaacaataaaactcctttatctcttagacctcccacttggcaaatgaaattcaaagccattattcactttaacaagatctctatcatcaaataatcaaataataatatatc

SEQ ID NO: 366354 - DNA, 1735 bp, Homo sapiens
agcaggggccttcgtggccagcagcctgcactctcagaaatcagacttgagtggccggaacccttgagaccagaggcttaccatgctgctccctaggagggccaggaactgctgacgtgaccactggacagttattcgtgtctcttacaattaccaaacagaatggacaagcttaataaaataaccgtccccgccagtcagaagttgaggcagcttcaaaagatggtccatgatattaaaaacaatgaaggtggaataatgaataaaatcaaaaagctaaaagtcaaagcacctccaagtgttcctcgaagggactacgcttcagagagccccgctgacgaagaggagcagtggtccgatgactttgacagcgactatgaaaatccagatgagcactcggactcagagatgtacgtgatgcccgccgaggagaacgctgatgacagctacgagccgcctccagtagagcaggaaaccaggccggttcacccagccctgcccttcgccagaggcgagtatatagacaatcgatcaagccagaggcattccccacccttcagcaagacacttcccagtaagcccagctggccttcagagaaagcaaggctcacctccaccctgccggccctgactgctttgcagaaacctcaagtcccacccaaacccaaaggcctccttgaggatgaggctgattatgtggtccccgtggaagataatgatgaaaactatattcatcccacagaaagcagttcacctccacctgaaaaaggtcgaaacagtggggcctgggaaaccaagtcacctccaccagctgcaccatccccgttgccacgggccgggaaaaaaccaacgacaccactgaagacaactccagttgcctctcaacagaatgcttcaagtgtttgtgaagaaaaacctatacctgctgaacgccaccgagggtcaagtcacagacaagaagctgtgcagtcaccagtgtttcctcctgcccagaaacaaatccaccaaaaacccatacctctgccaagatttacagaagggggaaacccaactgtggatgggcccctacccagcttttcatctaattccactatttcagaacaggaagctggcgttctctgcaagccatggtatgctggagcctgtgatcgaaagtctgctgaagaggcattgcacagatcaaacaaggatggatcatttcttattcggaaaagctctggccatgattccaaacaaccatatacactagttgtattctttaataagcgagtatataatattcctgtgcgatttattgaagcaacaaaacaatatgccttgggcagaaagaaaaatggtgaagagtactttggaagtgttgctgaaatcatcaggaatcatcaacatagtcctttggttcttattgacagtcagaataacacaaaagattccaccagactgaagtatgcagttaaagtttcataaagggggaaaaaaaagatcaataccattgcttcagacactttcccaaagtttctccttttgagaaaaagtcccaaaacttcatattttggattatgaatcatccagtaataaaatggaagatggagtcagctattgaagtggtcatccatttctttttaagaagctcatgtggacttgttctattgcctgacctgatgaactgttaatatctggtgaggttgagttatcatgctactaatattttccaaataaatatttttatttttaaaaa

SEQ ID NO: 366355 - DNA, 920 bp, Homo sapiens
agctcatctctttttattccccaggaaaaaaccaacgacaccactgaagacaactccagttgcctctcaacagaatgcttcaagtgtttgtgaagaaaaacctatacctgctgaacgccaccgagggtcaagtcacagacaagaagctgtgcagtcaccagtgtttcctcctgcccagaaacaaatccaccaaaaacccatacctctgccaagatttacagaagggggaaacccaactgtggatgggcccctacccagcttttcatctaattccactatttcagaacaggaagctggcgttctctgcaagccatggtatgctggagcctgtgatcgaaagtctgctgaagaggcattgcacagatcaaacaaggatggatcatttcttattcggaaaagctctggccatgattccaaacaaccatatacactagttgtattctttaataagcgagtatataatattcctgtgcgatttattgaagcaacaaaacaatatgccttgggcagaaagaaaaatggtgaagagtactttggaagtgttgctgaaatcatcaggaatcatcaacatagtcctttggttcttattgacagtcagaataacacaaaagattccaccagactgaagtatgcagttaaagtttcataaagggggaaaaaaaagatcaataccattgcttcagacactttcccaaagtttctccttttgagaaaaagtcccaaaacttcatattttggattatgaatcatccagtaataaaatggaagatggagtcagctattgaagtggtcatccatttctttttaagaagctcatgtggacttgttctattgcctgacctgatgaactgttaatatctggtgaggttgagttatcatgctactaatattttccaaataaatatttttatttttaaaaa

SEQ ID NO: 366356 - DNA, 1566 bp, Homo sapiens
agcaggggccttcgtggccagcagcctgcactctcagaaatcagacttgagtggccggaacccttgagaccagaggcttaccatgctgctccctaggagggccaggaactgctgacgtgaccactggacagttattcgtgtctcttacaattaccaaacagaatggacaagcttaataaaataaccgtccccgccagtcagaagttgaggcagcttcaaaagatggtccatgatattaaaaacaatgaaggtggaataatgaataaaatcaaaaagctaaaagtcaaagcacctccaagtgttcctcgaagggactacgcttcagagagccccgctgacgaagaggagcagtggtccgatgactttgacagcgactatgaaaatccagatgagcactcggactcagagatgtacgtgatgcccgccgaggagaacgctgatgacagctacgagccgcctccagtagagcaggaaaccaggccggttcacccagccctgcccttcgccagaggcgagtatatagacaatcgatcaagccagaggcattccccacccttcagcaagacacttcccagtaagcccagctggccttcagagaaagcaaggctcacctccaccctgccggccctgactgctttgcagaaacctcaagtcccacccaaacccaaaggcctccttgaggatgaggctgattatgtggtccccgtggaagataatgatgaaaactatattcatcccacagaaagcagttcacctccacctgaaaaaggtaagagtttgtcgccttaagcacctgaaaatttttagcagttgatcaggatgtataagagtatttggtagtaagcactaagaggctcagaaatgacagtgcccaggactttctcccctgggccacagtgtgtgcttctttggctggttgggcagacagcatcagtgacaacccatctctgtgtatcatagcccttccctgccttccccttcctcttccatgctttaatcttcccatctcacattatgaaagcacctgggtagttctcttcagctgccctcgcttcaaatggatttctcataaaacctaatacaatgtcacaagccaccatgttggccttgtaaacattgcaccaagaacagtttctgcagaggagtgaaaaaatgaaagagtgaaatatgccctgagtcctggttctttaaatttagtagtatgataagcctatgaaacatttcatccgtaaacccttcacagaacaacaaatgctatgaccaatgaattaccttaaaaagccagtgctacataagattaggcatggaaacagggtatgtttactctgaatatagtcactatggagaatatgatccagtacaagtgatacctcttcaggtaacattactcatctactactctcaactccatggtagccatattcaggtttcagtccgccatcatgtagcaaccctctcccgtactccgtacctatcaccaacagcttcaagacccacctgaattcccaagccacccattaccacaaaagaacaaatacacattccctccttaccaacccctcttta

SEQ ID NO: 366357 - DNA, 1512 bp, Homo sapiens
agcaggggccttcgtggccagcagcctgcactctcagaaatcagacttgagtggccggaacccttgagaccagaggcttaccatgctgctccctaggagggccaggaactgctgacgtgaccactggacagttattcgtgtctcttacaattaccaaacagaatggacaagcttaataaaataaccgtccccgccagtcagaagttgaggcagcttcaaaagatggtccatgatattaaaaacaatgaaggtggaataatgaataaaatcaaaaagctaaaagtcaaagcacctccaagtgttcctcgaagggactacgcttcagagagccccgctgacgaagaggagcagtggtccgatgactttgacagcgactatgaaaatccagatgagcactcggactcagagatgtacgtgatgcccgccgaggagaacgctgatgacagctacgagccgcctccagtagagcaggaaaccaggccggttcacccagccctgcccttcgccagaggcgagtatatagacaatcgatcaagccagaggcattccccacccttcagcaagacacttcccagtaagcccagctggccttcagagaaagcaaggctcacctccaccctgccggccctgactgctttgcagaaacctcaagtcccacccaaacccaaaggcctccttgaggatgaggctgattatgtggtccccgtggaagataatgatgaaaactatattcatcccacagaaagcagttcacctccacctgaaaaaggtaagagtttgtcgccttaagcacctgaaaatttttagcagttgatcaggatgtataagagtatttggtagtaagcactaagaggctcagaaatgacagtgcccaggactttctcccctgggccacagtgtgtgcttctttggctggttgggcagacagcatcagtgacaacccatctctgtgtatcatagcccttccctgccttccccttcctcttccatgctttaatcttcccatctcacattatgaaagcacctgggtagttctcttcagctgccctcgcttcaaatggatttctcataaaacctaatacaatgtcacaagccaccatgttggccttgtaaacattgcaccaagaacagtttctgcagaggagtgaaaaaatgaaagagtgaaatatgccctgagtcctggttctttaaatttagtagtatgataagcctatgaaacatttcatccgtaaacccttcacagaacaacaaatgctatgaccaatgaattaccttatatagtcactatggagaatatgatccagtacaagtgatacctcttcaggtaacattactcatctactactctcaactccatggtagccatattcaggtttcagtccgccatcatgtagcaaccctctcccgtactccgtacctatcaccaacagcttcaagacccacctgaattcccaagccacccattaccacaaaagaacaaatacacattccctccttaccaacccctcttta

SEQ ID NO: 366358 - DNA, 4588 bp, Homo sapiens
tgccgcggctgctgaagaaccagaccaaaaacctgcttcagaagatagacatggacagcaagatgaagaagatggcagagctgcagctgtccgtggtgagcgacccaaagaacaggaaagccatagagaaccagatccagcaatgggagcagaatcttgagaaatttcacatggatctgttcaggatgcgctgctatctggccagcctacaaggtggggagttaccgaacccaaagagtctccttgcagccgccagccgcccctccaagctggccctcggcaggctgggcatcttgtctgtttcctctttccatgctctggtatgttctagagatgactctgctctccggaaaaggacactgtcactgacccagcgagggagaaacaagaagggaatattttcttcgttaaaagggctggacacactggccagaaaaggcaaggagaagagaccttctataactcagatatttgattcaagtggcagccatggattttctggaactcagctacctcaaaactccagtaactccagtgaggtcgatgaacttctgcatatatatggttcaacagtagacggtgttccccgagacaatgcatgggaaatccagacttatgtccactttcaggacaatcacggagttactgtagggatcaagccagagcacagagtagaagatattttgactttggcatgcaagatgaggcagttggaacccagccattatggcctacagcttcgaaaattagtagatgacaatgttgagtattgcatccctgcaccatatgaatatatgcaacaacaggtttatgatgaaatagaagtctttccactaaatgtttatgacgtgcagctcacgaagactgggagtgtgtgtgactttgggtttgcagttacagcgcaggtggatgagcgtcagcatctcagccggatatttataagcgacgttcttcccgatggcctggcgtatggggaagggctgagaaagggcaatgagatcatgaccttaaatggggaagctgtgtctgatcttgaccttaagcagatggaggccctgttttctgagaagagcgtcggactcactctgattgcccggcctccggacacaaaagcaaccctgtgtacatcctggtcagacagtgacctgttctccagggaccagaagagtctgctgccccctcctaaccagtcccaactgctggaggaattcctggataactttaaaaagaatacagccaatgatttcagcaacgtccctgatatcacaacaggtctgaaaaggagtcagacagatggcactctggatcaggtttcccacagggagaaaatggagcagacattcaggagtgctgagcagatcactgcactgtgcaggagttttaacgacagtcaggccaacggcatggaaggaccgcgggagaatcaggatcctcctccgaggcctctggcccgccacctgtctgatgcagaccgcctccgcaaagtcatccaggagcttgtggacacagagaagtcctacgtgaaggatttgagctgcctctttgaattatacttggagccacttcagaatgagacctttcttacccaagatgagatggagtcactttttggaagtttgccagagatgcttgagtttcagaaggtgtttctggagaccctggaggatgggatttcagcatcatctgactttaacaccctagaaaccccctcacagtttagaaaattactgttttcccttggaggctctttcctttattacgcggaccactttaaactgtacagtggattctgtgctaaccatatcaaagtacagaaggttctggagcgagctaaaactgacaaagccttcaaggcttttctggacgcccggaaccccaccaagcagcattcctccacgctggagtcctacctcatcaagccggttcagagagtgctcaagtacccgctgctgctcaaggagctggtgtccctgacggaccaggagagcgaggagcactaccacctgacggaagcactaaaggcaatggagaaagtagcgagccacatcaatgagatgcagaagatctatgaggattatgggaccgtgtttgaccagctagtagctgagcagagcggaacagagaaggaggtaacagaactttcgatgggagagcttctgatgcactctacggtttcctggttgaatccatttctgtctctaggaaaagctagaaaggaccttgagctcacagtatttgtttttaagagagccgtcatactggtttataaagaaaactgcaaactgaaaaagaaattgccctcgaattcccggcctgcacacaactctactgacttggacccatttaaattccgctggttgatccccatctccgcgcttcaagtcagactggggaatccagcagggacagaaaataattccatatgggaactgatccatacgaagtcagaaatagaaggacggccagaaaccatctttcagttgtgttgcagtgacagtgaaagcaaaaccaacattgttaaggtgattcgttctattctgagggagaacttcaggcgtcacataaagtgtgaattaccactggagaaaacgtgtaaggatcgcctggtacctcttaagaaccgagttcctgtttcggccaaattagcttcatccaggtctttaaaagtcctgaagaattcctccagcaacgagtggaccggtgagactggcaagggaaccttgctggactctgacgagggcagcttgagcagcggcacccagagcagcggctgccccacggctgagggcaggcaggactccaagagcacttctcccgggaaatacccacaccccggcttggcagattttgctgacaatctcatcaaagagagtgacatcctgagcgatgaagatgatgaccaccgtcagactgtgaagcagggcagccctactaaagacatcgaaattcagttccagagactgaggatttccgaggacccagacgttcaccccgaggctgagcagcagcctggcccggagtcgggtgagggtcagaaaggaggagagcagcccaaactggtccgggggcacttctgccccattaaacgaaaagccaacagcaccaagagggacagaggaactttgctcaaggcgcagatccgtcaccagtcccttgacagtcagtctgaaaatgccaccatcgacctaaattctgttctagagcgagaattcagtgtccagagtttaacatctgttgtcagtgaggagtgtttttatgaaacagagagccacggaaaatcatagtatgattcaatccagatatgggttaaattcctcattttacttttaaactggtggtaaagtggaaattgcaaaaaaaaaaaaaaaaaaactgttcattcctgggttttgtgcagtatacattttcccacaaaatggttgtaaagatttaagttattttaatttattgtggatcagaaacctagatgaaactggtcagaatctgtaaattacttagtttatatccactttgagcaggtatcaaatgatttaggatccttaaaattacattctaataattaagttatgtggaaaaagtaaggctggggaagtcgtgattaatagttttcaaagggccattttttaaaatcctctgggcattttctttcagctgtttgttagtttttgctttatttaaagcatatttaagttattttaatgtggtttaggggcaaaatgtgcagatacttcatttttgtaagatagattgtaatagatgctgtttatactaaacatgtcataactatctatacagtatatattaaaagaaagcttgtactgtatcttatttgatgatatttattttctctgccaagctgtatagtaaaaggaaaataagtcacatctggtcattggcatttgtatcgtcattctgtaaagacaaaagagtacctatataagaagctccacgtagtgcaaatcgacatctggtaggctgctcgcccccaggcagcagctagagtctgtaattctctgcgtcatcctcttctttttcttcatttttgctttttcttcgcttgagttcttctctgaaattatatgcaaagagttgtgggtcttcatcacacatttttctgtatacatcacagaggctcttaaagtgtgagatggagagctggcggggccgaagagtagggtctatgtctgccaactctaacagcctgcccgtgctttccaagcgctgcgcttcagggaataacattctgagccctcgatggcagtatttccttcggaactgaaatacattctgaaccactttttccaccagcttgaatggctgctctatcttgggctgtatcaagggagtgaagtgcaccacgcccacgtccaccttcgttgtaagcaaacatattatcattctgtggcatgatatgtggcatagtgtgatcaatcaactcatccttgtaaaacaggaagatgggctgtcaacagcctgttttcataaacagacctttccacgtacttcggtttcatctctaggcatggaagatggtacattctggattcgcaaatgacatggagaaatcagccggctgcacctgttctct

SEQ ID NO: 366359 - DNA, 3370 bp, Homo sapiens
ttcattgcctggggatgagagggagagacaacgtgtgtcttacacatctcccaacagccgacttagatgtgatccgttctcccagagggagcaggtttctttgaacttttcctttttatgtacagcatagtgctgagcagatcactgcactgtgcaggagttttaacgacagtcaggccaacggcatggaaggaccgcgggagaatcaggatcctcctccgaggcctctggcccgccacctgtctgatgcagaccgcctccgcaaagtcatccaggagcttgtggacacagagaagtcctacgtgaaggatttgagctgcctctttgaattatacttggagccacttcagaatgagacctttcttacccaagatgagatggagtcactttttggaagtttgccagagatgcttgagtttcagaaggtgtttctggagaccctggaggatgggatttcagcatcatctgactttaacaccctagaaaccccctcacagtttagaaaattactgttttcccttggaggctctttcctttattacgcggaccactttaaactgtacagtggattctgtgctaaccatatcaaagtacagaaggttctggagcgagctaaaactgacaaagccttcaaggcttttctggacgcccggaaccccaccaagcagcattcctccacgctggagtcctacctcatcaagccggttcagagagtgctcaagtacccgctgctgctcaaggagctggtgtccctgacggaccaggagagcgaggagcactaccacctgacggaagcactaaaggcaatggagaaagtagcgagccacatcaatgagatgcagaagatctatgaggattatgggaccgtgtttgaccagctagtagctgagcagagcggaacagagaaggaggtaacagaactttcgatgggagagcttctgatgcactctacggtttcctggttgaatccatttctgtctctaggaaaagctagaaaggaccttgagctcacagtatttgtttttaagagagccgtcatactggtttataaagaaaactgcaaactgaaaaagaaattgccctcgaattcccggcctgcacacaactctactgacttggacccatttaaattccgctggttgatccccatctccgcgcttcaagtcagactggggaatccagcagggacagaaaataattccatatgggaactgatccatacgaagtcagaaatagaaggacggccagaaaccatctttcagttgtgttgcagtgacagtgaaagcaaaaccaacattgttaaggtgattcgttctattctgagggagaacttcaggcgtcacataaagtgtgaattaccactggagaaaacgtgtaaggatcgcctggtacctcttaagaaccgagttcctgtttcggccaaattagcttcatccaggtctttaaaagtcctgaagaattcctccagcaacgagtggaccggtgagactggcaagggaaccttgctggactctgacgagggcagcttgagcagcggcacccagagcagcggctgccccacggctgagggcaggcaggactccaagagcacttctcccgggaaatacccacaccccggcttggcagattttgctgacaatctcatcaaagagagtgacatcctgagcgatgaagatgatgaccaccgtcagactgtgaagcagggcagccctactaaagacatcgaaattcagttccagagactgaggatttccgaggacccagacgttcaccccgaggctgagcagcagcctggcccggagtcgggtgagggtcagaaaggaggagagcagcccaaactggtccgggggcacttctgccccattaaacgaaaagccaacagcaccaagagggacagaggaactttgctcaaggcgcagatccgtcaccagtcccttgacagtcagtctgaaaatgccaccatcgacctaaattctgttctagagcgagaattcagtgtccagagtttaacatctgttgtcagtgaggagtgtttttatgaaacagagagccacggaaaatcatagtatgattcaatccagatatgggttaaattcctcattttacttttaaactggtggtaaagtggaaattgcaaaaaaaaaaaaaaaaaaactgttcattcctgggttttgtgcagtatacattttcccacaaaatggttgtaaagatttaagttattttaatttattgtggatcagaaacctagatgaaactggtcagaatctgtaaattacttagtttatatccactttgagcaggtatcaaatgatttaggatccttaaaattacattctaataattaagttatgtggaaaaagtaaggctggggaagtcgtgattaatagttttcaaagggccattttttaaaatcctctgggcattttctttcagctgtttgttagtttttgctttatttaaagcatatttaagttattttaatgtggtttaggggcaaaatgtgcagatacttcatttttgtaagatagattgtaatagatgctgtttatactaaacatgtcataactatctatacagtatatattaaaagaaagcttgtactgtatcttatttgatgatatttattttctctgccaagctgtatagtaaaaggaaaataagtcacatctggtcattggcatttgtatcgtcattctgtaaagacaaaagagtacctatataagaagctccacgtagtgcaaatcgacatctggtaggctgctcgcccccaggcagcagctagagtctgtaattctctgcgtcatcctcttctttttcttcatttttgctttttcttcgcttgagttcttctctgaaattatatgcaaagagttgtgggtcttcatcacacatttttctgtatacatcacagaggctcttaaagtgtgagatggagagctggcggggccgaagagtagggtctatgtctgccaactctaacagcctgcccgtgctttccaagcgctgcgcttcagggaataacattctgagccctcgatggcagtatttccttcggaactgaaatacattctgaaccactttttccaccagcttgaatggctgctctatcttgggctgtatcaagggagtgaagtgcaccacgcccacgtccaccttcgttgtaagcaaacatattatcattctgtggcatgatatgtggcatagtgtgatcaatcaactcatccttgtaaaacaggaagatgggctgtcaacagcctgttttcataaacagacctttccacgtacttcggtttcatctctaggcatggaagatggtacattctggattcgcaaatgacatggagaaatcagccggctgcacctgttctct

SEQ ID NO: 366360 - DNA, 4469 bp, Homo sapiens
agggccattcagagctctgcatggaggcagggtggccggccttcgtcccctcaggccagcagggcaaggcagctcccctcaatagagatccagcaatgggagcagaatcttgagaaatttcacatggatctgttcaggatgcgctgctatctggccagcctacaaggtggggagttaccgaacccaaagagtctccttgcagccgccagccgcccctccaagctggccctcggcaggctgggcatcttgtctgtttcctctttccatgctctggtatgttctagagatgactctgctctccggaaaaggacactgtcactgacccagcgagggagaaacaagaagggaatattttcttcgttaaaagggctggacacactggccagaaaaggcaaggagaagagaccttctataactcaggtcgatgaacttctgcatatatatggttcaacagtagacggtgttccccgagacaatgcatgggaaatccagacttatgtccactttcaggacaatcacggagttactgtagggatcaagccagagcacagagtagaagatattttgactttggcatgcaagatgaggcagttggaacccagccattatggcctacagcttcgaaaattagtagatgacaatgttgagtattgcatccctgcaccatatgaatatatgcaacaacaggtttatgatgaaatagaagtctttccactaaatgtttatgacgtgcagctcacgaagactgggagtgtgtgtgactttgggtttgcagttacagcgcaggtggatgagcgtcagcatctcagccggatatttataagcgacgttcttcccgatggcctggcgtatggggaagggctgagaaagggcaatgagatcatgaccttaaatggggaagctgtgtctgatcttgaccttaagcagatggaggccctgttttctgagaagagcgtcggactcactctgattgcccggcctccggacacaaaagcaaccctgtgtacatcctggtcagacagtgacctgttctccagggaccagaagagtctgctgccccctcctaaccagtcccaactgctggaggaattcctggataactttaaaaagaatacagccaatgatttcagcaacgtccctgatatcacaacaggtctgaaaaggagtcagacagatggcactctggatcaggtttcccacagggagaaaatggagcagacattcaggagtgctgagcagatcactgcactgtgcaggagttttaacgacagtcaggccaacggcatggaaggaccgcgggagaatcaggatcctcctccgaggcctctggcccgccacctgtctgatgcagaccgcctccgcaaagtcatccaggagcttgtggacacagagaagtcctacgtgaaggatttgagctgcctctttgaattatacttggagccacttcagaatgagacctttcttacccaagatgagatggagtcactttttggaagtttgccagagatgcttgagtttcagaaggtgtttctggagaccctggaggatgggatttcagcatcatctgactttaacaccctagaaaccccctcacagtttagaaaattactgttttcccttggaggctctttcctttattacgcggaccactttaaactgtacagtggattctgtgctaaccatatcaaagtacagaaggttctggagcgagctaaaactgacaaagccttcaaggcttttctggacgcccggaaccccaccaagcagcattcctccacgctggagtcctacctcatcaagccggttcagagagtgctcaagtacccgctgctgctcaaggagctggtgtccctgacggaccaggagagcgaggagcactaccacctgacggaagcactaaaggcaatggagaaagtagcgagccacatcaatgagatgcagaagatctatgaggattatgggaccgtgtttgaccagctagtagctgagcagagcggaacagagaaggaggtaacagaactttcgatgggagagcttctgatgcactctacggtttcctggttgaatccatttctgtctctaggaaaagctagaaaggaccttgagctcacagtatttgtttttaagagagccgtcatactggtttataaagaaaactgcaaactgaaaaagaaattgccctcgaattcccggcctgcacacaactctactgacttggacccatttaaattccgctggttgatccccatctccgcgcttcaagtcagactggggaatccagcagggacagaaaataattccatatgggaactgatccatacgaagtcagaaatagaaggacggccagaaaccatctttcagttgtgttgcagtgacagtgaaagcaaaaccaacattgttaaggtgattcgttctattctgagggagaacttcaggcgtcacataaagtgtgaattaccactggagaaaacgtgtaaggatcgcctggtacctcttaagaaccgagttcctgtttcggccaaattagcttcatccaggtctttaaaagtcctgaagaattcctccagcaacgagtggaccggtgagactggcaagggaaccttgctggactctgacgagggcagcttgagcagcggcacccagagcagcggctgccccacggctgagggcaggcaggactccaagagcacttctcccgggaaatacccacaccccggcttggcagattttgctgacaatctcatcaaagagagtgacatcctgagcgatgaagatgatgaccaccgtcagactgtgaagcagggcagccctactaaagacatcgaaattcagttccagagactgaggatttccgaggacccagacgttcaccccgaggctgagcagcagcctggcccggagtcgggtgagggtcagaaaggaggagagcagcccaaactggtccgggggcacttctgccccattaaacgaaaagccaacagcaccaagagggacagaggaactttgctcaaggcgcagatccgtcaccagtcccttgacagtcagtctgaaaatgccaccatcgacctaaattctgttctagagcgagaattcagtgtccagagtttaacatctgttgtcagtgaggagtgtttttatgaaacagagagccacggaaaatcatagtatgattcaatccagatatgggttaaattcctcattttacttttaaactggtggtaaagtggaaattgcaaaaaaaaaaaaaaaaaaactgttcattcctgggttttgtgcagtatacattttcccacaaaatggttgtaaagatttaagttattttaatttattgtggatcagaaacctagatgaaactggtcagaatctgtaaattacttagtttatatccactttgagcaggtatcaaatgatttaggatccttaaaattacattctaataattaagttatgtggaaaaagtaaggctggggaagtcgtgattaatagttttcaaagggccattttttaaaatcctctgggcattttctttcagctgtttgttagtttttgctttatttaaagcatatttaagttattttaatgtggtttaggggcaaaatgtgcagatacttcatttttgtaagatagattgtaatagatgctgtttatactaaacatgtcataactatctatacagtatatattaaaagaaagcttgtactgtatcttatttgatgatatttattttctctgccaagctgtatagtaaaaggaaaataagtcacatctggtcattggcatttgtatcgtcattctgtaaagacaaaagagtacctatataagaagctccacgtagtgcaaatcgacatctggtaggctgctcgcccccaggcagcagctagagtctgtaattctctgcgtcatcctcttctttttcttcatttttgctttttcttcgcttgagttcttctctgaaattatatgcaaagagttgtgggtcttcatcacacatttttctgtatacatcacagaggctcttaaagtgtgagatggagagctggcggggccgaagagtagggtctatgtctgccaactctaacagcctgcccgtgctttccaagcgctgcgcttcagggaataacattctgagccctcgatggcagtatttccttcggaactgaaatacattctgaaccactttttccaccagcttgaatggctgctctatcttgggctgtatcaagggagtgaagtgcaccacgcccacgtccaccttcgttgtaagcaaacatattatcattctgtggcatgatatgtggcatagtgtgatcaatcaactcatccttgtaaaacaggaagatgggctgtcaacagcctgttttcataaacagacctttccacgtacttcggtttcatctctaggcatggaagatggtacattctggattcgcaaatgacatggagaaatcagccggctgcacctgttctct

SEQ ID NO: 366361 - DNA, 4187 bp, Homo sapiens
agggccattcagagctctgcatggaggcagggtggccggccttcgtcccctcaggccagcagggcaaggcagctcccctcaatagagatccagcaatgggagcagaatcttgagaaatttcacatggatctgttcaggatgcgctgctatctggccagcctacaaggtggggagttaccgaacccaaagagtctccttgcagccgccagccgcccctccaagctggccctcggcaggctgggcatcttgtctgtttcctctttccatgctctggtatgttctagagatgactctgctctccggaaaaggacactgtcactgacccagcgagggagaaacaagaagggaatattttcttcgttaaaagggctggacacactggccagaaaaggcaaggagaagagaccttctataactcaggtcgatgaacttctgcatatatatggttcaacagtagacggtgttccccgagacaatgcatgggaaatccagacttatgtccactttcaggacaatcacggagttactgtagggatcaagccagagcacagagtagaagatattttgactttggcatgcaagatgaggcagttggaacccagccattatggcctacagcttcgaaaattagtagatgacaatgttgagtattgcatccctgcaccatatgaatatatgcaacaacaggtttatgatgaaatagaagtctttccactaaatgtttatgacgtgcagctcacgaagactgggagtgtgtgtgactttgggtttgcagttacagcgcaggtggatgagcgtcagcatctcagccggatatttataagcgacgttcttcccgatggcctggcgtatggggaagggctgagaaagggcaatgagatcatgaccttaaatggggaagctgtgtctgatcttgaccttaagcagatggaggccctgttttctgagaagagcgtcggactcactctgattgcccggcctccggacacaaaagcaaccctgtgtacatcctggtcagacagtgacctgttctccagggaccagaagagtctgctgccccctcctaaccagtcccaactgctggaggaattcctggataactttaaaaagaatacagccaatgatttcagcaacgtccctgatatcacaacaggtctgaaaaggagtcagacagatggcactctggatcaggtttcccacagggagaaaatggagcagacattcaggagtgctgagcagatcactgcactgtgcaggagttttaacgacagtcaggccaacggcatggaaggaccgcgggagaatcaggatcctcctccgaggcctctggcccgccacctgtctgatgcagaccgcctccgcaaagtcatccaggagcttgtggacacagagaagtcctacgtgaaggatttgagctgcctctttgaattatacttggagccacttcagaatgagacctttcttacccaagatgagatggagtcactttttggaagtttgccagagatgcttgagtttcagaaggtgtttctggagaccctggaggatgggatttcagcatcatctgactttaacaccctagaaaccccctcacagtttagaaaattactgttttcccttggaggctctttcctttattacgcggaccactttaaactgtacagtggattctgtgctaaccatatcaaagtacagaaggttctggagcgagctaaaactgacaaagccttcaaggcttttctggacgcccggaaccccaccaagcagcattcctccacgctggagtcctacctcatcaagccggttcagagagtgctcaagtacccgctgctgctcaaggagctggtgtccctgacggaccaggagagcgaggagcactaccacctgacggaagcactaaaggcaatggagaaagtagcgagccacatcaatgagatgcagaagatctatgaggattatgggaccgtgtttgaccagctagtagctgagcagagcggaacagagaaggaggtaacagaactttcgatgggagagcttctgatgcactctacggtttcctggttgaatccatttctgtctctaggaaaagctagaaaggaccttgagctcacagtatttgtttttaagagagccgtcatactggtttataaagaaaactgcaaactgaaaaagaaattgccctcgaattcccggcctgcacacaactctactgacttggacccatttaaattccgctggttgatccccatctccgcgcttcaagtcagactggggaatccagcagggacagaaaataattccatatgggaactgatccatacgaagtcagaaatagaaggacggccagaaaccatctttcagttgtgttgcagtgacagtgaaagcaaaaccaacattgttaaggtgattcgttctattctgagggagaacttcaggcgtcacataaagtgtgaattaccactggagaaaacgtgtaaggatcgcctggtacctcttaagaaccgagttcctgtttcggccaaattagcttcatccaggtctttaaaagtcctgaagaattcctccagcaacgagtggaccggtgagactggcaagggaaccttgctggactctgacgagggcagcttgagcagcggcacccagagcagcggctgccccacggctgagggcaggcaggactccaagagcacttctcccgggaaatacccacaccccggcttggcagattttgctgacaatctcatcaaagagagtgacatcctgagcgatgaagatgatgaccaccgtcagactgtgaagcagggcagccctactaaagacatcgaaattcagttccagagactgaggatttccgaggacccagacgttcaccccgaggctgagcagcagcctggcccggagtcgggtgagggtcagaaaggaggagagcagcccaaactggtccgggggcacttctgccccattaaacgaaaagccaacagcaccaagagggacagaggaactttgctcaaggcgcagatccgtcaccagtcccttgacagtcagtctgaaaatgccaccatcgacctaaattctgttctagagcgagaattcagtgtccagagtttaacatctgttgtcagtgaggagtgtttttatgaaacagagagccacggaaaatcatagtatgattcaatccagatatgggttaaattcctcattttacttttaaactggtggtaaagtggaaattgcaaaaaaaaaaaaaaaaaaactgttcattcctgggttttgtgcagtatacattttcccacaaaatggttgtaaagatttaagttattttaatttattgtggatcagaaacctagatgaaactggtcagaatctgtaaattacttagtttatatccactttgagcaggtatcaaatgatttaggatccttaaaattacattctaataattaagttatgtggaaaaagtaaggctggggaagtcgtgattaatagttttcaaagggccattttttaaaatcctctgggcattttctttcagctgtttgttagtttttgctttatttaaagcatatttaagttattttaatgtggtttaggggcaaaatgtgcagatacttcatttttgtaagatagattgtaatagatgctgtttatactaaacatgtcataactatctatacagtatatattaaaagaaagcttgtactgtatcttatttgatgatatttattttctctgccaagctgtatagtaaaaggaaaataagtcacatctggtcattggcatttgtatcgtcattctgtaaagacaaaagagtacctatataagaagctccacgtagtgcaaatcgacatctggtaggctgctcgcccccaggcagcagctagagtctgtaattctctgcgtcatcctcttctttttcttcatttttgctttttcttcgcttgagttcttctctgaaattatatgcaaagagttgtgggtcttcatcacacatttttctgtatacatcacagaggctcttaaagtgtgagatggagagctggcggggccgaagagtagggtctatgtctgccaactctaacagcctgcccgtgctttccaagcgctgcgcttcagggaataacattctgaggggaagacagacagacagaaaaataagaattttacttaaattctgcaaatcatgacac

SEQ ID NO: 366362 - DNA, 4541 bp, Homo sapiens
agggccattcagagctctgcatggaggcagggtggccggccttcgtcccctcaggccagcagggcaaggcagctcccctcaatagagatccagcaatgggagcagaatcttgagaaatttcacatggatctgttcaggatgcgctgctatctggccagcctacaaggtggggagttaccgaacccaaagagtctccttgcagccgccagccgcccctccaagctggccctcggcaggctgggcatcttgtctgtttcctctttccatgctctggtatgttctagagatgactctgctctccggaaaaggacactgtcactgacccagcgagggagaaacaagaagggaatattttcttcgttaaaagggctggacacactggccagaaaaggcaaggagaagagaccttctataactcagatatttgattcaagtggcagccatggattttctggaactcagctacctcaaaactccagtaactccagtgaggtcgatgaacttctgcatatatatggttcaacagtagacggtgttccccgagacaatgcatgggaaatccagacttatgtccactttcaggacaatcacggagttactgtagggatcaagccagagcacagagtagaagatattttgactttggcatgcaagatgaggcagttggaacccagccattatggcctacagcttcgaaaattagtagatgacaatgttgagtattgcatccctgcaccatatgaatatatgcaacaacaggtttatgatgaaatagaagtctttccactaaatgtttatgacgtgcagctcacgaagactgggagtgtgtgtgactttgggtttgcagttacagcgcaggtggatgagcgtcagcatctcagccggatatttataagcgacgttcttcccgatggcctggcgtatggggaagggctgagaaagggcaatgagatcatgaccttaaatggggaagctgtgtctgatcttgaccttaagcagatggaggccctgttttctgagaagagcgtcggactcactctgattgcccggcctccggacacaaaagcaaccctgtgtacatcctggtcagacagtgacctgttctccagggaccagaagagtctgctgccccctcctaaccagtcccaactgctggaggaattcctggataactttaaaaagaatacagccaatgatttcagcaacgtccctgatatcacaacaggtctgaaaaggagtcagacagatggcactctggatcaggtttcccacagggagaaaatggagcagacattcaggagtgctgagcagatcactgcactgtgcaggagttttaacgacagtcaggccaacggcatggaaggaccgcgggagaatcaggatcctcctccgaggcctctggcccgccacctgtctgatgcagaccgcctccgcaaagtcatccaggagcttgtggacacagagaagtcctacgtgaaggatttgagctgcctctttgaattatacttggagccacttcagaatgagacctttcttacccaagatgagatggagtcactttttggaagtttgccagagatgcttgagtttcagaaggtgtttctggagaccctggaggatgggatttcagcatcatctgactttaacaccctagaaaccccctcacagtttagaaaattactgttttcccttggaggctctttcctttattacgcggaccactttaaactgtacagtggattctgtgctaaccatatcaaagtacagaaggttctggagcgagctaaaactgacaaagccttcaaggcttttctggacgcccggaaccccaccaagcagcattcctccacgctggagtcctacctcatcaagccggttcagagagtgctcaagtacccgctgctgctcaaggagctggtgtccctgacggaccaggagagcgaggagcactaccacctgacggaagcactaaaggcaatggagaaagtagcgagccacatcaatgagatgcagaagatctatgaggattatgggaccgtgtttgaccagctagtagctgagcagagcggaacagagaaggaggtaacagaactttcgatgggagagcttctgatgcactctacggtttcctggttgaatccatttctgtctctaggaaaagctagaaaggaccttgagctcacagtatttgtttttaagagagccgtcatactggtttataaagaaaactgcaaactgaaaaagaaattgccctcgaattcccggcctgcacacaactctactgacttggacccatttaaattccgctggttgatccccatctccgcgcttcaagtcagactggggaatccagcagggacagaaaataattccatatgggaactgatccatacgaagtcagaaatagaaggacggccagaaaccatctttcagttgtgttgcagtgacagtgaaagcaaaaccaacattgttaaggtgattcgttctattctgagggagaacttcaggcgtcacataaagtgtgaattaccactggagaaaacgtgtaaggatcgcctggtacctcttaagaaccgagttcctgtttcggccaaattagcttcatccaggtctttaaaagtcctgaagaattcctccagcaacgagtggaccggtgagactggcaagggaaccttgctggactctgacgagggcagcttgagcagcggcacccagagcagcggctgccccacggctgagggcaggcaggactccaagagcacttctcccgggaaatacccacaccccggcttggcagattttgctgacaatctcatcaaagagagtgacatcctgagcgatgaagatgatgaccaccgtcagactgtgaagcagggcagccctactaaagacatcgaaattcagttccagagactgaggatttccgaggacccagacgttcaccccgaggctgagcagcagcctggcccggagtcgggtgagggtcagaaaggaggagagcagcccaaactggtccgggggcacttctgccccattaaacgaaaagccaacagcaccaagagggacagaggaactttgctcaaggcgcagatccgtcaccagtcccttgacagtcagtctgaaaatgccaccatcgacctaaattctgttctagagcgagaattcagtgtccagagtttaacatctgttgtcagtgaggagtgtttttatgaaacagagagccacggaaaatcatagtatgattcaatccagatatgggttaaattcctcattttacttttaaactggtggtaaagtggaaattgcaaaaaaaaaaaaaaaaaaactgttcattcctgggttttgtgcagtatacattttcccacaaaatggttgtaaagatttaagttattttaatttattgtggatcagaaacctagatgaaactggtcagaatctgtaaattacttagtttatatccactttgagcaggtatcaaatgatttaggatccttaaaattacattctaataattaagttatgtggaaaaagtaaggctggggaagtcgtgattaatagttttcaaagggccattttttaaaatcctctgggcattttctttcagctgtttgttagtttttgctttatttaaagcatatttaagttattttaatgtggtttaggggcaaaatgtgcagatacttcatttttgtaagatagattgtaatagatgctgtttatactaaacatgtcataactatctatacagtatatattaaaagaaagcttgtactgtatcttatttgatgatatttattttctctgccaagctgtatagtaaaaggaaaataagtcacatctggtcattggcatttgtatcgtcattctgtaaagacaaaagagtacctatataagaagctccacgtagtgcaaatcgacatctggtaggctgctcgcccccaggcagcagctagagtctgtaattctctgcgtcatcctcttctttttcttcatttttgctttttcttcgcttgagttcttctctgaaattatatgcaaagagttgtgggtcttcatcacacatttttctgtatacatcacagaggctcttaaagtgtgagatggagagctggcggggccgaagagtagggtctatgtctgccaactctaacagcctgcccgtgctttccaagcgctgcgcttcagggaataacattctgagccctcgatggcagtatttccttcggaactgaaatacattctgaaccactttttccaccagcttgaatggctgctctatcttgggctgtatcaagggagtgaagtgcaccacgcccacgtccaccttcgttgtaagcaaacatattatcattctgtggcatgatatgtggcatagtgtgatcaatcaactcatccttgtaaaacaggaagatgggctgtcaacagcctgttttcataaacagacctttccacgtacttcggtttcatctctaggcatggaagatggtacattctggattcgcaaatgacatggagaaatcagccggctgcacctgttctct

SEQ ID NO: 366363 - DNA, 779 bp, Homo sapiens
tggaaacgtgcttacgtgaggacttcgtgatatgattttggctgctcagaagtcatatttgcttcctagttctcaagtgtgtccttaaagaagagatagggcaactcggtagaaagcaagcatttaaaaaacccattattatctgtcttgagtcctcactggggaaccacgagctccctggtacagagcctctgtgagctgtgcagtcaccaactccaggctgcgcttatgtttaagccaccctgagagaggccacctgaggtctagcaagtctttgctctctcctcattggcagtgaagtcttgtccgtcacaggcctgaactaagtgtaatactcagagctttaagaatagagcaaacaaggttctcactcttaaaaagtgcctgaggattttataaagactgcaactgaagagaagaaaaggcattcttacctgagccctcgatggcagtatttccttcggaactgaaatacattctgaaccactttttccaccagcttgaatggctgctctatcttgggctgtatcaagggagtgaagtgcaccacgcccacgtccaccttcgttgtaagcaaacatattatcattctgtggcatgatatgtggcatagtgtgatcaatcaactcatccttgtaaaacaggaagatgggctgtcaacagcctgttttcataaacagacctttccacgtacttcggtttcatctctaggcatggaagatggtacattctggattcgcaaatgacatggagaaatcagccggctgcacctgttctct

SEQ ID NO: 366364 - DNA, 339 bp, Homo sapiens
gactgggaatattagactttcttaactgatgagatttcaactttacaagtgttcttaaccacagcattttgggcaaagttgtagactcttgtttccatttccttttacatagggacagaaaataattccatatgggaactgatccatacgaagtcagaaatagaaggacggccagaaaccatctttcagttgtgttgcaggtatgactgacttccaaagattaaaaccaacagaaataacatagaattatgtctcttaagggaatttatatttagtgccctcctgaattttgatgatatcagggtcatactccccaccctccgaaaaaggcaactgagg

SEQ ID NO: 366365 - DNA, 789 bp, Homo sapiens
ttttctcatctgtaaaatgggatggtttagtctttgagttattgcgggcactaaatgagatgattcacagaaatcacctgtcgtgatccttgctaagtagaaagtgctccagaaatgtcagttgttgttattagtgatacttttcactgatactctgtctcatttcaaaaagaatttgaagtaggagataattttgctgttcttcattctaagggctgggctacagtgggctgttgtgacttattctgaatgtaatgctcctgctagtgggtactggtctggaatcctgagttgaatcttgactccattcattattactgttggatagaatctaaaacaaataacagttatgaaataaatatgatttcatatcttgcagaagcactaaaggcaatggagaaagtagcgagccacatcaatgagatgcagaagatctatgaggattatgggaccgtgtttgaccagctagtagctgagcagagcggaacagagaaggaggtccgtgagacatctgcaccctgggagcctagtgcatgtggtgtggggtctgtaggtgaccttctagataggctgccctgttaggactttcctggaggagaaaatgcctaagatttttcttgataacaatgtgtctaatgaactacacaatttacatatagacatatcataaaattcattacactggtttaaaatataaccttatgtcacgttcacattgtctggaacatccatggagggtgagagctggcagagggtggggtggagaaaggacatgggaactggcatgtg

SEQ ID NO: 366366 - DNA, 834 bp, Homo sapiens
gttgattttcttcttggtcttccctcgttgttcggtgtcgtgtatgctgtgctgtgtgtgtcatgttgtgcgtctctgcgtgtgttctagtcctccagcgcgtgtgtgtctgggttgtgtttgttttcactgcgccgggtgcgtattttcggctcctggactccctgtgtagtccgtatgcctccgacgccttctgggttggttccaagcccgccgtgtcccgccggcgtttttttttgggggaaacccggcccctgtcctggcccggggtttcccttgggaccggctggggcccgggttgcagtaacaacggggcccgccccccacgcgaggtgtttagaaaacctttctgggccccaggcgccccacaattttttttttttgtactgtatcttatttgatgatatttattttctctgccaagctgtatagtaaaaggaaaataagtcacatctggtcattggcatttgtatcgtcattctgtaaagacaaaagagtacctatataagaagctccacgtagtgcaaatcgacatctggtaggctgctcgcccccaggcagcagctagagtctgtaattctctgcgtcatcctcttctttttcttcatttttgctttttcttcgcttgagttcttctcatccacctgtcagcctcaagtccaggaggaaattctgtgatagctgcttcgctgcttgcagtcttaacaacttaatgatttctcgaatcgtgggcaacggagggagacggcaagtgctgagttttccggaggcagccatgatacgcggcaagcaccatccaaccctacctcacccaggaccttcaccgccgctccg

SEQ ID NO: 366367 - DNA, 3648 bp, Homo sapiens
agggccattcagagctctgcatggaggcagggtggccggccttcgtcccctcaggccagcagggcaaggcagctcccctcaatagagatccagcaatgggagcagaatcttgagaaatttcacatggatctgttcaggatgcgctgctatctggccagcctacaaggtggggagttaccgaacccaaagagtctccttgcagccgccagccgcccctccaagctggccctcggcaggctgggcatcttgtctgtttcctctttccatgctctggtatgttctagagatgactctgctctccggaaaaggacactgtcactgacccagcgagggagaaacaagaagggaatattttcttcgttaaaagggctggacacactggccagaaaaggcaaggagaagagaccttctataactcaggtcgatgaacttctgcatatatatggttcaacagtagacggtgttccccgagacaatgcatgggaaatccagacttatgtccactttcaggacaatcacggagttactgtagggatcaagccagagcacagagtagaagatattttgactttggcatgcaagatgaggcagttggaacccagccattatggcctacagcttcgaaaattagtagatgacaatgttgagtattgcatccctgcaccatatgaatatatgcaacaacaggtttatgatgaaatagaagtctttccactaaatgtttatgacgtgcagctcacgaagactgggagtgtgtgtgactttgggtttgcagttacagcgcaggtggatgagcgtcagcatctcagccggatatttataagcgacgttcttcccgatggcctggcgtatggggaagggctgagaaagggcaatgagatcatgaccttaaatggggaagctgtgtctgatcttgaccttaagcagatggaggccctgttttctgagaagagcgtcggactcactctgattgcccggcctccggacacaaaagcaaccctgtgtacatcctggtcagacagtgacctgttctccagggaccagaagagtctgctgccccctcctaaccagtcccaactgctggaggaattcctggataactttaaaaagaatacagccaatgatttcagcaacgtccctgatatcacaacaggtctgaaaaggagtcagacagatggcactctggatcaggtttcccacagggagaaaatggagcagacattcaggagtgctgagcagatcactgcactgtgcaggagttttaacgacagtcaggccaacggcatggaaggaccgcgggagaatcaggatcctcctccgaggcctctggcccgccacctgtctgatgcagaccgcctccgcaaagtcatccaggagcttgtggacacagagaagtcctacgtgaaggatttgagctgcctctttgaattatacttggagccacttcagaatgagacctttcttacccaagatgagatggagtcactttttggaagtttgccagagatgcttgagtttcagaaggtgtttctggagaccctggaggatgggatttcagcatcatctgactttaacaccctagaaaccccctcacagtttagaaaattactgttttcccttggaggctctttcctttattacgcggaccactttaaactgtacagtggattctgtgctaaccatatcaaagtacagaaggttctggagcgagctaaaactgacaaagccttcaaggcttttctggacgcccggaaccccaccaagcagcattcctccacgctggagtcctacctcatcaagccggttcagagagtgctcaagtacccgctgctgctcaaggagctggtgtccctgacggaccaggagagcgaggagcactaccacctgacggaagcactaaaggcaatggagaaagtagcgagccacatcaatgagatgcagaagatctatgaggattatgggaccgtgtttgaccagctagtagctgagcagagcggaacagagaaggaggtaacagaactttcgatgggagagcttctgatgcactctacggtttcctggttgaatccatttctgtctctaggaaaagctagaaaggaccttgagctcacagtatttgtttttaagagagccgtcatactggtttataaagaaaactgcaaactgaaaaagaaattgccctcgaattcccggcctgcacacaactctactgacttggacccatttaaattccgctggttgatccccatctccgcgcttcaagtcagactggggaatccagcagggacagaaaataattccatatgggaactgatccatacgaagtcagaaatagaaggacggccagaaaccatctttcagttgtgttgcagtgacagtgaaagcaaaaccaacattgttaaggtgattcgttctattctgagggagaacttcaggcgtcacataaagtgtgaattaccactggagaaaacgtgtaaggatcgcctggtacctcttaagaaccgagttcctgtttcggccaaattagcttcatccaggtctttaaaagtcctgaagaattcctccagcaacgagtggaccggtgagactggcaagggaaccttgctggactctgacgagggcagcttgagcagcggcacccagagcagcggctgccccacggctgagggcaggcaggactccaagagcacttctcccgggaaatacccacaccccggcttggcagattttgctgacaatctcatcaaagagagtgacatcctgagcgatgaagatgatgaccaccgtcagactgtgaagcagggcagccctactaaagacatcgaaattcagttccagagactgaggatttccgaggacccagacgttcaccccgaggctgagcagcagcctggcccggagtcgggtgagggtcagaaaggaggagagcagcccaaactggtccgggggcacttctgccccattaaacgaaaagccaacagcaccaagagggacagaggaactttgctcaaggcgcagatccgtcaccagtcccttgacagtcagtctgaaaatgccaccatcgacctaaattctgttctagagcgagaattcagtgtccagagtttaacatctgttgtcagtgaggagtgtttttatgaaacagagagccacggaaaatcatagtatgattcaatccagatatgggttaaattcctcattttacttttaaactggtggtaaagtggaaattgcaaaaaaaaaaaaaaaaaaacttgtccaaaaaaaaaaaaaaaaaaaaaaaaaaaaaaaaaaaaaaaaaaaaaaaaaaagggggggccccccaaaaatccccacgggggggccccaaaatatacgcgcgcgcaacccacagatttttgtggtgaaaaaggggggccccaataaaggggagcgagcataatataaagcagcagggcagaaggggcgcagcgagtataaaaacaaggggcggagggggaaaacaggggacaaacgtggggaccacttgtggggagagaggaaccacataatacgcgcggggggggggacaaacaatgtgggcggacaacacacacccacaacgcgaggaattataaagggcctccggggggaaaataataaaagatttagaggggatcaaagaggggc

SEQ ID NO: 366368 - DNA, 670 bp, Homo sapiens
gatcccggtgccagggaccctgcccagttccaggcgtcgcctaacccagaaacgactgggcgccgcgtcctggaaaggccccagcgcacggacatctgaggagctgtttccgttcctctgcccgccatgccgttcctggagctggacacgaatttgcccgccaaccgagtgcccgcggggctggagaaacgactctgcgccgccgctgcctccatcctgggcaaacctgcggaccgcgtgaacgtgacggtacggccgggcctggccatggcgctgagcgggtccaccgagccctgcgcgcagctgtccatctcctccatcggcgtagtgggcaccgccgaggacaaccgcagccacagcgcccacttctttgagtttctcaccaaggagctagccctgggccaggaccggatacttatccgctttttccccttggagtcctggcagattggcaagatagggacggtcatgacttttttatgattgggcacggagggatccagggcatctgtgaactggctgcttcttccagagagatctcttggcagagtgagggcctggagataaccagctttggattatcccgcatgcaacattcctgtgatcacataatcctcttcttcatcctcatatgaaataaatgaagagagcttcctcattcaaaaaaaaa

SEQ ID NO: 366369 - DNA, 818 bp, Homo sapiens
tcccgccaacaattagaatccttttctaatccccaaattgaacctttgaatgaagggctcggtttttccttttcttcccccttgtcggccctcaaaacccaatcattccttttaattaatttaattttttttagcccaagtttggctcttgttgcccagcttgaagtccaatggcgtaatctcggctcattgcacttccacctccaaggtcaaagtgattctcctgcccaagcctccccggtagctgggattacctcgtgcgatttccggcacgagcccgttcctggagctggacacgaatttgcccgccaaccgagtgcccgcggggctggagaaacgactctgcgccgccgctgcctccatcctgggcaaacctgcggaccgcgtgaacgtgacggtacggccgggcctggccatggcgctgagcgggtccaccgagccctgcgcgcagctgtccatctcctccatcggcgtagtgggcaccgccgaggacaaccgcagccacagcgcccacttctttgagtttctcaccaaggagctagccctgggccaggaccggatacttatccgctttttccccttggagtcctggcagattggcaagatagggacggtcatgacttttttatgattgggcacggagggatccagggcatctgtgaactggctgcttcttccagagagatctcttggcagagtgagggcctggagataaccagctttggattatcccgcatgcaacattcctgtgatcacataatcctcttcttcatcctcatatgaaataaatgaagagagcttcctcattcaaaaaaaaa

SEQ ID NO: 366370 - DNA, 1216 bp, Homo sapiens
  misc_feature (1019)..(1019): n is a, c, g, or t
taagctcccgttgtattggttattagggtcgagcctggggaagacccctataggtgtgtgtgtgtccttgtgtgtcgggggtgtggtgttcagacctctaatagggctaggaaccgggcgaccacagcgcggaagcttgagagggaaacccacctggcgccaggcaggagggtcgggggagacagggtgggtccactaccgggttaaagacctgtagtgggtggggctacacgtagggcggagacgatgggacttccggaaatcagccggcacacgtgacttttgtttgcagaagcgggaggtaccctaggcagccaatcggggagcgccgagtctctgtccagccaatgagaagccaggttgctgtggcgcctcgcccctcctccctggtccgcgagccttgggtacccccagcttttcttccgccagagctgtttccgttcctctgcccgccatgccgttcctggagctggacacgaatttgcccgccaaccgagtgcccgcggggctggagaaacgactctgcgccgccgctgcctccatcctgggcaaacctgcggaccgcgtgaacgtgacggtacggccgggcctggccatggcgctgagcgggtccaccgagccctgcgcgcagctgtccatctcctccatcggcgtagtgggcaccgccgaggacaaccgcagccacagcgcccacttctttgagtttctcaccaaggagctagccctgggccaggaccggatacttatccgctttttccccttggagtcctggcagattggcaagatagggacggtcatgacttttttatgattgggcacggagggatccagggcatctgtgaactggctgcttcttccagagagatctcttggcagagtgagggcctggagataaccagctttggattatcccgcatgcaacattcctgtgatcacataatcctcttcttcatcctcatatgaaataaatgaagagagcttcctcattcaaaaaaaaagaacaaaaaacaaaaaaaaanacaagaaaaaacccggaggcgcatatattcagaccggcggcggacaaaagcgggactaacaactggcgcactgggtcaaacggggtccccagaccccgcgctttttgctccaacggtggaaaccgccgcggcccatataggagggctaaaatcgaaacgccggtaccgataaaccgcgcagcacgacgcccagagag

SEQ ID NO: 366371 - DNA, 1737 bp, Homo sapiens
taagctcccgttgtattggttattagggtcgagcctggggaagacccctataggtgtgtgtgtgtccttgtgtgtcgggggtgtggtgttcagacctctaatagggctaggaaccgggcgaccacagcgcggaagcttgagagggaaacccacctggcgccaggcaggagggtcgggggagacagggtgggtccactaccgggttaaagacctgtagtgggtggggctacacgtagggcggagacgatgggacttccggaaatcagccggcacacgtgacttttgtttgcagaagcgggaggtaccctaggcagccaatcggggagcgccgagtctctgtccagccaatgagaagccaggttgctgtggcgcctcgcccctcctccctggtccgcgagccttgggtacccccagcttttcttccgccagagctgtttccgttcctctgcccgccatgccgttcctggagctggacacgaatttgcccgccaaccgagtgcccgcggggctggagaaacgactctgcgccgccgctgcctccatcctgggcaaacctgcggaccgcgtgaacgtgacggtacggccgggcctggccatggcgctgagcgggtccaccgagccctgcgcgcagctgtccatctcctccatcggcgtagtgggcaccgccgaggacaaccgcagccacagcgcccacttctttgagtttctcaccaaggagctagccctgggccaggaccggatacttatccgctttttccccttggagtcctggcagattggcaagatagggacggtcatgacttttttatgattgggcacggagggatccagggcatctgtgaactggctgcttcttccagagagatctcttggcagagtgagggcctggagataaccagctttggattatcccgcatgcaacattcctgtgatcacataatcctcttcttcatcctcatatgaaataaatgaagagagcttcctcattcaaaaaaaaacatgacttcttaccttctattatctctcctgggcatctggggccaccatgggcagcagggctggtggataagaccgtagggaacctggagggggatgatttagactgctcagatctggggctgggagactcagcctggaggctctgctctccacacccatctgcaggcctgtgggaaggtgtgagcagctggtccagctggggccttcctgcagactgctgacctgaggctcctgtcctcagccccaaaatgggaccagacctctgtactcctcctgaagtctactccctccatgactggctgtgcagcctgccacgccactctccccttttccccactgtagagtggaggcaggggttgcctgtgtccctttgggggttggtcgctggttttccagaagcagggtccccagtctgcccctcctcctccccagggttgcaagcttcgactccctccctttggcaagactcaaaccgtcctcccagctgccccatcaccccttcctggcagtagcaccacttttcataacctttccagcccaggggtccccaggctgggaggacagctggggggatgaatggcaggtaaggcttcctgtgtcttctctcctgttgcaactgtgccacctgcacacttacacactcatggacacaccatgcacatacacacatccacccgcatctagtcacgattcatcacattcacacacatatacaatcataccatttacacacagtta

SEQ ID NO: 366372 - DNA, 1163 bp, Homo sapiens
taagctcccgttgtattggttattagggtcgagcctggggaagacccctataggtgtgtgtgtgtccttgtgtgtcgggggtgtggtgttcagacctctaatagggctaggaaccgggcgaccacagcgcggaagcttgagagggaaacccacctggcgccaggcaggagggtcgggggagacagggtgggtccactaccgggttaaagacctgtagtgggtggggctacacgtagggcggagacgatgggacttccggaaatcagccggcacacgtgacttttgtttgcagaagcgggaggtaccctaggcagccaatcggggagcgccgagtctctgtccagccaatgagaagccaggttgctgtggcgcctcgcccctcctccctggtccgcgagccttgggtacccccagcttttcttccgccagagctgtttccgttcctctgcccgccatgccgttcctggagctggacacgaatttgcccgccaaccgagtgcccgcggggctggagaaacgactctgcgccgccgctgcctccatcctgggcaaacctgcggaccgcgtgaacgtgacggtacggccgggcctggccatggcgctgagcgggtccaccgagccctgcgcgcagctgtccatctcctccatcggcgtagtgggcaccgccgaggacaaccgcagccacagcgcccacttctttgagtttctcaccaaggagctagccctgggccaggaccggatacttatccgctttttccccttggagtcctggcagattggcaagatagggacggtcatgacttttttatgattgggcacggagggatccagggcatctgtgaactggctgcttcttccagagagatctcttggcagagtgagggcctggagataaccagctttggattatcccgcatgttcgcttggcgaacaatgcggggggtcccagggtcacccgccacataccagacaaaaatacacacaacgtgtgtacctctttgcaatacttgcaaatattgccactgttgcttggacttagaagaagaaaatccccgtgacttcttcctcatcaccttgatggctttattctcaccttgtggggcatgtatgtatatatggcttcatggccgactgcaatctgagtcctgggaactggcctgcgg

SEQ ID NO: 366373 - DNA, 1017 bp, Homo sapiens
  misc_feature (941)..(941): n is a, c, g, or t
  misc_feature (959)..(959): n is a, c, g, or t
  misc_feature (962)..(962): n is a, c, g, or t
  misc_feature (966)..(966): n is a, c, g, or t
taagctcccgttgtattggttattagggtcgagcctggggaagacccctataggtgtgtgtgtgtccttgtgtgtcgggggtgtggtgttcagacctctaatagggctaggaaccgggcgaccacagcgcggaagcttgagagggaaacccacctggcgccaggcaggagggtcgggggagacagggtgggtccactaccgggttaaagacctgtagtgggtggggctacacgtagggcggagacgatgggacttccggaaatcagccggcacacgtgacttttgtttgcagaagcgggaggtaccctaggcagccaatcggggagcgccgagtctctgtccagccaatgagaagccaggttgctgtggcgcctcgcccctcctccctggtccgcgagccttgggtacccccagcttttcttccgccagagctgtttccgttcctctgcccgccatgccgttcctggagctggacacgaatttgcccgccaaccgagtgcccgcggggctggagaaacgactctgcgccgccgctgcctccatcctgggcaaacctgcggaccgcgtgaacgtgacggtacggccgggcctggccatggcgctgagcgggtccaccgagccctgcgcgcagctgtccatctcctccatcggcgtagtgggcaccgccgaggacaaccgcagccacagcgcccacttctttgagtttctcaccaaggagctagccctgggccaggaccggatacttatccgctttttccccttggagtcctggcagattggcaagatagggacggtcatgacttttttatgattgggcacggagggatccagggcatctgtgaactggctgcttcttccagagagatctcttggcagagtgagggcctggagataaccagctttggattatcccgcatgcaacattcctgtgatcacataangttcacttctttctattncantccncgtcaaggtattgaaattaataagagctttcccctctcttttcgttgttcg

SEQ ID NO: 366374 - DNA, 467 bp, Homo sapiens
tacctattccactgtgtgctccacctgtgtgctcgtgaacgtgacggtacggccgggcctggccatggcgctgagcgggtccaccgagccctgcgcgcagctgtccatctcctccatcggcgtagtgggcaccgccgaggacaaccgcagccacagcgcccacttctttgagtttctcaccaaggagctagccctgggccaggaccggatacttatccgctttttccccttggagtcctggcagattggcaagatagggacggtcatgacttttttatgattgggcacggagggatccagggcatctgtgaactggctgcttcttccagagagatctcttggcagagtgagggcctggagataaccagctttggattatcccgcatgcaacattcctgtgatcacataatcctcttcttcatcctcatatgaaataaatgaagagagcttcctcattcaaaaaaaaa

SEQ ID NO: 366375 - DNA, 876 bp, Homo sapiens
taagctcccgttgtattggttattagggtcgagcctggggaagacccctataggtgtgtgtgtgtccttgtgtgtcgggggtgtggtgttcagacctctaatagggctaggaaccgggcgaccacagcgcggaagcttgagagggaaacccacctggcgccaggcaggagggtcgggggagacagggtgggtccactaccgggttaaagacctgtagtgggtggggctacacgtagggcggagacgatgggacttccggaaatcagccggcacacgtgacttttgtttgcagaagcgggaggtaccctaggcagccaatcggggagcgccgagtctctgtccagccaatgagaagccaggttgctgtggcgcctcgcccctcctccctggtccgcgagccttgggtacccccagcttttcttccgccagagctgtttccgttcctctgcccgccatgccgttcctggagctggacacgaatttgcccgccaaccgagtgcccgcggggctggagaaacgactctgcgccgccgctgcctccatcctgggcaaacctgcggaccgcgtgaacgtgacggtacggccgggcctggccatggcgctgagcgggtccaccgagccctgcgcgcagctgtccatctcctccatcggcgtagtgggcaccgccgaggacaaccgcagccacagcgcccacttctttgagtttctcaccaaggagctagccctgggccaggaccggatctcactctgttgccctggctggagtgcagtagcacgatcatggctcaccgcagtctcgactttcctgggctcaggtgagtctcccacctcagccttctaagtagctgggactacaggtgcgcatcaccatgactg

SEQ ID NO: 366376 - DNA, 1198 bp, Homo sapiens
taagctcccgttgtattggttattagggtcgagcctggggaagacccctataggtgtgtgtgtgtccttgtgtgtcgggggtgtggtgttcagacctctaatagggctaggaaccgggcgaccacagcgcggaagcttgagagggaaacccacctggcgccaggcaggagggtcgggggagacagggtgggtccactaccgggttaaagacctgtagtgggtggggctacacgtagggcggagacgatgggacttccggaaatcagccggcacacgtgacttttgtttgcagaagcgggaggtaccctaggcagccaatcggggagcgccgagtctctgtccagccaatgagaagccaggttgctgtggcgcctcgcccctcctccctggtccgcgagccttgggtacccccagcttttcttccgccagagctgtttccgttcctctgcccgccatgccgttcctggagctggacacgaatttgcccgccaaccgagtgcccgcggggctggagaaacgactctgcgccgccgctgcctccatcctgggcaaacctgcggaccgatacttatccgctttttccccttggagtcctggcagattggcaagatagggacggtcatgacttttttatgattgggcacggagggatccagggcatctgtgaactggctgcttcttccagagagatctcttggcagagtgagggcctggagataaccagctttggattatcccgcatgcaacattcctgtgatcacataatcctcttcttcatcctcatatgaaataaatgaagagagcttcctcattcaaaaaaaaaaaaacaaaaaaaaaaaaaaacttttggggcggcccgggccccgaaaaagttttaaaccctcgctttgggggcggggccccatggtatggaattgtggccaagcggtcccaaggacacccgggccgcttgtgtgggggttttctcccccataaaaaaaaaggcccgggggacacaccgcagcgtctgcacacaatcccgagagggggttcgcgaggccaagaggggtcctacacgggatcccagggaaggaattaaatacccggagagtggtcgtgacgaggcagctgcacacactcatcacgatcaccaccactccaacaacctcagaacaacatcgcaacggcgacgacacaggcacacaagacacacagcaac

SEQ ID NO: 366377 - DNA, 799 bp, Homo sapiens
agctgtttccgttcctctgcccgccatgccgttcctggagctggacacgaatttgcccgccaaccgagtgcccgcggggctggagaaacgactctgcgccgccgctgcctccatcctgggcaaacctgcggaccggtaagcgtgggccgggcagcacggggcgaggggaggttggtgggccaggggtccggccctgtccctgctccgcctccccgacagtgaccccgaatcttttccccagggaccactccccactcctttcctcacgccaagctctgactttccgtgctccacgatcccgcggctccccctccgcacgtctttcccttgtcgccctccccagtcatgacccgggcgtgaccttcagggaccgcggcccgtatcgggatccctgccccgcgaacactgcgcgtttcggctttcgcgcgctcgggtcccgtccccagaggtagcccggccggctccaacttcgggcaaaacttttcatgtccccctcagcgcgtgaacgtgacggtacggccgggcctggccatggcgctgagcgggtccaccgagccctgcgcgcagctgtccatctcctccatcggcgtagtgggcaccgccgaggacaaccgcagccacagcgcccacttctttgagtttctcaccaaggagctagccctgggccaggaccggtgcgtaggggtagtaggggatccatgtgggactgccgcagactggagccactgatcctgcctcagggggaaaaacccatttcttgccctgcccagtaaggacacatcagggtctggagctttgg

SEQ ID NO: 366378 - DNA, 998 bp, Homo sapiens
taagctcccgttgtattggttattagggtcgagcctggggaagacccctataggtgtgtgtgtgtccttgtgtgtcgggggtgtggtgttcagacctctaatagggctaggaaccgggcgaccacagcgcggaagcttgagagggaaacccacctggcgccaggcaggagggtcgggggagacagggtgggtccactaccgggttaaagacctgtagtgggtggggctacacgtagggcggagacgatgggacttccggaaatcagccggcacacgtgacttttgtttgcagaagcgggaggtaccctaggcagccaatcggggagcgccgagtctctgtccagccaatgagaagccaggttgctgtggcgcctcgcccctcctccctggtccgcgagccttgggtacccccagcttttcttccgccagagctgtttccgttcctctgcccgccatgccgttcctggagctggacacgaatttgcccgccaaccgagtgcccgcggggctggagaaacgactctgcgccgccgctgcctccatcctgggcaaacctgcggaccgcgtgaacgtgacggtacggccgggcctggccatggcgctgagcgggtccaccgagccctgcgcgcagctgtccatctcctccatcggcgtagtgggcaccgccgaggacaaccgcagccacagcgcccacttctttgagtttctcaccaaggagctagccctgggccaggaccggatacttatccgctttttccccttggagtcctggcagattggcaagatagggacggtcatgacttttttatgattgggcacggagggatccagggcatctgtgaactggctgcttcttccagagagatctcttggcagagtgagggcctggagataaccagctttggattatcccgcatgcaacattcctgtgatcacataatcctcttcttcatcctcatatgaaataaatgaagagagcttcctcattcaaaaaaaaa

SEQ ID NO: 366379 - DNA, 1255 bp, Homo sapiens
taagctcccgttgtattggttattagggtcgagcctggggaagacccctataggtgtgtgtgtgtccttgtgtgtcgggggtgtggtgttcagacctctaatagggctaggaaccgggcgaccacagcgcggaagcttgagagggaaacccacctggcgccaggcaggagggtcgggggagacagggtgggtccactaccgggttaaagacctgtagtgggtggggctacacgtagggcggagacgatgggacttccggaaatcagccggcacacgtgacttttgtttgcagaagcgggaggtaccctaggcagccaatcggggagcgccgagtctctgtccagccaatgagaagccaggttgctgtggcgcctcgcccctcctccctggtccgcgagccttgggtacccccagcttttcttccgccagagctgtttccgttcctctgcccgccatgccgttcctggagctggacacgaatttgcccgccaaccgagtgcccgcggggctggagaaacgactctgcgccgccgctgcctccatcctgggcaaacctgcggaccgcgtgaacgtgacggtacggccgggcctggccatggcgctgagcgggtccaccgagccctgcgcgcagctgtccatctcctccatcggcgtagtgggcaccgccgaggacaaccgcagccacagcgcccacttctttgagtttctcaccaaggagctagccctgggccaggaccggatacttatccgctttttccccttggagtcctggcagattggcaagatagggacggtcatgacttttttatgattgggcacggagggatccagggcatctgtgaactggctgcttcttccagagagatctcttggcagagtgagggcctggagataaccagctttggattatcccgcatgcaacattcctgtgatcacataatcctcttcttcatcctcatatgaaataaatgaagagagcttcctcattcaaaaaaaaacaaaataaaaaagtattaaggcgaagattaaaaaaattttgcattacataatttacacgaaagcaatgctatcacctcccctgtgtggacttgggagaggactgggccattctccttagagagaagtggggtggcttttaggatggcaagggacttcctgtaacaacgcatctcatatttggaatgactattaaaaaaacaacaatgtgcaatcaaagtcctcggccacattgtgaactttggggatgtagctctga

SEQ ID NO: 366380 - DNA, 1418 bp, Homo sapiens
taagctcccgttgtattggttattagggtcgagcctggggaagacccctataggtgtgtgtgtgtccttgtgtgtcgggggtgtggtgttcagacctctaatagggctaggaaccgggcgaccacagcgcggaagcttgagagggaaacccacctggcgccaggcaggagggtcgggggagacagggtgggtccactaccgggttaaagacctgtagtgggtggggctacacgtagggcggagacgatgggacttccggaaatcagccggcacacgtgacttttgtttgcagaagcgggaggtaccctaggcagccaatcggggagcgccgagtctctgtccagccaatgagaagccaggttgctgtggcgcctcgcccctcctccctggtccgcgagccttgggtacccccagcttttcttccgccagagctgtttccgttcctctgcccgccatgccgttcctggagctggacacgaatttgcccgccaaccgagtgcccgcggggctggagaaacgactctgcgccgccgctgcctccatcctgggcaaacctgcggaccgcgtgaacgtgacggtacggccgggcctggccatggcgctgagcgggtccaccgagccctgcgcgcagctgtccatctcctccatcggcgtagtgggcaccgccgaggacaaccgcagccacagcgcccacttctttgagtttctcaccaaggagctagccctgggccaggaccggatacttatccgctttttccccttggagtcctggcagattggcaagatagggacggtcatgacttttttatgattgggcacggagggatccagggcatctgtgaactggctgcttcttccagagagatctcttggcagagtgagggcctggagataaccagctttggattatcccgcatgcaacattcctgtgatcacataatcctcttcttcatcctcatatgaaataaatgaagagagcttcctcattcaaaaaaaaaaaaaaaaaaaaaagggaaaaaaaaaaaaaaaaaaaaaaaaaaaatttggggggggggcgggagccttaggaaaaaagcgttgttaaaaaccactgctggtgggggagccgggcggcgcccgacgtagagtagtaacaggaccaccgggggcgaccaacgagcgcgtggctaccccaagaggagcaacctcgtggggaccagcgagcaaagcgggcgcgggtggagtttctctccccccgcatattaaaaacagacagcgccgcggggggaagccacccgagggcggtgtcttagaacacaacccccaggagggcgggctcggaggagcggaacaacgagggggagactacataccaacagaggaggtaccacagggagaggctcaggtatataaaaattcggccccgggcgcggggggat

SEQ ID NO: 366381 - DNA, 988 bp, Homo sapiens
taagctcccgttgtattggttattagggtcgagcctggggaagacccctataggtgtgtgtgtgtccttgtgtgtcgggggtgtggtgttcagacctctaatagggctaggaaccgggcgaccacagcgcggaagcttgagagggaaacccacctggcgccaggcaggagggtcgggggagacagggtgggtccactaccgggttaaagacctgtagtgggtggggctacacgtagggcggagacgatgggacttccggaaatcagccggcacacgtgacttttgtttgcagaagcgggaggtaccctaggcagccaatcggggagcgccgagtctctgtccagccaatgagaagccaggttgctgtggcgcctcgcccctcctccctggtccgcgagccttgggtacccccagcttttcttccgccagagctgtttccgttcctctgcccgccatgccgttcctggagctggacacgaatttgcccgccaaccgagtgcccgcggggctggagaaacgactctgcgccgccgctgcctccatcctgggcaaacctgcggaccgcgtgaacgtgacggtacggccgggcctggccatggcgctgagcgggtccaccgagccctgcgcgcagctgtccatctcctccatcggcgtagtgggcaccgccgaggacaaccgcagccacagcgcccacttctttgagtttctcaccaaggagctagccctgggccaggaccggatacttatccgctttttccccttggagtcctggcagattggcaagatagggacggtcatgacttttttatgattgggcacggagggatccagggcatctgtgaactggctgcttcttccagagagatctcttggcagagtgagggcctggagataaccagctttggattatcccgcatgcccactcttgtggggaaatgatggtgttgttagtcagtaaatgaaataaggccagagagcttcgtcattc

SEQ ID NO: 366382 - DNA, 1238 bp, Homo sapiens
taagctcccgttgtattggttattagggtcgagcctggggaagacccctataggtgtgtgtgtgtccttgtgtgtcgggggtgtggtgttcagacctctaatagggctaggaaccgggcgaccacagcgcggaagcttgagagggaaacccacctggcgccaggcaggagggtcgggggagacagggtgggtccactaccgggttaaagacctgtagtgggtggggctacacgtagggcggagacgatgggacttccggaaatcagccggcacacgtgacttttgtttgcagaagcgggaggtaccctaggcagccaatcggggagcgccgagtctctgtccagccaatgagaagccaggttgctgtggcgcctcgcccctcctccctggtccgcgagccttgggtacccccagcttttcttccgccagagctgtttccgttcctctgcccgccatgccgttcctggagctggacacgaatttgcccgccaaccgagtgcccgcggggctggagaaacgactctgcgccgccgctgcctccatcctgggcaaacctgcggaccgcgtgaacgtgacggtacggccgggcctggccatggcgctgagcgggtccaccgagccctgcgcgcagctgtccatctcctccatcggcgtagtgggcaccgccgaggacaaccgcagccacagcgcccacttctttgagtttctcaccaaggagctagccctgggccaggaccgggttccaggtgaagttcacgggagactcacagagtagtgaaagaccattggcctggatgtctagacatctgctttctgggtcctgcatagctgggggaccccagacaaacttggaaatgaaccatctccagttggcaacctcctcttctgtgaatacaggggaaaagacctccctcccccacaagaagcgtctgcaacccaaacctggcgttctgtgaccgagttaaagtttcctcttgggatacttatccgctttttccccttggagtcctggcagattggcaagatagggacggtcatgacttttttatgattgggcacggagggatccagggcatctgtgaactggctgcttcttccagagagatctcttggcagagtgagggcctggagataaccagctttggattatcccgcatgcaacattcctgtgatcacataatcctcttcttcatcctcatatgaaataaatgaagagagcttcctcattcaaaaaaaaa

SEQ ID NO: 366383 - DNA, 933 bp, Homo sapiens
taagctcccgttgtattggttattagggtcgagcctggggaagacccctataggtgtgtgtgtgtccttgtgtgtcgggggtgtggtgttcagacctctaatagggctaggaaccgggcgaccacagcgcggaagcttgagagggaaacccacctggcgccaggcaggagggtcgggggagacagggtgggtccactaccgggttaaagacctgtagtgggtggggctacacgtagggcggagacgatgggacttccggaaatcagccggcacacgtgacttttgtttgcagaagcgggaggtaccctaggcagccaatcggggagcgccgagtctctgtccagccaatgagaagccaggttgctgtggcgcctcgcccctcctccctggtccgcgagccttgggtacccccagcttttcttccgccagagctgtttccgttcctctgcccgccatgccgttcctggagctggacacgaatttgcccgccaaccgagtgcccgcggggctggagaaacgactctgcgccgccgctgcctccatcctgggcaaacctgcggaccgcgtgaacgtgacggtacggccgggcctggccatggcgctgagcgggtccaccgagccctgcgcgcagctgtccatctcctccatcggcgtagtgggcaccgccgaggacaaccgcagccacagcgcccacttctttgagtttctcaccaaggagctagccctgggccaggaccggtgcgtaggggtagtaggggatccatgtgggactgccgcagactggagccactgatcctgcctcagggggaggccccctgaccccttaggttcctgctgttaggaccatcttcaaagtgcgagcaggattgaatgaatttctggctctgctcctcagtgtgtaagtctgtgaaccgggaaggctctcttttaaca

SEQ ID NO: 366384 - DNA, 568 bp, Homo sapiens
ccatatatggtactcgctcgctggtctcagccatgagctttgtgggcgcccggagaccagctttatacaattattcccaaatcttctaaactgacagtgagggagagtaatttgaaaggactgctcaactcaacgtcatttgaagatttgcaccacagctgcatttttccaatttcctggcatctattctgctctcctggacttttcaaaaacaattgtaagtggatgaataaatataataactgattccattgatactcttagaccatcctttggactttctgcttttggacattttacagtttaaaatttatttatcatctatcgatgtttcccaaagaaggactcaaagtacacattgtcaaagatctcatggatctaattaaggacagggaacaggtacagaatcatacattgtctctacacagaggggataatttctgaaggaaagaagaaagtaaattccttaatcacccttatgattataactacacaattgaatttgtttacttcatcagctttgggaataaagtaaggtcctacacttttcaatttttcaagagaaaat

SEQ ID NO: 366385 - DNA, 251 bp, Homo sapiens
ccatatatggtactcgctcgctggtctcagccatgagctttgtgggcgcccggagaccagctttatacaattattcccaaatcttctaaactgacagtgagggagagtaatttgaaaggactgctcaactcaacgtcatttgaagatttgcaccacagctgcatttttccaatttcctggcatctattctgctctcctggacttttcaaaaacaattgtaagtggatgaataaatataataactgattcca

SEQ ID NO: 366386 - DNA, 248 bp, Homo sapiens
  misc_feature (41)..(41): n is a, c, g, or t
tcacagcaaatactcaaacgactactacgtatacggccaanaattgtgcaaaacagactttatacaattattcccaaatcttctaaactgacagtgagggagagtaatttgaaaggactgctcaactcaacgtcatttgaagatttgcaccacagctgcatttttccaatttcctggcatctattctgctctcctggacttttcaaaaacaattgtaagtggatgaataaatataataactgattcca

SEQ ID NO: 366387 - DNA, 3589 bp, Homo sapiens
actcgtgcccaccgctccgcgcgccagcagagacaggcctctagctttacatcacctttatacaattattcccaaatcttctaaactgacagtgagggagagtaatttgaaaggactgctcaactcaacgtcatttgaagatttgcaccacagctgcatttttccaatttcctggcatctattctgctctcctggacttttcaaaaacaatttctttcagatccctggaggcctctcccagggcctgtggtgtggagagttggacttgaccctactgtaagagacccaacttccaaagactgcatcagatgaaaggctctccatatagactacagacttgtcagctggttaaggaggcaaacagaacagtctgctacaaactccagtccatgtatctgtgctgaaaataaaaggagtcttcaggaatcaaagaagaaaatatttttataaagaaattttattgcataattcttgtatacaataaacataggaaaagggtttttaatgaaaattcatgtcatttttcaaaagtgttgaactgtctggagaaaaattattacaaagctatctaaggcaaaaataatatttaaccatctaaacaaaagataatcccctttaccatttgttttgtatttaaagcaagacattttaaacacaagtaatacggagaagttttcaaattgctacgtcatttgcattaagaatttaaatgcatctaagaagtgaagagtttaaacacatgggaatgttctctagtaacagatattgctgctttcttcagatccattctgcttgaatgtaaggctatactttttgcacaccaacagaattctgcatcttctaatggtacagtaagagctggagtgcagagagggaaagtcccatgcacttcctatgttaaatggcataactcccacagatcacatacaccttgccatattgactcagttcattgcactccatatcctgcaaaaataaatctagtgcttgacagctgacattattgctcactgacgttttagtaatatatttctttcacataagacagaaatatactgaaatttgataccacttaaacccaaaagcaatctggaattaaaccacatgcatacaccccactttttttcaatagatgttgcatttttcttaaagtcgatcctggaaaatgtggtagaagaaaaactggctttccttgaaacaaagactaaggattagaaaaagaggggcttttttttgagtgaaatgttaagccctacgatataaatgaaggaacaatgacaatccagtctctgtggagagggaagaggcctctcactgatcctccttgtctacctcaacactgtggcccgcgtcccacggaccccaggggaggctatcctacagagctggagcagccgagaggtgctgtgtgtgcctctgaaggatgggctggaggctgtggcaaagccctgagagacctatttctttggccaccccaacgtggaatcctggggtcactgggaaatactagggctttctctgtgagattgggaaagacttctaggatggtctggacgctgatggctgaggtctggtcttaaattttacacgtcatttctagagagacgtgaagcctacgaattccagagtgaacccagggcctggggtgaaatgtcttggaacctgagggaacatctggatgctcagatagaaacctcttatctgagcatccagataagaccagagctcatctggaatcaagtgtacatgactataaagagtccaccgggatgtcaggcttcttagagaggtgcttgtagagagagacatgtaggaatgtggacatggccacactgacgctgtttgtcacagattttcattctaatttcttgttgtttctttaaaattgtcaaatgtccctctttcttttttttctcttagtgcttacaaggaaagctgtcagtcttcataaactttcaaagagttacaaaaatacgtattttttaagctacaattcaagattagcatccaaacctacaaacatgatgtacattcgtcacacaccatacaaccttcacacctggctacagcaatgttgacttacatcaccattgtttatacttgtgaaaactttattgtgcacagtgacatccattccgccagacttaatgttataaagcagctgagcagagcttctcaaagtaaaactagccgtgttgctacaaagggaaattctggctcttggcccaactgtttccataccaatcagctaagtcagcctcctctctgcttctttccatttcaaatgcctgggctttggcctttgaggcaattagaaccagatcagtttaattttacaacactgatctcaactgtatagcaatatagtgaatttgccctgagagtatcaatacattttacaaatattatgagtcccagtttatgcatgaagaaataggcacagagaggctacatggcttgtcctttgtcacacagaagattatgttgagtatgaaacttgagcttccgttttagctttccatgtgaatgcccatgtctctccagaggtcacctggagctctgtgcacaagggccaccccacttggattctgtttgttacttgtactgccctgtcagtttttctgcccagcactgaatttttcagtacccaagacttcatccttgatcttctctgctctctctcattcctgctgccttgatgaagtgtgttgcccctaatattttattttacacagtggaatttgtgcccttccagctgcagctgcttttaggtgtggagagaaggacttataaaaaggcgatggacaggcgttcttctttttgaattttagaccaagtggggctcaatattttacagttgtcttacatttgaatgctgctttctttttcttttcttttttgacaggatctcactctgttcaggctggagtgcagtggtatgagctcagctcactgcaacctccgcctcccaagttcaagcgattctcctgactgagcctcaggagtagctgggactacatgcatgcgccaccatgcccagctagttcttatattgttattattattattttttgagatggagtgtcacattgtcatgtaggctggagtgcagtggcatgatctcggctaactgcaagctccgccttccgggttcacgccattctcctgcctcagcctcctgagtagctgggactacaggtgcccaccaccacgcctggctaatttttcgtatttttagtagagacggggtttcaccatgttagccaggatggtctccatctcctgacctcgtgatccacccgccttggcctcccaaagtgctgggatcacaggcgtgagccattgcactgggcctccaatgctttcgatggaaaataaaataaaataaaggcctaacagtgtggtaatgtttacttctctgccacaacactcagtatgcccctttggatctggcaacaatttaacataaggaaagactttagaccttcacaccctttcagtgagaaaaaaaaaaatgaccttagctcaaactttccacaaagctgaacagtctcattaaaacatcactccaaccttatcttaggtgggc

SEQ ID NO: 366388 - DNA, 863 bp, Homo sapiens
gcagccatttggaggtatgaagagatcttggaaatagaggccatgtgtgttgaaacaagaccgaacaactccaagttcctgaagacttcatttcaccaacccagaacctccttgatcatcacagtgttcaaatggtttccagcaacattcctaccacctactttgctgacacaaaggtgcataaacagaagtcctatgtggtcgaaccattttacattttcaccagcaatgaaggagggttcctgttgctctaccatttggtactgtcagcgttttggatattagccgtcctaatagcctttgcatggatgattgtctgtcctctgttgggccccttctgaagagttggagttggctttatacaattattcccaaatcttctaaactgacagtgagggagagtaatttgaaaggactgctcaactcaacgtcatttgaagatttgcaccacagctgcatttttccaatttcctggcatctattctgctctcctggacttttcaaaaacaattgtaagtggatgaataaatataataactgattccattgatactcttagaccatcctttggactttctgcttttggacattttacagtttaaaatttatttatcatctatcgatgtttcccaaagaaggactcaaagtacacattgtcaaagatctcatggatctaattaaggacagggaacaggtacagaatcatacattgtctctacacagaggggataatttctgaaggaaagaagaaagtaaattccttaatcacccttatgattataactacacaattgaatttgtttacttcatcagctttgggaataaagtaaggtcctacacttttcaatttttcaagagaaaat

SEQ ID NO: 366389 - DNA, 541 bp, Homo sapiens
  misc_feature (507)..(509): n is a, c, g, or t
  misc_feature (515)..(515): n is a, c, g, or t
actcgtgcccaccgctccgcgcgccagcagagacaggcctctagctttacatcacctttatacaattattcccaaatcttctaaactgacagtgagggagagtaatttgaaaggactgctcaactcaacgtcatttgaagatttgcaccacagctgcatttttccaatttcctggcatctattctgctctcctggacttttcaaaaacaatttctttcagatccctggaggcctctcccagggcctgtggtgtggagagttggacttgaccctactgtaagagacccaacttccaaagactgcatcagatgaaaggctctccatatagactacagacttgtcagctggttaaggaggcaaacagaacagtctgctacaaactccagtccatgtatctgtgctgaaaataaaaggagtcttcaggaatcaaagaagaaaatatttttataaagaaattttattgcataattcttgtatacaataaacacggatgcggccgaaattttnnntttttnttcataccccacccccgcctccatct

SEQ ID NO: 366390 - DNA, 572 bp, Homo sapiens
gctgtaggcagaagtgtcttgcagcagctcctgtaaatcttaaaagacagctggtgcgtgtcttttttcctttttttttcccttcccccttcctgctgcgctgaatatggatatggtgagtgaatctagagcagccatttggaggtatgaagagatcttggaaatagaggccatgtgtgttgaaacaagaccgaacaactccaagttcctgaagacttcatttcaccaacccagaacctccttgatcatcacaggtgaacttattcctaaagcaaacactctcattttccttccttctctactttacaaccatgctgaactgcttgttattccttgaactgatcacacagttccgtgcttctgtgccttacctcttgctgctcctccaccttatgctttgtctttctagcaaattctttcttattaagatctaccttgattgcgccaccgcactccagcctgggcgacagactgagactccatctcaaaaaaaaaaacaacaacaatcctacctctagggtttccagctttgagaagactactcactcacagccaggcaaatttggtgattc

SEQ ID NO: 366391 - DNA, 799 bp, Homo sapiens
gcagccatttggaggtatgaagagatcttggaaatagaggccatgtgtgttgaaacaagaccgaacaactccaagttcctgaagacttcatttcaccaacccagaacctccttgatcatcacagtggtcgaaccattttacattttcaccagcaatgaaggagggttcctgttgctctaccatttggtactgtcagcgttttggatattagccgtcctaatagaaaagagtgagtaactagtggcctttagatgagccaaccgcaagcctggactcatctttgacatctcctgcttccctccataatgaccgtcgttgctcctcttgcccaagcctttgcatggatgattgtctgtcctctgttgggccccttctgaagagttggagttggttgcaaactatagaaaccatttgggctggtttgagcataaaaggaaattactgggagttattaggtgctcggtgattcattgggaggtctggcaaaaaagaagctcaaggctaagctcataggaacacagcccggcatctcacacagaagtggcttgatgaggattctactgcctccacagctcctgccatcatcttcatctgcaccatagatgctcagaacccagtctgtgtctgcatgttgctgacttccaaatgagagcttcatgagagtgtatttggttggtagaacataggtcccagaccttctccctgggagctggaagagatgctgggaaattctgccctggaaaaataaaactcacaatgtgggaaacaaagaaaatgtacagcaggggtttaacagaat

SEQ ID NO: 366392 - DNA, 627 bp, Homo sapiens
gagcgggagagcgtagtggaggaggcgcggttgtgagtagtaccgggagtggggtgatcccgggctaggggagcgcggcggccgcgatcgggcttagtcggagctccgaagggagtgactaggacacccgggtgggctagtctctaacttctgctcttcccagccgctcgctattggcgtcggcgtcaccggttgaaggcctaccgttctgggcaagggaggtgacgctggcgcgcgaagattcgccgcttcagccttcttgcttgcagcccctctgatgcctgtatggcgtgatagcctgagggcttgcgggccggggctcccgtgtgtgccccctgctgaaggcgggacatgccctgtatgcccgggagttgggcgcctgccgcaccgtgttttcccacggcagtccggctttggcaggtaccggtgggcggtggggcccttttccccagagggcacgggccaaacctttatccccggccggtgaagttgcgacgtgtgccaacagggggcgttggcaccttttggggctctttgggcctcatttcttttaccccagaaggtagtaaccgcgagcgcgcaacaatttttgtatcaccattgtggcggccctattggttctccctt

SEQ ID NO: 366393 - DNA, 4452 bp, Homo sapiens
gagcgggagagcgtagtggaggaggcgcggttgtgagtagtaccgggagtggggtgatcccgggctaggggagcgcggcggccgcgatcgggcttagtcggagctccgaagggagtgactaggacacccgggtgggctacttttcttccggtgcttttgctttttttttcctttgggctcgggctgagtgtcgcccactgagcaaagattccctcgtaaaacccagagcgaccctcccgtcaattgttgggctcgggagtgtcgcggtgccccgagcgcgccgggcgcggaggcaaagggagcggagccggccgcggacggggcccggagcttgcctgcctccctcgctcgccccagcgggttcgctcgcgtagagcgcagggcgcgcgcgatgaaggcggtgagcccggtgcgcccctcgggccgcaaggcgccgtcgggctgcggcggcggggagctggcgctgcgctgcctggccgagcacggccacagcctgggtggctccgcagccgcggcggcggcggcggcggcagcgcgctgtaaggcggccgaggcggcggccgacgagccggcgctgtgcctgcagtgcgatatgaacgactgctatagccgcctgcggaggctggtgcccaccatcccgcccaacaagaaagtcagcaaagtggagatcctgcagcacgttatcgactacatcctggacctgcagctggcgctggagacgcacccggccctgctgaggcagccaccaccgcccgcgccgccacaccacccggccgggacctgtccagccgcgccgccgcggaccccgctcactgcgctcaacaccgacccggccggcgcggtgaacaagcagggcgacagcattctgtgccgctgagccgcgctgtccaggtgagcgcgcatttcccgtctcgggtgcccggtcaccagagacgcccgtccccgagggcttccggggccaggcaccgcggtgttctttgcccccagcgtttctgagagcaaactcccaaggaagtaaatcccctctctccctgccacctaagtagcaagtaaacccgtacttagccttagaactcgaggttcagtctcggtggagacgggtcagcccttgtccccgccgtccccgtgttttttctggtggtcagcgggctcttctgccttccctagttcccgagggagggcaccctcgtgggcatgggagctgccccggtgtcctcccgtgcagtctgtcacccacaaagggggacgcgggcagggcgccggagtgggtcccctctccgggcttcccgagggccgcagctgcctgctcggcgcctggcccggccgcgggcgggtgttgtctgacctggtggtttgttttgggttgttgatcaagcatgtcttgagtttggtcggtggcgccagttagtctgcagcgagaaggttcacacaccccctctattcattcctcttccacaggtgtgcggccgcctgagcccgagccaggagcactagagagggagggggaagagcagaagttagagaaaaaaagccaccggaggaaaggaaaaaacatcggccaacctagaaacgttttcattcgtcattccaagagagagagaggaaagaaaaatacaactttcattctttctttgcacgttcataaacattctacatacgtattctcttttgtctcttcatttataactgctgtgaattgtacatttctgtgttttttggaggtgcagttaaacttttaagcttaagtgtgacaggactgataaatagaagatcaagagtagatccgactttagaagcctactttgtgaccaaggagctcaatttttgttttgaagctttactaatctaccagagcattgtagatattttttttttacatctattgtttaaaatagatgattataacggggcagagaactttcttttctctgcaagaatgttacatattgtatagataaatgagtgacatttcataccatgtatatatagagatgttctataagtgtgagaaagtatatgctttaatagatactgtaattataagatatttttaattaaatatttttttgtaaatattatgtgtgtgtttttttttaatctatgggaatatttcttttggaaaatcatttttcagctcaattacagagctcttgatatcttgaatgtcttttctgtttggcctggctcttaatttgcttttgttttgcccagtatagactcggaagtaacagttatagctagtggtcttgcatgattgcatgagatgtttaatcacaaattaaacttgttctgagtccattcaaatgtgtttttttaaatgtagattgaaatctttgtatttgaagcatacatgttgaaaatacaccttatcagtttttaagtacagggttttatagtgtaatatatacagagtaagtgtttgtttttgtttttcaactgaggtcaaaatggattctgaatgattttgcatatgggatgaggaaatgcttggatccttaaggagtttacgaaatctgctgttttatcaaagtgaaaaaaaattgcttattactcttcattttacactaaagcttaatgtcactaagtttcatgtctgtacagattatttaaatcatggaaatgaaaaaaatgttctctgcttgctaccaaaggacaaactcttggaaatgaacactttctgctttccttcctccaaagaattaataggcaacagtgggagaaaaaaaaggcataatggcaaatccttcaagcagggataaaagtcgatcttcaaacattaacttaagcagaccaaaaattctgatgaccgcatctagattatttttttataaaaatgattttcactatagctatgttacgctaagctactgtccaatctcttgtgatgtgtaacttttacatgtgaatattaaagtagatttctctgtcttgtactgtgatttctggtctcatttctttaaaaccttactcttatttttcttttaaggctcttttttctccttaaggaaggtaatattttctaggttagataggactatcagggtttgtgaacattatgcatttaatgttatgggtactttacacacaagttagatggaatttttagagtgaaagaattaagtaggatttaattgggtgctttgtaaatagtcaactgtgtgtataacgtggtctgtttgatttttaaaaggaaaggatttgtttcagattatacaagaataaaagtattatagacccaagggacttcttatgaggtcaaattcagatatttatatgaatatgaaataccatggtccctagtagtcagttgaagtggcaatgtctaaacagaaatgaacaaaactaatgctagcaggttaaaatcaatcaaaatgtttaaaaattgattctgtcctcagcatgttatttcctcagctctgataatttactggtcttgagtattttgagaatttgatgttgaacgttataaagtcaaagaactgcttgtttagatgaggtttatttttatttttgatattattcattcttgtcacacatcaagaagaaaacactagagtgctgctggaattccaaatctgaagaattctaacgactgcattctttgttattaaaaagggcacaatccttcctttttatttggcagtttaatttcagtaggaagcatgtcacatgtgcactgttggttagaattatgcatctgtcatgcctgactgctgaaccctacctaagccttttggcgcagtttaaaacttatactggtggactgtgaacctcaaaacaaatgggtatttttgggttttgaggatagatgttactccttaaagtttgtatttggggcatgaaaaactactgaaagaagaaaagtgctacagatactacatttcaaagagttggcattttccctttggccactcaagcagcatttgatgtatctaaagaaacaaagtcattgtttattttttaaaaaattatatgcagttgtacaagatactacattccattgaaatgttggctatgtcctaaccaggcaaccagataacaaaaacattttgagtcttttatctaggtagttctaattattcagctacttagtttaacaaaggaaaatatcctgacttctctcatttcatttgtagacttttcattgtataggcacaaccaaagagtcagactggtttaaaactccagaaggaaaaaaagtatcccacacagtggatgttgtttctaagaatgctacaaaatcctgacatctcagacatctcaatgttaaaggaagaaaaaaaataccttttcatttcaaagaactaatatactttgatattgtgtaaaccttactcaagtttattgtcaagctttaactgcctttttagaactttttaaaatttcgagcccacaaatctattgtattagttgccttctataacaataaatcttcactgagcaaaaaaaaag

SEQ ID NO: 366394 - DNA, 3680 bp, Homo sapiens
gtgtcgagcgcgttgtttgcgcctgctaacctttcccttggtgttcggttgctgttccaggccggcgcggtgaacaagcagggcgacagcattctgtgccgctgagccgcgctgtccaggtgagcgcgcatttcccgtctcgggtgcccggtcaccagagacgcccgtccccgagggcttccggggccaggcaccgcggtgttctttgcccccagcgtttctgagagcaaactcccaaggaagtaaatcccctctctccctgccacctaagtagcaagtaaacccgtacttagccttagaactcgaggttcagtctcggtggagacgggtcagcccttgtccccgccgtccccgtgttttttctggtggtcagcgggctcttctgccttccctagttcccgagggagggcaccctcgtgggcatgggagctgccccggtgtcctcccgtgcagtctgtcacccacaaagggggacgcgggcagggcgccggagtgggtcccctctccgggcttcccgagggccgcagctgcctgctcggcgcctggcccggccgcgggcgggtgttgtctgacctggtggtttgttttgggttgttgatcaagcatgtcttgagtttggtcggtggcgccagttagtctgcagcgagaaggttcacacaccccctctattcattcctcttccacaggtgtgcggccgcctgagcccgagccaggagcactagagagggagggggaagagcagaagttagagaaaaaaagccaccggaggaaaggaaaaaacatcggccaacctagaaacgttttcattcgtcattccaagagagagagaggaaagaaaaatacaactttcattctttctttgcacgttcataaacattctacatacgtattctcttttgtctcttcatttataactgctgtgaattgtacatttctgtgttttttggaggtgcagttaaacttttaagcttaagtgtgacaggactgataaatagaagatcaagagtagatccgactttagaagcctactttgtgaccaaggagctcaatttttgttttgaagctttactaatctaccagagcattgtagatattttttttttacatctattgtttaaaatagatgattataacggggcagagaactttcttttctctgcaagaatgttacatattgtatagataaatgagtgacatttcataccatgtatatatagagatgttctataagtgtgagaaagtatatgctttaatagatactgtaattataagatatttttaattaaatatttttttgtaaatattatgtgtgtgtttttttttaatctatgggaatatttcttttggaaaatcatttttcagctcaattacagagctcttgatatcttgaatgtcttttctgtttggcctggctcttaatttgcttttgttttgcccagtatagactcggaagtaacagttatagctagtggtcttgcatgattgcatgagatgtttaatcacaaattaaacttgttctgagtccattcaaatgtgtttttttaaatgtagattgaaatctttgtatttgaagcatacatgttgaaaatacaccttatcagtttttaagtacagggttttatagtgtaatatatacagagtaagtgtttgtttttgtttttcaactgaggtcaaaatggattctgaatgattttgcatatgggatgaggaaatgcttggatccttaaggagtttacgaaatctgctgttttatcaaagtgaaaaaaaattgcttattactcttcattttacactaaagcttaatgtcactaagtttcatgtctgtacagattatttaaatcatggaaatgaaaaaaatgttctctgcttgctaccaaaggacaaactcttggaaatgaacactttctgctttccttcctccaaagaattaataggcaacagtgggagaaaaaaaaggcataatggcaaatccttcaagcagggataaaagtcgatcttcaaacattaacttaagcagaccaaaaattctgatgaccgcatctagattatttttttataaaaatgattttcactatagctatgttacgctaagctactgtccaatctcttgtgatgtgtaacttttacatgtgaatattaaagtagatttctctgtcttgtactgtgatttctggtctcatttctttaaaaccttactcttatttttcttttaaggctcttttttctccttaaggaaggtaatattttctaggttagataggactatcagggtttgtgaacattatgcatttaatgttatgggtactttacacacaagttagatggaatttttagagtgaaagaattaagtaggatttaattgggtgctttgtaaatagtcaactgtgtgtataacgtggtctgtttgatttttaaaaggaaaggatttgtttcagattatacaagaataaaagtattatagacccaagggacttcttatgaggtcaaattcagatatttatatgaatatgaaataccatggtccctagtagtcagttgaagtggcaatgtctaaacagaaatgaacaaaactaatgctagcaggttaaaatcaatcaaaatgtttaaaaattgattctgtcctcagcatgttatttcctcagctctgataatttactggtcttgagtattttgagaatttgatgttgaacgttataaagtcaaagaactgcttgtttagatgaggtttatttttatttttgatattattcattcttgtcacacatcaagaagaaaacactagagtgctgctggaattccaaatctgaagaattctaacgactgcattctttgttattaaaaagggcacaatccttcctttttatttggcagtttaatttcagtaggaagcatgtcacatgtgcactgttggttagaattatgcatctgtcatgcctgactgctgaaccctacctaagccttttggcgcagtttaaaacttatactggtggactgtgaacctcaaaacaaatgggtatttttgggttttgaggatagatgttactccttaaagtttgtatttggggcatgaaaaactactgaaagaagaaaagtgctacagatactacatttcaaagagttggcattttccctttggccactcaagcagcatttgatgtatctaaagaaacaaagtcattgtttattttttaaaaaattatatgcagttgtacaagatactacattccattgaaatgttggctatgtcctaaccaggcaaccagataacaaaaacattttgagtcttttatctaggtagttctaattattcagctacttagtttaacaaaggaaaatatcctgacttctctcatttcatttgtagacttttcattgtataggcacaaccaaagagtcagactggtttaaaactccagaaggaaaaaaagtatcccacacagtggatgttgtttctaagaatgctacaaaatcctgacatctcagacatctcaatgttaaaggaagaaaaaaaataccttttcatttcaaagaactaatatactttgatattgtgtaaaccttactcaagtttattgtcaagctttaactgcctttttagaactttttaaaatttcgagcccacaaatctattgtattagttgccttctataacaataaatcttcactgagcaaaaaaaaag

SEQ ID NO: 366395 - DNA, 4361 bp, Homo sapiens
gagcgggagagcgtagtggaggaggcgcggttgtgagtagtaccgggagtggggtgatcccgggctaggggagcgcggcggccgcgatcgggcttagtcggagctccgaagggagtgactaggacacccgggtgggctacttttcttccggtgcttttgctttttttttcctttgggctcgggctgagtgtcgcccactgagcaaagattccctcgtaaaacccagagcgaccctcccgtcaattgttgggctcgggagtgtcgcggtgccccgagcgcgccgggcgcggaggcaaagggagcggagccggccgcggacggggcccggagcttgcctgcctccctcgctcgccccagcgggttcgctcgcgtagagcgcagggcgcgcgcgatgaaggcggtgagcccggtgcgcccctcgggccgcaaggcgccgtcgggctgcggcggcggggagctggcgctgcgctgcctggccgagcacggccacagcctgggtggctccgcagccgcggcggcggcggcggcggcagcgcgctgtaaggcggccgaggcggcggccgacgagccggcgctgtgcctgcacacgttatcgactacatcctggacctgcagctggcgctggagacgcacccggccctgctgaggcagccaccaccgcccgcgccgccacaccacccggccgggacctgtccagccgcgccgccgcggaccccgctcactgcgctcaacaccgacccggccggcgcggtgaacaagcagggcgacagcattctgtgccgctgagccgcgctgtccaggtgagcgcgcatttcccgtctcgggtgcccggtcaccagagacgcccgtccccgagggcttccggggccaggcaccgcggtgttctttgcccccagcgtttctgagagcaaactcccaaggaagtaaatcccctctctccctgccacctaagtagcaagtaaacccgtacttagccttagaactcgaggttcagtctcggtggagacgggtcagcccttgtccccgccgtccccgtgttttttctggtggtcagcgggctcttctgccttccctagttcccgagggagggcaccctcgtgggcatgggagctgccccggtgtcctcccgtgcagtctgtcacccacaaagggggacgcgggcagggcgccggagtgggtcccctctccgggcttcccgagggccgcagctgcctgctcggcgcctggcccggccgcgggcgggtgttgtctgacctggtggtttgttttgggttgttgatcaagcatgtcttgagtttggtcggtggcgccagttagtctgcagcgagaaggttcacacaccccctctattcattcctcttccacaggtgtgcggccgcctgagcccgagccaggagcactagagagggagggggaagagcagaagttagagaaaaaaagccaccggaggaaaggaaaaaacatcggccaacctagaaacgttttcattcgtcattccaagagagagagaggaaagaaaaatacaactttcattctttctttgcacgttcataaacattctacatacgtattctcttttgtctcttcatttataactgctgtgaattgtacatttctgtgttttttggaggtgcagttaaacttttaagcttaagtgtgacaggactgataaatagaagatcaagagtagatccgactttagaagcctactttgtgaccaaggagctcaatttttgttttgaagctttactaatctaccagagcattgtagatattttttttttacatctattgtttaaaatagatgattataacggggcagagaactttcttttctctgcaagaatgttacatattgtatagataaatgagtgacatttcataccatgtatatatagagatgttctataagtgtgagaaagtatatgctttaatagatactgtaattataagatatttttaattaaatatttttttgtaaatattatgtgtgtgtttttttttaatctatgggaatatttcttttggaaaatcatttttcagctcaattacagagctcttgatatcttgaatgtcttttctgtttggcctggctcttaatttgcttttgttttgcccagtatagactcggaagtaacagttatagctagtggtcttgcatgattgcatgagatgtttaatcacaaattaaacttgttctgagtccattcaaatgtgtttttttaaatgtagattgaaatctttgtatttgaagcatacatgttgaaaatacaccttatcagtttttaagtacagggttttatagtgtaatatatacagagtaagtgtttgtttttgtttttcaactgaggtcaaaatggattctgaatgattttgcatatgggatgaggaaatgcttggatccttaaggagtttacgaaatctgctgttttatcaaagtgaaaaaaaattgcttattactcttcattttacactaaagcttaatgtcactaagtttcatgtctgtacagattatttaaatcatggaaatgaaaaaaatgttctctgcttgctaccaaaggacaaactcttggaaatgaacactttctgctttccttcctccaaagaattaataggcaacagtgggagaaaaaaaaggcataatggcaaatccttcaagcagggataaaagtcgatcttcaaacattaacttaagcagaccaaaaattctgatgaccgcatctagattatttttttataaaaatgattttcactatagctatgttacgctaagctactgtccaatctcttgtgatgtgtaacttttacatgtgaatattaaagtagatttctctgtcttgtactgtgatttctggtctcatttctttaaaaccttactcttatttttcttttaaggctcttttttctccttaaggaaggtaatattttctaggttagataggactatcagggtttgtgaacattatgcatttaatgttatgggtactttacacacaagttagatggaatttttagagtgaaagaattaagtaggatttaattgggtgctttgtaaatagtcaactgtgtgtataacgtggtctgtttgatttttaaaaggaaaggatttgtttcagattatacaagaataaaagtattatagacccaagggacttcttatgaggtcaaattcagatatttatatgaatatgaaataccatggtccctagtagtcagttgaagtggcaatgtctaaacagaaatgaacaaaactaatgctagcaggttaaaatcaatcaaaatgtttaaaaattgattctgtcctcagcatgttatttcctcagctctgataatttactggtcttgagtattttgagaatttgatgttgaacgttataaagtcaaagaactgcttgtttagatgaggtttatttttatttttgatattattcattcttgtcacacatcaagaagaaaacactagagtgctgctggaattccaaatctgaagaattctaacgactgcattctttgttattaaaaagggcacaatccttcctttttatttggcagtttaatttcagtaggaagcatgtcacatgtgcactgttggttagaattatgcatctgtcatgcctgactgctgaaccctacctaagccttttggcgcagtttaaaacttatactggtggactgtgaacctcaaaacaaatgggtatttttgggttttgaggatagatgttactccttaaagtttgtatttggggcatgaaaaactactgaaagaagaaaagtgctacagatactacatttcaaagagttggcattttccctttggccactcaagcagcatttgatgtatctaaagaaacaaagtcattgtttattttttaaaaaattatatgcagttgtacaagatactacattccattgaaatgttggctatgtcctaaccaggcaaccagataacaaaaacattttgagtcttttatctaggtagttctaattattcagctacttagtttaacaaaggaaaatatcctgacttctctcatttcatttgtagacttttcattgtataggcacaaccaaagagtcagactggtttaaaactccagaaggaaaaaaagtatcccacacagtggatgttgtttctaagaatgctacaaaatcctgacatctcagacatctcaatgttaaaggaagaaaaaaaataccttttcatttcaaagaactaatatactttgatattgtgtaaaccttactcaagtttattgtcaagctttaactgcctttttagaactttttaaaatttcgagcccacaaatctattgtattagttgccttctataacaataaatcttcactgagcaaaaaaaaag

SEQ ID NO: 366396 - DNA, 1448 bp, Homo sapiens
gagcgggagagcgtagtggaggaggcgcggttgtgagtagtaccgggagtggggtgatcccgggctaggggagcgcggcggccgcgatcgggcttagtcggagctccgaagggagtgactaggacacccgggtgggctacttttcttccggtgcttttgctttttttttcctttgggctcgggctgagtgtcgcccactgagcaaagattccctcgtaaaacccagagcgaccctcccgtcaattgttgggctcgggagtgtcgcggtgccccgagcgcgccgggcgcggaggcaaagggagcggagccggccgcggacggggcccggagcttgcctgcctccctcgctcgccccagcgggttcgctcgcgtagagcgcagggcgcgcgcgatgaaggcggtgagcccggtgcgcccctcgggccgcaaggcgccgtcgggctgcggcggcggggagctggcgctgcgctgcctggccgagcacggccacagcctgggtggctccgcagccgcggcggcggcggcggcggcagcgcgctgtaaggcggccgaggcggcggccgacgagccggcgctgtgcctgcagtgcgatatgaacgactgctatagccgcctgcggaggctggtgcccaccatcccgcccaacaagaaagtcagcaaagtggagatcctgcagcacgttatcgactacatcctggacctgcagctggcgctggagacgcacccggccctgctgaggcagccaccaccgcccgcgccgccacaccacccggccgggacctgtccagccgcgccgccgcggaccccgctcactgcgctcaacaccgacccggccggcgcggtgaacaagcagggcgacagcattctgtgccgctgagccgcgctgtccaggtgtgcggccgcctgagcccgagccaggagcactagagagggagggggaagagcagaagttagagaaaaaaagccaccggaggaaaggaaaaaacatcggccaacctagaaacgttttcattcgtcattccaagagagagagaggaaagaaaaatacaactttcattctttctttgcacgttcataaacattctacatacgtattctcttttgtctcttcatttataactgctgtgaattgtacatttctgtgttttttggaggtgcagttaaacttttaagcttaagtgtgacaggactgataaatagaagatcaagagtagatccgactttagaagcctactttgtgaccaaggatacatctattgtttaaaatagatgattataacggggcagagaactttcttttctctgcaagaatgttacatattgtatagataaatgagtgacatttcataccatgtatatatagagatgttctataagtgtgagaaagtatatgctttaatagatactgtaattataagatatttttaattaaatatttttttgtaaat

SEQ ID NO: 366397 - DNA, 3885 bp, Homo sapiens
gagcgggagagcgtagtggaggaggcgcggttgtgagtagtaccgggagtggggtgatcccgggctaggggagcgcggcggccgcgatcgggcttagtcggagctccgaagggagtgactaggacacccgggtgggctacttttcttccggtgcttttgctttttttttcctttgggctcgggctgagtgtcgcccactgagcaaagattccctcgtaaaacccagagcgaccctcccgtcaattgttgggctcgggagtgtcgcggtgccccgagcgcgccgggcgcggaggcaaagggagcggagccggccgcggacggggcccggagcttgcctgcctccctcgctcgccccagcgggttcgctcgcgtagagcgcagggcgcgcgcgatgaaggcggtgagcccggtgcgcccctcgggccgcaaggcgccgtcgggctgcggcggcggggagctggcgctgcgctgcctggccgagcacggccacagcctgggtggctccgcagccgcggcggcggcggcggcggcagcgcgctgtaaggcggccgaggcggcggccgacgagccggcgctgtgcctgcagtgcgatatgaacgactgctatagccgcctgcggaggctggtgcccaccatcccgcccaacaagaaagtcagcaaagtggagatcctgcagcacgttatcgactacatcctggacctgcagctggcgctggagacgcacccggccctgctgaggcagccaccaccgcccgcgccgccacaccacccggccgggacctgtccagccgcgccgccgcggaccccgctcactgcgctcaacaccgacccggccggcgcggtgaacaagcagggcgacagcattctgtgccgctgagccgcgctgtccaggtgtgcggccgcctgagcccgagccaggagcactagagagggagggggaagagcagaagttagagaaaaaaagccaccggaggaaaggaaaaaacatcggccaacctagaaacgttttcattcgtcattccaagagagagagaggaaagaaaaatacaactttcattctttctttgcacgttcataaacattctacatacgtattctcttttgtctcttcatttataactgctgtgaattgtacatttctgtgttttttggaggtgcagttaaacttttaagcttaagtgtgacaggactgataaatagaagatcaagagtagatccgactttagaagcctactttgtgaccaaggagctcaatttttgttttgaagctttactaatctaccagagcattgtagatattttttttttacatctattgtttaaaatagatgattataacggggcagagaactttcttttctctgcaagaatgttacatattgtatagataaatgagtgacatttcataccatgtatatatagagatgttctataagtgtgagaaagtatatgctttaatagatactgtaattataagatatttttaattaaatatttttttgtaaatattatgtgtgtgtttttttttaatctatgggaatatttcttttggaaaatcatttttcagctcaattacagagctcttgatatcttgaatgtcttttctgtttggcctggctcttaatttgcttttgttttgcccagtatagactcggaagtaacagttatagctagtggtcttgcatgattgcatgagatgtttaatcacaaattaaacttgttctgagtccattcaaatgtgtttttttaaatgtagattgaaatctttgtatttgaagcatacatgttgaaaatacaccttatcagtttttaagtacagggttttatagtgtaatatatacagagtaagtgtttgtttttgtttttcaactgaggtcaaaatggattctgaatgattttgcatatgggatgaggaaatgcttggatccttaaggagtttacgaaatctgctgttttatcaaagtgaaaaaaaattgcttattactcttcattttacactaaagcttaatgtcactaagtttcatgtctgtacagattatttaaatcatggaaatgaaaaaaatgttctctgcttgctaccaaaggacaaactcttggaaatgaacactttctgctttccttcctccaaagaattaataggcaacagtgggagaaaaaaaaggcataatggcaaatccttcaagcagggataaaagtcgatcttcaaacattaacttaagcagaccaaaaattctgatgaccgcatctagattatttttttataaaaatgattttcactatagctatgttacgctaagctactgtccaatctcttgtgatgtgtaacttttacatgtgaatattaaagtagatttctctgtcttgtactgtgatttctggtctcatttctttaaaaccttactcttatttttcttttaaggctcttttttctccttaaggaaggtaatattttctaggttagataggactatcagggtttgtgaacattatgcatttaatgttatgggtactttacacacaagttagatggaatttttagagtgaaagaattaagtaggatttaattgggtgctttgtaaatagtcaactgtgtgtataacgtggtctgtttgatttttaaaaggaaaggatttgtttcagattatacaagaataaaagtattatagacccaagggacttcttatgaggtcaaattcagatatttatatgaatatgaaataccatggtccctagtagtcagttgaagtggcaatgtctaaacagaaatgaacaaaactaatgctagcaggttaaaatcaatcaaaatgtttaaaaattgattctgtcctcagcatgttatttcctcagctctgataatttactggtcttgagtattttgagaatttgatgttgaacgttataaagtcaaagaactgcttgtttagatgaggtttatttttatttttgatattattcattcttgtcacacatcaagaagaaaacactagagtgctgctggaattccaaatctgaagaattctaacgactgcattctttgttattaaaaagggcacaatccttcctttttatttggcagtttaatttcagtaggaagcatgtcacatgtgcactgttggttagaattatgcatctgtcatgcctgactgctgaaccctacctaagccttttggcgcagtttaaaacttatactggtggactgtgaacctcaaaacaaatgggtatttttgggttttgaggatagatgttactccttaaagtttgtatttggggcatgaaaaactactgaaagaagaaaagtgctacagatactacatttcaaagagttggcattttccctttggccactcaagcagcatttgatgtatctaaagaaacaaagtcattgtttattttttaaaaaattatatgcagttgtacaagatactacattccattgaaatgttggctatgtcctaaccaggcaaccagataacaaaaacattttgagtcttttatctaggtagttctaattattcagctacttagtttaacaaaggaaaatatcctgacttctctcatttcatttgtagacttttcattgtataggcacaaccaaagagtcagactggtttaaaactccagaaggaaaaaaagtatcccacacagtggatgttgtttctaagaatgctacaaaatcctgacatctcagacatctcaatgttaaaggaagaaaaaaaataccttttcatttcaaagaactaatatactttgatattgtgtaaaccttactcaagtttattgtcaagctttaactgcctttttagaactttttaaaatttcgagcccacaaatctattgtattagttgccttctataacaataaatcttcactgagcaaaaaaaaag

SEQ ID NO: 366398 - DNA, 2558 bp, Homo sapiens
gagcgggagagcgtagtggaggaggcgcggttgtgagtagtaccgggagtggggtgatcccgggctaggggagcgcggcggccgcgatcgggcttagtcggagctccgaagggagtgactaggacacccgggtgggctacttttcttccggtgcttttgctttttttttcctttgggctcgggctgagtgtcgcccactgagcaaagattccctcgtaaaacccagagcgaccctcccgtcaattgttgggctcgggagtgtcgcggtgccccgagcgcgccgggcgcggaggcaaagggagcggagccggccgcggacggggcccggagcttgcctgcctccctcgctcgccccagcgggttcgctcgcgtagagcgcagggcgcgcgcgatgaaggcggtgagcccggtgcgcccctcgggccgcaaggcgccgtcgggctgcggcggcggggagctggcgctgcgctgcctggccgagcacggccacagcctgggtggctccgcagccgcggcggcggcggcggcggcagcgcgctgtaaggcggccgaggcggcggccgacgagccggcgctgtgcctgcagtgcgatatgaacgactgctatagccgcctgcggaggctggtgcccaccatcccgcccaacaagaaagtcagcaaagtggagatcctgcagcacgttatcgactacatcctggacctgcagctggcgctggagacgcacccggccctgctgaggcagccaccaccgcccgcgccgccacaccacccggccgggacctgtccagccgcgccgccgcggaccccgctcactgcgctcaacaccgacccggccggcgcggtgaacaagcagggcgacagcattctgtgccgctgagccgcgctgtccaggtgtgcggccgcctgagcccgagccaggagcactagagagggagggggaagagcagaagttagagaaaaaaagccaccggaggaaaggaaaaaacatcggccaacctagaaacgttttcattcgtcattccaagagagagagaggaaagaaaaatacaactttcattctttctttgcacgttcataaacattctacatacgtattctcttttgtctcttcatttataactgctgtgaattgtacatttctgtgttttttggaggtgcagttaaacttttaagcttaagtgtgacaggactgataaatagaagatcaagagtagatccgactttagaagcctactttgtgaccaaggagctcaatttttgttttgaagctttactaatctaccagagcattgtagatattttttttttacatctattgtttaaaatagatgattataacggggcagagaactttcttttctctgcaagaatgttacatattgtatagataaatgagtgacatttcataccatgtatatatagagatgttctataagtgtgagaaagtatatgctttaatagatactgtaattataagatatttttaattaaatatttttttgtaaatattatgtgtgtgtttttttttaatctatgggaatatttcttttggaaaatcatttttcagctcaattacagagctcttgatatcttgaatgtcttttctgtttggcctggctcttaatttgcttttgttttgcccagtatagactcggaagtaacagttatagctagtggtcttgcatgattgcatgagatgtttaatcacaaattaaacttgttctgagtccattcaaatgtgtttttttaaatgtagattgaaatctttgtatttgaagcatacatgttgaaaatacaccttatcagtttttaagtacagggttttatagtgtaatatatacagagtaagtgtttgtttttgtttttcaactgaggtcaaaatggattctgaatgattttgcatatgggatgaggaaatgcttggatccttaaggagtttacgaaatctgctgttttatcaaagtgaaaaaaaattgcttattactcttcattttacactaaagcttaatgtcactaagtttcatgtctgtacagattatttaaatcatggaaatgaaaaaaatgttctctgcttgctaccaaaggacaaactcttggaaatgaacactttctgctttccttcctccaaagaattaataggcaacagtgggagaaaaaaaaggcataatggcaaatccttcaagcagggataaaagtcgatcttcaaacattaacttaagcagaccaaaaattctgatgaccgcatctagattatttttttataaaaatgattttcactatagctatgttacgctaagctactgtccaatctcttgtgatgtgtaacttttacatgtgaatattaaaagaaaattttttttgtctgtacctggaatttaggggtccatatttttaaaaaaccaacactataatttaccttattagaggttttttttttcccttaagggaggaggggatattctgggggttatgaggaaaatattggggggtggggacatatctcccttctaataagggatggggggatttttcaccacaattaacagggatatatttta

SEQ ID NO: 366399 - DNA, 1507 bp, Homo sapiens
gagcgggagagcgtagtggaggaggcgcggttgtgagtagtaccgggagtggggtgatcccgggctaggggagcgcggcggccgcgatcgggcttagtcggagctccgaagggagtgactaggacacccgggtgggctacttttcttccggtgcttttgctttttttttcctttgggctcgggctgagtgtcgcccactgagcaaagattccctcgtaaaacccagagcgaccctcccgtcaattgttgggctcgggagtgtcgcggtgccccgagcgcgccgggcgcggaggcaaagggagcggagccggccgcggacggggcccggagcttgcctgcctccctcgctcgccccagcgggttcgctcgcgtagagcgcagggcgcgcgcgatgaaggcggtgagcccggtgcgcccctcgggccgcaaggcgccgtcgggctgcggcggcggggagctggcgctgcgctgcctggccgagcacggccacagcctgggtggctccgcagccgcggcggcggcggcggcggcagcgcgctgtaaggcggccgaggcggcggccgacgagccggcgctgtgcctgcagtgcgatatgaacgactgctatagccgcctgcggaggctggtgcccaccatcccgcccaacaagaaagtcagcaaagtggagatcctgcagcacgttatcgactacatcctggacctgcagctggcgctggagacgcacccggccctgctgaggcagccaccaccgcccgcgccgccacaccacccggccgggacctgtccagccgcgccgccgcggaccccgctcactgcgctcaacaccgacccggccggcgcggtgaacaagcagggcgacagcattctgtgccgctgagccgcgctgtccaggtgtgcggccgcctgagcccgagccaggagcactagagagggagggggaagagcagaagttagagaaaaaaagccaccggaggaaaggaaaaaacatcggccaacctagaaacgttttcattcgtcattccaagagagagagaggaaagaaaaatacaactttcattctttctttgcacgttcataaacattctacatacgtattctcttttgtctcttcatttataactgctgtgaattgtacatttctgtgttttttggaggtgcagttaaacttttaagcttaagtgtgacaggactgataaatagaagatcaagagtagatccgactttagaagcctactttgtgaccaaggagctcaatttttgttttgaagctttactaatctaccagagcattgtagatattttttttttacatctattgtttaaaatagatgattataacggggcagagaactttcttttctctgcaagaatgttacatattgtatagataaatgagtgacatttcataccatgtatatatagagatgttctataagtgtgagaaagtatatgctttaatagatactgtaattataagatatttttaattaaatatttttttgtaaat

SEQ ID NO: 366400 - DNA, 305 bp, Homo sapiens
ggaaagacaagatcagcacaaaaaattgtatgagtcaagtaaaggacccatttaaagggtttgaacttgcttgaaattgcttgaaaaaatactatggttattaagtgctagattgaatgacatagtcaacactgttcaatagaaatgtaatacaagttacatatgtagtttaaaattttctaggagccacattaaaatacgttaaaagaaacaggtgaaattattttaataatatttaatctagtatatcaaaaatattatttcaatatgctctcaacataaacaaatgaaatattttacttttt

SEQ ID NO: 366401 - DNA, 1206 bp, Homo sapiens
cgccccgcccccgggctgccctcagcgccgcctgattgcatttgcggcctcgctgccgcatcccaggctaagcgccgcgcgcaaagccgtgcggagattggaggccgcgcgggtccctggtctgggccatgtctggctgtgatgctcgggagggagactgttgttcccggagatgcggcgcgcaggacaaggagcatccaagatacctgatcccagaactttgcaaacagttttaccatttaggctgggtcactgggactggaggaggaattagcttgaagcatggcgatgaaatctacattgctccttcaggagtgcaaaaggaacgaattcagcctgaagacatgtttgtttgtgatataaatgaaaaggacataagtggaccttcgccatcgaagaagctaaaaaaaagccagtgtactcctcttttcatgaatgcttacacaatgagaggagcaggtgcagtgattcatacccactctaaagctgctgtgatggccacccttctctttccaggacgggagtttaaaattacacatcaagagatgataaaaggaataaagaaatgtacttccggagggtattatagatatgatgatatgttagtggtacccattattgagaatacacctgaggagaaagacctcaaagatagaatggctcatgcaatgaatgaatacccagactcctgtgcagtactggtcagacgtcatggagtatatgtgtggggggaaacatgggagaaggccaaaaccatgtgtgagtgttatgactatttatttgatattgccgtatcaatgaagaaagtaggacttgatccttcacagctcccagttggagaaaatggaattgtctaagccaaaagaaagtctaattatatacagagataaagctaaacgtaattattatttaaatgaaagctatttttttaaatgaattgaaatttttcatgatgctactaatttgccactaaatactgcaaatggtcaccctgaatctcttctgacattggatgttatttgcttatattcttataattttaaatgagggcacagtgaaatgaaaattttatactctatgtttctgtttatttttaaatccttaacagcaaaatatttgcctttaatttcttttttatatatactctcagagaattcctcttaatttttaaagatgctggtgataataaaattcattagaaaattt

SEQ ID NO: 366402 - DNA, 2067 bp, Homo sapiens
cttgaataaacagagtacccttggttttcctactttatagatgggttttacttaccagcagaccattttgtactttatttgagtctattcccaggactgcataaatttctccccacataagaagacccacaagtccacttatctgtggaggtgagtggaccatgtaccatcctagagcttcttccatgttacacaaggacacaagatttggatcactggtattcacaaagagcccttgttaatagtatgatcccaacccattctcactggttgcagaggaatgtccctttatgttatccttatgttgcagaactcggaaacaatagccacttcatgaaagcaaatgctcgcgtgcagctaacagtgcattggatttccactcacattatcaggacatttgttttctagactttatcagtggaaccttaaagaaactttgatttcaccttagatttttatcggttccaagcctacaggtttattagcaacctgaacttcagcagcttggtatataggccatcatcctcatttacactatgaaatgtttgatatttgttcaatatccctgtgtctgtgccttactagcagaaactagagcatgcaggtactggcattttcttggtttgcatatatgcagtagctcattaatactctctggcagcaactgaaactggtaagttatcaaagatatccagcgagaagagaaaaaacctgatatgtgagccaagggacgtttgtttagttgttgttgagggtggagggaatttagagaagatttgaaattaatttccaaatcaaatttgagagcaccttgtggtaaatggtagtctatagcatctcccttagtccaacatcctgtaacaaagagatcttcacatgtagccattctgatattttgaactctttgtagttgttttagctttattactaaatttttttccaagatatgtatgcttttcaaatgggaagcatgtgattctatccaaaaagtagcccagtgttaatacagtaatttaagaaactgtccagcagaggtctctgaacttcatggtttaagaagagcatttcaaacaataaatcaaacctgattctttgcatgacagaaatatacttctattgagcatattttccagattggattttagaataactgtatttcacataggttaaactctgcttattcatgtttaaagacgctgaaaacttatgttttcagatttttattcccctaacaggataaaagcctggttaccaccaactttgcactataaaaagaataaatatatatgaaacgtagaagacaaaagcaacaactaatattctactatgccaccagcactacaaaggcattgatgtagtttggctttctttctatgcagccaaaatccataattaaatcaagcaactggctgtattgcttgatttataaagaacatgcatgattggactgcaaacttttctttgtgcaaaagcaggaaataaataaataccaatttgtatgttttgtgttgccagcgatgaaatctacattgctccttcaggagtgcaaaaggaacgaattcaggtatggtaatgggattctttaacctcagtgtcttttcttcttaattactgttttatgaaatggaattaattttaagagaaaacattcattttatcatagcaatttgaataactaatcagcaaacatttattgagtaattattaaatgttttgtaaggtggtagatatcttccatacaaccggtgtatgttttgaaatctcattcaacctatagggggcaaaagtgaatagtgcaatcttaaatcacagtaaagagcaattataactttgcagctttataacactacgatctttatcaggctggtggaataatcagattgatggtctcagatgaaccaaattaattcatatttcctaatagcaaagttattctaatttcaggatttcaagttatgaaactttgtttcaaattttgagaagtcttattctgtgttaatgccagaataataccccaaatctagttaaagcaaacacataattatttaacttctaatgcaaaaaaaa

SEQ ID NO: 366403 - DNA, 710 bp, Homo sapiens
tataattcaatttttaatcttttctatgcttctgattctgaaatatatcatttgccatctccttgtataaatattatgattgtccctgcttcaaggaaacatttatatgatcatgatttctttgttaggttttggtatattttacaaatttccaccacttaggcttaggattagaccaagcctgccacattcccaaggtaccttttgatagagatgtttatacaaggtacacagaataacacgcaacatcctgttcataatttggagtggcttttcagacacaaacagcatgtctaactggttacttgaaaaaattacatgttgtatacatatcaatgcttgatttgttttaatggaaaaaaatggcttgttttgtcttacagatatatgatgatatgttagtggtacccattattgagaatacacctgaggagaaagacctcaaagatagaatggctcatgcaatgaatgaatacccagactcctgtgcagtactggtcagacgtcatggagtatatgtgtggggggaaacatgggagaaggccaaaaccatgtgagtgtaaatcagagaacatggggaacaagttaccacccgctaaatgtgaaggtactttatttttattatgtatccattcatgaagaagtattgattggatgagctgttgtttggcaaggctctaggaatgttgatagaggaagaagacacagat

SEQ ID NO: 366404 - DNA, 4081 bp, Homo sapiens
cgccccgcccccgggctgccctcagcgccgcctgattgcatttgcggcctcgctgccgcatcccaggctaagcgccgcgcgcaaagccgtgcggagattggaggccgcgcgggtccctggtctgggccatgtctggctgtgatgctcgggagggagactgttgttcccggagatgcggcgcgcaggacaaggagcatccaagatacctgatcccagaactttgcaaacagttttaccatttaggctgggtcactgggactggaggaggaattagcttgaagcatggcgatgaaatctacattgctccttcaggagtgcaaaaggaacgaattcagcctgaagacatgtttgtttgtgatataaatgaaaaggacataagtggaccttcgccatcgaagaagctaaaaaaaagccagtgtactcctcttttcatgaatgcttacacaatgagaggagcaggtgcagtgattcatacccactctaaagctgctgtgatggccacccttctctttccaggacgggagtttaaaattacacatcaagagatgataaaaggaataaagaaatgtacttccggagggtattatagatatgatgatatgttagtggtacccattattgagaatacacctgaggagaaagacctcaaagatagaatggctcatgcaatgaatgaatacccagactcctgtgcagtactggtcagacgtcatggagtatatgtgtggggggaaacatgggagaaggccaaaaccatgtgtgagtgttatgactatttatttgatattgccgtatcaatgaagaaagtaggacttgatccttcacagctcccagttggagaaaatggaattgtctaagccaaaagaaagtctaattatatacagagataaagctaaacgtaattattatttaaatgaaagctatttttttaaatgaattgaaatttttcatgatgctactaatttgccactaaatactgcaaatggtcaccctgaatctcttctgacattggatgttatttgcttatattcttataattttaaatgagggcacagtgaaatgaaaattttatactctatgtttctgtttatttttaaatccttaacagcaaaatatttgcctttaatttcttttttatatatactctcagagaattcctcttaatttttaaagatgctggtgataataaaattcattagaaaatttaaaaaaaaaaaaaaaaaactcgagactagttctctctctctctcgagaaggatctgaatgtcttctctctccctgttacctcactcgtggcttgtagctccacagacccagctgccctctgtaaatcagaggtggggaaaacacccaccctagaagctctattgcccgaagattgtaaccctgaggagcctgaaaatgaagacttccacccttcctggtccccctcaagcctccccttccgcacggacaatgaagagggctgtgggatggtgaagacctcccagcagaatgaggatcggccccctgaagattcttccttagaactccctctggcagtgtgacaggcgctagaggtcctgcctcttacccattctctatttattcccttattttatctaacaccatttcaaaacaaaactgtagaagcagctgctgctcccatgttattttattggggtctttggggaatgggtgggaaaggattgtttgagtattttttaaaagggaaacagtaccaaggagaccagccctaccttgatctggggatagtcttggggcaaagaaagctgcgtagtgctgaacattaagctttctgggccactggaacaaagaactaggatctcacaggaaaagctgggtaactcaagcagctattctttctgtagggaccagaacacgagaatttgaagagcatggcaaagccctttctctcccaagccccaggcagagtacaagctcatttttctcggtggttattctgatatcccattttggtgtgtcataatacttcaaactggaaagtcacctggtcgagtctagggaggagggagtggaagggtctctgcttctgtacaaaatctccaggatttacaaaaatgtaacctgccttccttcaatcccatatttggtaaataagttaatatttgacatgtttggtgttctctgacctgttccccacactggggattcctggtctgtaacttgaattgtttcttccacatgttcttaagtactagagttaaacttgtctatgtgtcttttttctctccatcctttttccttcggagaaagagctggattggctggggatatggtataacgagcctgagccttctgtacgtgtctgacactagcactgtcaggcagctttcggctggggctcacccatcccataggaggcctatgtggagcattaactgtggccaaaggaggcagcgggaacaggctgcttgctatctggaaagatgacatatttgtgccatgcttgttttttcacccaggtttttccctctttgtgagatctgagctttagtggaatgtagaatgtggcaatcttaaggtcaccaatcagtttttgttcttttttcctggatctaccctcatggtcgttttcaacatagcgggttagagttcttatactgttccagttcaattccaagaattgcaaatgtttattggacccctccatcttgatgatatataaaaattggaagccaaaccagttcttaaatgctacatgcaactcccagattccaaaggattcaagttctaattataacctttgaagcgtatagaatggaactcattcagtttgattcagttcttacctctgtcaggaggaatacagttcctgttcatcctgtgttctaagatctccattgaacagcactgatttcctttcattagcaaagtgatctttgtctctgttctaaaatggaggcagtagggagcaaaactattcttctcaagcatcctttacaccatactttacttctggtatggtttattaaccacacacacacacaaaagtgaaaaactgtgttgggggggagacactactcctacttatcttgctcataaagccttttctggtgggatattaaggccctggtgtcttacagaaaccatcacgtatgtcgcagcagcatttcacccctgaagtctctaaactctgagcctgaaaagatttgtatttaatacacataacattttttagttcattctgcctttcctatttgttccagtttttgcttggttttagtttggaggggaacttaagtacacagatccttatctctccccatcccctagcctcacaaaacacagttgagagtcttttaagtacctgagctctcgaagctacccagaactgaactagactcccctaccttagactggtaccctcaaacacaggactgaagcttaattgggaatttggctttatggagaaaagaatctttttcaaagtttgtgtcggaaggggagggtgaggtttgcccactgtctctgcaggaaggctccggcttaatctaggaagtagattccagctgcacgatgaggaacacattagcttttgggatcaaaccaggaatatgaatctgtaattattaagctcattgccaacccacaagatatgtttctgaaaacctgtagtttcttaatttaagtccatccccttcattaacgctacagttgtgactcacactgatcccaaacttttaagtgctaaatattaacatttagcattaactgtcttgtcaagcgaaaggccttctctacaacctagtccatctcacttctggtgctacctgagttggacagaattctagctcatggttgctaggaaagctaggcctctgatcatagaagcagatagcttcagtcccagtctaggcctagataaatgactcttattaccacaacccttattattttccaatttcctttctcacatactgtacacaggtagtattttcaatgtgaatccaaagcttgtctggttctctgaaaataattttttcccctttaggttctttacattgtgataatgctgtatttaaagagaatatttaaatgtaatattaaagaaatattc

SEQ ID NO: 366405 - DNA, 3980 bp, Homo sapiens
cgccccgcccccgggctgccctcagcgccgcctgattgcatttgcggcctcgctgccgcatcccaggctaagcgccgcgcgcaaagccgtgcggagattggaggccgcgcgggtccctggtctgggccatgtctggctgtgatgctcgggagggagactgttgttcccggagatgcggcgcgcagcgatgaaatctacattgctccttcaggagtgcaaaaggaacgaattcagcctgaagacatgtttgtttgtgatataaatgaaaaggacataagtggaccttcgccatcgaagaagctaaaaaaaagccagtgtactcctcttttcatgaatgcttacacaatgagaggagcaggtgcagtgattcatacccactctaaagctgctgtgatggccacccttctctttccaggacgggagtttaaaattacacatcaagagatgataaaaggaataaagaaatgtacttccggagggtattatagatatgatgatatgttagtggtacccattattgagaatacacctgaggagaaagacctcaaagatagaatggctcatgcaatgaatgaatacccagactcctgtgcagtactggtcagacgtcatggagtatatgtgtggggggaaacatgggagaaggccaaaaccatgtgtgagtgttatgactatttatttgatattgccgtatcaatgaagaaagtaggacttgatccttcacagctcccagttggagaaaatggaattgtctaagccaaaagaaagtctaattatatacagagataaagctaaacgtaattattatttaaatgaaagctatttttttaaatgaattgaaatttttcatgatgctactaatttgccactaaatactgcaaatggtcaccctgaatctcttctgacattggatgttatttgcttatattcttataattttaaatgagggcacagtgaaatgaaaattttatactctatgtttctgtttatttttaaatccttaacagcaaaatatttgcctttaatttcttttttatatatactctcagagaattcctcttaatttttaaagatgctggtgataataaaattcattagaaaatttaaaaaaaaaaaaaaaaaactcgagactagttctctctctctctcgagaaggatctgaatgtcttctctctccctgttacctcactcgtggcttgtagctccacagacccagctgccctctgtaaatcagaggtggggaaaacacccaccctagaagctctattgcccgaagattgtaaccctgaggagcctgaaaatgaagacttccacccttcctggtccccctcaagcctccccttccgcacggacaatgaagagggctgtgggatggtgaagacctcccagcagaatgaggatcggccccctgaagattcttccttagaactccctctggcagtgtgacaggcgctagaggtcctgcctcttacccattctctatttattcccttattttatctaacaccatttcaaaacaaaactgtagaagcagctgctgctcccatgttattttattggggtctttggggaatgggtgggaaaggattgtttgagtattttttaaaagggaaacagtaccaaggagaccagccctaccttgatctggggatagtcttggggcaaagaaagctgcgtagtgctgaacattaagctttctgggccactggaacaaagaactaggatctcacaggaaaagctgggtaactcaagcagctattctttctgtagggaccagaacacgagaatttgaagagcatggcaaagccctttctctcccaagccccaggcagagtacaagctcatttttctcggtggttattctgatatcccattttggtgtgtcataatacttcaaactggaaagtcacctggtcgagtctagggaggagggagtggaagggtctctgcttctgtacaaaatctccaggatttacaaaaatgtaacctgccttccttcaatcccatatttggtaaataagttaatatttgacatgtttggtgttctctgacctgttccccacactggggattcctggtctgtaacttgaattgtttcttccacatgttcttaagtactagagttaaacttgtctatgtgtcttttttctctccatcctttttccttcggagaaagagctggattggctggggatatggtataacgagcctgagccttctgtacgtgtctgacactagcactgtcaggcagctttcggctggggctcacccatcccataggaggcctatgtggagcattaactgtggccaaaggaggcagcgggaacaggctgcttgctatctggaaagatgacatatttgtgccatgcttgttttttcacccaggtttttccctctttgtgagatctgagctttagtggaatgtagaatgtggcaatcttaaggtcaccaatcagtttttgttcttttttcctggatctaccctcatggtcgttttcaacatagcgggttagagttcttatactgttccagttcaattccaagaattgcaaatgtttattggacccctccatcttgatgatatataaaaattggaagccaaaccagttcttaaatgctacatgcaactcccagattccaaaggattcaagttctaattataacctttgaagcgtatagaatggaactcattcagtttgattcagttcttacctctgtcaggaggaatacagttcctgttcatcctgtgttctaagatctccattgaacagcactgatttcctttcattagcaaagtgatctttgtctctgttctaaaatggaggcagtagggagcaaaactattcttctcaagcatcctttacaccatactttacttctggtatggtttattaaccacacacacacacaaaagtgaaaaactgtgttgggggggagacactactcctacttatcttgctcataaagccttttctggtgggatattaaggccctggtgtcttacagaaaccatcacgtatgtcgcagcagcatttcacccctgaagtctctaaactctgagcctgaaaagatttgtatttaatacacataacattttttagttcattctgcctttcctatttgttccagtttttgcttggttttagtttggaggggaacttaagtacacagatccttatctctccccatcccctagcctcacaaaacacagttgagagtcttttaagtacctgagctctcgaagctacccagaactgaactagactcccctaccttagactggtaccctcaaacacaggactgaagcttaattgggaatttggctttatggagaaaagaatctttttcaaagtttgtgtcggaaggggagggtgaggtttgcccactgtctctgcaggaaggctccggcttaatctaggaagtagattccagctgcacgatgaggaacacattagcttttgggatcaaaccaggaatatgaatctgtaattattaagctcattgccaacccacaagatatgtttctgaaaacctgtagtttcttaatttaagtccatccccttcattaacgctacagttgtgactcacactgatcccaaacttttaagtgctaaatattaacatttagcattaactgtcttgtcaagcgaaaggccttctctacaacctagtccatctcacttctggtgctacctgagttggacagaattctagctcatggttgctaggaaagctaggcctctgatcatagaagcagatagcttcagtcccagtctaggcctagataaatgactcttattaccacaacccttattattttccaatttcctttctcacatactgtacacaggtagtattttcaatgtgaatccaaagcttgtctggttctctgaaaataattttttcccctttaggttctttacattgtgataatgctgtatttaaagagaatatttaaatgtaatattaaagaaatattc

SEQ ID NO: 366406 - DNA, 2435 bp, Homo sapiens
cttgaataaacagagtacccttggttttcctactttatagatgggttttacttaccagcagaccattttgtactttatttgagtctattcccaggactgcataaatttctccccacataagaagacccacaagtccacttatctgtggaggtgagtggaccatgtaccatcctagagcttcttccatgttacacaaggacacaagatttggatcactggtattcacaaagagcccttgttaatagtatgatcccaacccattctcactggttgcagaggaatgtccctttatgttatccttatgttgcagaactcggaaacaatagccacttcatgaaagcaaatgctcgcgtgcagctaacagtgcattggatttccactcacattatcaggacatttgttttctagactttatcagtggaaccttaaagaaactttgatttcaccttagatttttatcggttccaagcctacaggtttattagcaacctgaacttcagcagcttggtatataggccatcatcctcatttacactatgaaatgtttgatatttgttcaatatccctgtgtctgtgccttactagcagaaactagagcatgcaggtactggcattttcttggtttgcatatatgcagtagctcattaatactctctggcagcaactgaaactggtaagttatcaaagatatccagcgagaagagaaaaaacctgatatgtgagccaagggacgtttgtttagttgttgttgagggtggagggaatttagagaagatttgaaattaatttccaaatcaaatttgagagcaccttgtggtaaatggtagtctatagcatctcccttagtccaacatcctgtaacaaagagatcttcacatgtagccattctgatattttgaactctttgtagttgttttagctttattactaaatttttttccaagatatgtatgcttttcaaatgggaagcatgtgattctatccaaaaagtagcccagtgttaatacagtaatttaagaaactgtccagcagaggtctctgaacttcatggtttaagaagagcatttcaaacaataaatcaaacctgattctttgcatgacagaaatatacttctattgagcatattttccagattggattttagaataactgtatttcacataggttaaactctgcttattcatgtttaaagacgctgaaaacttatgttttcagatttttattcccctaacaggataaaagcctggttaccaccaactttgcactataaaaagaataaatatatatgaaacgtagaagacaaaagcaacaactaatattctactatgccaccagcactacaaaggcattgatgtagtttggctttctttctatgcagccaaaatccataattaaatcaagcaactggctgtattgcttgatttataaagaacatgcatgattggactgcaaacttttctttgtgcaaaagcaggaaataaataaataccaatttgtatgttttgtgttgccagcgatgaaatctacattgctccttcaggagtgcaaaaggaacgaattcagcctgaagacatgtttgtttgtgatataaatgaaaaggacataagtggaccttcgccatcgaagaagctaaaaaaaagccagtgtactcctcttttcatgaatgcttacacaatgagaggagcaggtgcagtgattcatacccactctaaagctgctgtgatggccacccttctctttccaggacgggagtttaaaattacacatcaagagatgataaaaggaataaagaaatgtacttccggagggtattatagatatgatgatatgttagtggtacccattattgagaatacacctgaggagaaagacctcaaagatagaatggctcatgcaatgaatgaatacccagactcctgtgcagtactggtcagacgtcatggagtatatgtgtggggggaaacatgggagaaggccaaaaccatgtgtgagtgttatgactatttatttgatattgccgtatcaatgaagaaagtaggacttgatccttcacagctcccagttggagaaaatggaattgtctaagccaaaagaaagtctaattatatacagagataaagctaaacgtaattattatttaaatgaaagctatttttttaaatgaattgaaatttttcatgatgctactaatttgccactaaatactgcaaatggtcaccctgaatctcttctgacattggatgttatttgcttatattcttataattttaaatgagggcacagtgaaatgaaaattttatactctatgtttctgtttatttttaaatccttaacagcaaaatatttgcctttaatttcttttttatatatactctcagagaattcctcttaatttttaaagatgctggtgataataaaattcattagaaaattt

SEQ ID NO: 366407 - DNA, 1139 bp, Homo sapiens
cgccccgcccccgggctgccctcagcgccgcctgattgcatttgcggcctcgctgccgcatcccaggctaagcgccgcgcgcaaagccgtgcggagattggaggccgcgcgggtccctggtctgggccatgtctggctgtgatgctcgggagggagactgttgttcccggagatgcggcgcgcagtggcttacatggctatcaaaattgaagctcaaggtcaccagagttttgcaataccttcaggagtgcaaaaggaacgaattcagcctgaagacatgtttgtttgtgatataaatgaaaaggacataagtggaccttcgccatcgaagaagctaaaaaaaagccagtgtactcctcttttcatgaatgcttacacaatgagaggagcaggtgcagtgattcatacccactctaaagctgctgtgatggccacccttctctttccaggacgggagtttaaaattacacatcaagagatgataaaaggaataaagaaatgtacttccggagggtattatagatatgatgatatgttagtggtacccattattgagaatacacctgaggagaaagacctcaaagatagaatggctcatgcaatgaatgaatacccagactcctgtgcagtactggtcagacgtcatggagtatatgtgtggggggaaacatgggagaaggccaaaaccatgtgtgagtgttatgactatttatttgatattgccgtatcaatgaagaaagtaggacttgatccttcacagctcccagttggagaaaatggaattgtctaagccaaaagaaagtctaattatatacagagataaagctaaacgtaattattatttaaatgaaagctatttttttaaatgaattgaaatttttcatgatgctactaatttgccactaaatactgcaaatggtcaccctgaatctcttctgacattggatgttatttgcttatattcttataattttaaatgagggcacagtgaaatgaaaattttatactctatgtttctgtttatttttaaatccttaacagcaaaatatttgcctttaatttcttttttatatatactctcagagaattcctcttaatttttaaagatgctggtgataataaaattcattagaaaattt

SEQ ID NO: 366408 - DNA, 1169 bp, Homo sapiens
cgccccgcccccgggctgccctcagcgccgcctgattgcatttgcggcctcgctgccgcatcccaggctaagcgccgcgcgcaaagccgtgcggagattggaggccgcgcgggtccctggtctgggccatgtctggctgtgatgctcgggagggagactgttgttcccggagatgcggcgcgcaggacaaggagcatccaagatacctgatcccagaactttgcaaacagttttaccatttaggctgggtcactgggactggaggaggaattagcttgaagcatggcgatgaaatctacattgctccttcaggagtgcaaaaggaacgaattcagcctgaagacatgtttgtttgtgatataaatgaaaaggacataagtggaccttcgccatcgaagaagctaaaaaaaagccagtgtactcctcttttcatgaatgcttacacaatgagaggagcaggtgcagtgattcatacccactctaaagctgctgtgatggccacccttctctttccaggacgggagtttaaaattacacatcaagagatgataaatatgatgatatgttagtggtacccattattgagaatacacctgaggagaaagacctcaaagatagaatggctcatgcaatgaatgaatacccagactcctgtgcagtactggtcagacgtcatggagtatatgtgtggggggaaacatgggagaaggccaaaaccatgtgtgagtgttatgactatttatttgatattgccgtatcaatgaagaaagtaggacttgatccttcacagctcccagttggagaaaatggaattgtctaagccaaaagaaagtctaattatatacagagataaagctaaacgtaattattatttaaatgaaagctatttttttaaatgaattgaaatttttcatgatgctactaatttgccactaaatactgcaaatggtcaccctgaatctcttctgacattggatgttatttgcttatattcttataattttaaatgagggcacagtgaaatgaaaattttatactctatgtttctgtttatttttaaatccttaacagcaaaatatttgcctttaatttcttttttatatatactctcagagaattcctcttaatttttaaagatgctggtgataataaaattcattagaaaattt

SEQ ID NO: 366409 - DNA, 1288 bp, Homo sapiens
  misc_feature (1282)..(1284): n is a, c, g, or t
  misc_feature (1286)..(1288): n is a, c, g, or t
cgccccgcccccgggctgccctcagcgccgcctgattgcatttgcggcctcgctgccgcatcccaggctaagcgccgcgcgcaaagccgtgcggagattggaggccgcgcgggtccctggtctgggccatgtctggctgtgatgctcgggagggagactgttgttcccggagatgcggcgcgcaggacaaggagcatccaagatacctgatcccagaactttgcaaacagttttaccatttaggctgggtcactgggactggaggaggaattagcttgaagcatggcgatgaaatctacattgctccttcaggagtgcaaaaggaacgaattcagcctgaagacatgtttgtttgtgatataaatgaaaaggacataagtggaccttcgccatcgaagaagctaaaaaaaagccagtgtactcctcttttcatgaatgcttacacaatgagaggagcaggtgcagtgattcatacccactctaaagctgctgtgatggccacccttctctttccaggacgggagtttaaaattacacatcaagagatgataaaaggaataaagaaatgtacttccggagggtattatagatatgatgatatgttagtggtacccattattgagaatacacctgaggagaaagacctcaaagatagaatggctcatgcaatgaatgaatacccagactcctgtgcagtactggtcagacgtcatggagtatatgtgtggggggaaacatgggagaaggccaaaaccatgtgtgagtgttatgactatttatttgatattgccgtatcaatgaagaaagtaggacttgatccttcacagctcccagttggagaaaatggaattgtctaagccaaaagaaagtctaattatatacagagataaagctaaacgtaattattatttaaatgaaagctatttttttaaatgaattgaaatttttcatgatgctactaatttgccactaaatactgcaaatggtcaccctgaatctcttctgacattggatgttatttgcttatattcttataattttaaatgagggcacagtgaaatgaaaattttatactctatgtttctgtttatttttaaatccttaacagcaaaatatttgcctttaatttcttttttatatatactctcagagaattcctcttaatttttaaagatgctggtgataataaaattcattagaaaatttttcctcattgtggaatgagcattctcttgttttaatgttggtgtcagaaaataaatatgaaacattaagtccaaannnannn

SEQ ID NO: 366410 - DNA, 1050 bp, Homo sapiens
cgccccgcccccgggctgccctcagcgccgcctgattgcatttgcggcctcgctgccgcatcccaggctaagcgccgcgcgcaaagccgtgcggagattggaggccgcgcgggtccctggtctgggccatgtctggctgtgatgctcgggagggagactgttgttcccggagatgcggcgcgcaggacaaggagcatccaagatacctgatcccagaactttgcaaacagttttaccatttaggctgggtcactgggactggaggaggaattagcttgaagcatggcgatgaaatctacattgctccttcaggagtgcaaaaggaacgaattcagcctgaagacatgtttgtttgtgatataaatgaaaaggacataagtggaccttcgccatcgaagaagctaaaaaaaagccagtgtactcctcttttcatgaatgcttacacaatgagaggagcaggtgcagtgattcatacccactctaaagctgctgtgatggccacccttctctttccaggacgggagtttaaaattacacatcaagagatgataaaaggaataaagaaatgtacttccggagggtattatagatatgatgatatgttagtggtacccattattgagaatacacctgaggagaaagacctcaaagatagaatggctcatgcaatgaatgaatacccagactcctgtgcagtactggtcagacgtcatggagtatatgtgtggggggaaacatgggagaaggccaaaaccatgtgtgagtgttatgactatttatttgatattgccgtatcaatgaagaaagtaggacttgatccttcacagctcccagttggagaaaatggaattgtctaagccaaaagaaagttatattaagagataagtaagtatttattaatgaaggcatttttaatggattgattcagaggcaatggctaataggagggccgaatcttaatgggggtggtatcaacaaagggggaggaatactggtggttatagaaaggattgttgacagtggggaaaaccggggggggaaaaagggggc

SEQ ID NO: 366411 - DNA, 1301 bp, Homo sapiens
cgccccgcccccgggctgccctcagcgccgcctgattgcatttgcggcctcgctgccgcatcccaggctaagcgccgcgcgcaaagccgtgcggagattggaggccgcgcgggtccctggtctgggccatgtctggctgtgatgctcgggagggagactgttgttcccggagatgcggcgcgcagtggcttacatggctatcaaaattgaagctcaaggtcaccagagttttgcaataccttcaggaacattctggctttggcgctcacttctctcccaggacaaggagcatccaagatacctgatcccagaactttgcaaacagttttaccatttaggctgggtcactgggactggaggaggaattagcttgaagcatggcgatgaaatctacattgctccttcaggagtgcaaaaggaacgaattcagcctgaagacatgtttgtttgtgatataaatgaaaaggacataagtggaccttcgccatcgaagaagctaaaaaaaagccagtgtactcctcttttcatgaatgcttacacaatgagaggagcaggtgcagtgattcatacccactctaaagctgctgtgatggccacccttctctttccaggacgggagtttaaaattacacatcaagagatgataaaaggaataaagaaatgtacttccggagggtattatagatatgatgatatgttagtggtacccattattgagaatacacctgaggagaaagacctcaaagatagaatggctcatgcaatgaatgaatacccagactcctgtgcagtactggtcagacgtcatggagtatatgtgtggggggaaacatgggagaaggccaaaaccatgtgtgagtgttatgactatttatttgatattgccgtatcaatgaagaaagtaggacttgatccttcacagctcccagttggagaaaatggaattgtctaagccaaaagaaagtctaattatatacagagataaagctaaacgtaattattatttaaatgaaagctatttttttaaatgaattgaaatttttcatgatgctactaatttgccactaaatactgcaaatggtcaccctgaatctcttctgacattggatgttatttgcttatattcttataattttaaatgagggcacagtgaaatgaaaattttatactctatgtttctgtttatttttaaatccttaacagcaaaatatttgcctttaatttcttttttatatatactctcagagaattcctcttaatttttaaagatgctggtgataataaaattcattagaaaattt

SEQ ID NO: 366412 - DNA, 331 bp, Homo sapiens
gcaaagtggtctccttcagttttaataggatttccctggctgcgttgttgagagatccctgaggaaggcaaaggcagagcagaagaccagtcaagaggctgatgtcataattcaggcaagcagtgatgatggcctagaccagggcagtatcagtggaggtgggaaaaagtggtgtgagtctggatgtattttgaaagaagagtctacatgagagagaaaagactaacgggatctgttcccaagtaactcaactgcattcctgtacaaagctgaagagtcttacagggctgcgtctatagccaggagtacgctcaggcttcagaagaggctc

SEQ ID NO: 366413 - DNA, 360 bp, Homo sapiens
gctcgactaatgataaggtaatggccgggaagccaataaatgtttgttgaatgagttaatgaaagacactattgggcctggcacagtggctcgtgcctgtaatcccagcactttgggaggctgaggcaggtggatcatcttattaatgtaccctggtctttcacatttttatttaactttaaatcaaattgaacaatttcaggaacaacctcccatccctcaaaggaaacaagctgatgcccagaaatattttctgtggagctttatataatttttttttctttccagagacacattttcagctctgccaaaccataatgcttaggctttcgtttggatatagctgaggtgtcttggaag

SEQ ID NO: 366414 - DNA, 1355 bp, Homo sapiens
ctaccatatgtgcagcacaacagtgacatcttaaggccaagtaaccagagctcctttagccagagaaagaacttgaattgggatctgatttcaaagaaatcccattatattatcaagtcgttttcaaatttacaatattcgactggtaaagaaagtgcttctttatgacttcttttgcagtctttgtgaaccttttaatgtgcaatagtaaacattgacattttacatagacatattgtatattaatgcatgcatttcactgcatagtttattgacactacccttgtaaagcttttatggaagaaccaacaagccacagcagtatagcaaaagaggcttaatctttataaattggggccttttctgtctctttgctagcctaggtggctgtatacaaattcgggtgggagggggcaggaaacacctcttcacatttaaggttttctacttgggtgtactctagccaattcaaaacaaattgcttactttaataatacaattttaccattttataaaaaaaatcaaatcacaacatgtttaactgaaatggctgtattgtaattaatattttgagataattgtgattttgagcttaaattatatataaaaaattgtcatttttgtatgtgttaaaaagactactatatcacaattaaaagtactttttagttgaactacatattgatgtaaataaaactgaatgaagacatatttactactttattaacatagatcgtgaatgtacttactggtttttttgcagtatgagaccataacaaccttgaaagctgcttcattttatgtgcaaagaagtcctatgaatctatattttaaatttactgaaccagtgaaattaattactgtcagttaatttgcaaatgcaagctgtattctccagttttattttatgtactgacactaattggtaaaggtgtacaatgtgattagaatgcattttgaagatgctttctgtacagatacaaaatacagggactaaaataatgctgtgcagtgtatagcagagccatttttcggctttggtgtactcaactttttcagtatttaaaaaagtgttttgaataacataaaagtctccttattgtataaataataaaatgtcaccttattgtaaagtgtcttttgtttactatcaaagcagacctcgtagtcagcaacagagatgtaataagaaaaaggcatgtttttgtttttattttttatttttttgagatggaggagtttcactcttacccaaggctggagtacagagtggcgcgatctcagcactctgtcatcctctgcctcctgggttcaagtgattctcctgcctcagcctcccaagatgctgagattac

SEQ ID NO: 366415 - DNA, 627 bp, Homo sapiens
aaagtagagatgttggcatctctaaaatgccaacaaagtttcaaaaagcaaaacatggggaagagattttcatccttgccttaaaaacaaagtttaaataatagcactttctattaataaaatttctatgaatttaactcttggatctttaatttcctaaaagagaacaaatataaatagaaatgccttttttctaccatatttcagttgaaataatggatttgtttaaactacatattcctatatgtcaaataataataaagtaggataaagtcatagttatattaaaattcataattttattaagatctccactttctgaaagggaacacacttatggaacttcatttggatgtggagaagaattagagaatctcaaggcatcaattaaattatgggtggcaatatttaaaatttgaaagctcacagttgttatagacagagatagctacatttgaatccggatttaaccacttcataactgtggaaaaagatggagttgattttctttcttatattcaggtttctaatttctaaagtgggagaaataatattaacacccagtgaggagtcagtcagtttctgatcctgatgcactcgtctgcaagtggtttagagaatttactc

SEQ ID NO: 366416 - DNA, 489 bp, Homo sapiens
gatatgattaaatatgctataattaaaatgttggactcttgaattttgataaactttaaagctagaaagttggctgggcgcagtggctcacacctgtattcccagtgctttgggaggccgagacaggcagatcacaaggtcaggagttcgagaccagcctagtcaatatggtgaaaccatatctctactaaaaatacaaaaattagctgggtgcagtggtgtgaacctttagtcccacctactcgggaggctgagacaggagaatcacttgaacccaggaggcagaggctgcagtgaaccgagatcacaccactacactccagcctgggtgaatcgcttgaacccaggaagcggaggctggaatgagcagagatcgtgccactacactccagcctgggtgaatcgcttgaacccaggaggcggaagttgcagtgagccgagatcgtgccactacactccaccctgggtgacagagcgagactccatctc

SEQ ID NO: 366417 - DNA, 1317 bp, Homo sapiens
ctggactgctccggcggccgcggggcggggcggagcactcggcggagccgctctgcctgcgtccgctcttcccgcagccaagggtgggcgccggtcctaggaggcgcacggttgtaagccagacaaaaagaactggggtgcccggagtgccaggtggcgggcaagcggtgggcttttcggcggggtctttaggatttgcagctccaggaagcgagatgtcgaagccgccacccaaaccagtcaaaccagggcaagttaaagtcttcagagccctgtatacgtttgaacccagaactccagatgaattatactttgaggaaggtgatattatctacattactgacatgagcgataccaattggtggaaaggcacctccaaaggcaggactggactaattccaagcaactatgtggctgagcaggcagaatccattgacaatccattgcatgaagcagcaaaaagaggcaacttgagctggttgagagagtgtttggacaacagagtgggtgttaatggcttagacaaagctggaagcactgccttatactgggcttgccacgggggccacaaagatatagtggaaatgctatttactcaaccaaatattgaactgaaccagcagaacaagttgggagatacagctttgcatgctgctgcctggaagggttatgcagatatcgtccagttgcttctggcaaaaggtgctagaacagacttaagaaacattgagaagaagctggccttcgacatggctaccaatgctgcctgtgcatctctcctgaaaaagaaacagggaacagatgcagttcgaacattaagcaatgccgaggactatctcgatgatgaagactcagattaattcctttctggagctttgagatctaaaacttctgttgcttttgccattccaaaactttgtctttgccagaaaagtgttggtaactataaagaaaattatatatgaacacggcagtgttgcactgtgtttgagtagaacgtgtaaatgaattgttcccacctttggtttgccagtaagtgactggattcttggcacatttgtgttcaccaaagtagaacaagaagatattatttctatttatcaagcaaaaggaattttaagattttttttttctttaaaaacaaattaggatttttttttttttttttttttttagttaaaatgctttacctcaatggttgagatattttgaatggatttttcaagggggggaaatgcttattataataataaaccaaaatacttaacagaaaattgtcagctattctgacaaaaataaacattttgagagacttta

SEQ ID NO: 366418 - DNA, 164 bp, Homo sapiens
aagtcgggccaggatgccatcctctcttttgtgaggcatcagctccaggtgaggcaattacagggttttcaagggggggaaatgcttattataataataaaccaaaatacttaacagaaaattgtcagctattctgacaaaaataaacattttgagagacttta

SEQ ID NO: 366419 - DNA, 1178 bp, Homo sapiens
ggcgacagccaagcgcgcgcctgtacccagtgcgccgctacccgcagctcgctccccgagaggcccacagcccctttccccacgctcctcctgggttagagggatgccagggcaagttaaagtcttcagagccctgtatacgtttgaacccagaactccagatgaattatactttgaggaaggtgatattatctacattactgacatgagcgataccaattggtggaaaggcacctccaaaggcaggactggactaattccaagcaactatgtggctgagcaggcagaatccattgacaatccattgcatgaagcagcaaaaagaggcaacttgagctggttgagagagtgtttggacaacagagtgggtgttaatggcttagacaaagctggaagcactgccttatactgggcttgccacgggggccacaaagatatagtggaaatgctatttactcaaccaaatattgaactgaaccagcagaacaagttgggagatacagctttgcatgctgctgcctggaagggttatgcagatatcgtccagttgcttctggcaaaaggtgctagaacagacttaagaaacattgagaagaagctggccttcgacatggctaccaatgctgcctgtgcatctctcctgaaaaagaaacagggaacagatgcagttcgaacattaagcaatgccgaggactatctcgatgatgaagactcagattaattcctttctggagctttgagatctaaaacttctgttgcttttgccattccaaaactttgtctttgccagaaaagtgttggtaactataaagaaaattatatatgaacacggcagtgttgcactgtgtttgagtagaacgtgtaaatgaattgttcccacctttggtttgccagtaagtgactggattcttggcacatttgtgttcaccaaagtagaacaagaagatattatttctatttatcaagcaaaaggaattttaagattttttttttctttaaaaacaaattaggatttttttttttttttttttttttagttaaaatgctttacctcaatggttgagatattttgaatggatttttcaagggggggaaatgcttattataataataaaccaaaatacttaacagaaaattgtcagctattctgacaaaaataaacattttgagagacttta

SEQ ID NO: 366420 - DNA, 624 bp, Homo sapiens
ctggactgctccggcggccgcggggcggggcggagcactcggcggagccgctctgcctgcgtccgctcttcccgcagccaagggtgggcgccggtcctaggaggcgcacggttgtaagccagacaaaaagaactggggtgcccggagtgccaggtggcgggcaagcggtgggcttttcggcggggtctttaggatttgcagctccaggaagcgagatgtcgaagccgccacccaaaccagtcaaaccagggcaagttaaagtcttcagagccctgtatacgtttgaacccagaactccagatgaattatactttgaggaaggtgatattatctacattactgacatgagcgataccaattggtggaaaggcacctccaaaggcaggactggactaattccaagcaactatgtggctgagcaggcagaatccattgacaatccattgcatgaagcagcaaaaagaggcaacttgagctggttgagagagtgtttggacaacagagtgggtgttaatggcttagacaaagctggaagcactgccttatactgggcttgccacgggggccacaaaggtattacattttgtttgttatatgtttctatgctgctgaaaatgtgtttca

SEQ ID NO: 366421 - DNA, 587 bp, Homo sapiens
ctggactgctccggcggccgcggggcggggcggagcactcggcggagccgctctgcctgcgtccgctcttcccgcagccaagggtgggcgccggtcctaggaggcgcacggttgtaagccagacaaaaagaactggggtgcccggagtgccaggtggcgggcaagcggtgggcttttcggcggggtctttaggatttgcagctccaggaagcgagatgtcgaagccgccacccaaaccagtcaaaccagggcaagttaaagtcttcagagccctgtatacgtttgaacccagaactccagatgaattatactttgaggaaggtgatattatctacattactgacatgagcgataccaattggtggaaaggcacctccaaaggcaggactggactaattccaagcaactatgtggctgagcaggcagaatccattgacaatccattgcatgaagcagcaaaaagaggcaacttgagctggttgagagagtgtttggacaacagagtgggtgttaatggcttagacaaagctgtatacgtttgaacccagaactccagatgaattatactttgaggaaggcgatattat

SEQ ID NO: 366422 - DNA, 235 bp, Homo sapiens
aattcaatccttttttgtccattaccctactgccttaccacccaattagcgctatataaatattagttgactgaatgataagttgtcaaaatttttatcagttggtacccctttgttagagttgcgtgttttgcttttgacccagctacaaagagcatgaaactaatttgcaatgcataatttttttaagaaatgctttttactgtagagaaataaaagttgaaaactaatgcaa

SEQ ID NO: 366423 - DNA, 438 bp, Homo sapiens
gaattcaggagatggacagggcatgtagccacattggttatggaggggatgggtaaaggagatagaggtagagagagtgatgctgcagttttgacttaagtaactcagtgagggctgaagccatgaactgtggtaaggagatggtggttaacaacgtggactctggataaaccctgtatgcgttcaaattctagttctaccattctgtctatatgactgaacgaattatctactcactctaacctcttactgagctgcaaaattgggggataaaagcaacagtgtatctctggagctgtgatgattaataatagcagtgatagtggtgttattttgaatagggtttatgggaaatatgagtttgattttggagttgcctcataaatatccaagaggaggcaccaagcaggcagttatatgtatggatttggagaatta

SEQ ID NO: 366424 - DNA, 696 bp, Homo sapiens
gagctccaggtcttctcaatgaatgaaagaatggatgaatgtctttctcctaagtcatgtatgacctgtagaggcttccaggtcttctaatcttatccagtgtgcaacactgtcctacaaagcacagtggtaacttctaactttcctttctccccaggctctactacccgaaggatagtgcccgaagttgctgcttggcatagatgagcctcagcttccagggcactgtgggcctgttggtctactagggccctgaagtccacctggccttcctgttcttcactcccttcagccacacgcttcatggccttgagttcaccttggctgtcctaacagggccaatcaccagtgaccagctagactgtgattttgatagcgtcattcagaagaaggcgtccaaggagctgaaggtggtgaaatttgtcctgcaggtccctcgggagatcctggagctggagcatgagtgtctgacaatcagaagcatcatgtccaatgtccagatggccagaatgaatgtgatagttcagaccaatgccttccactgctcctttatgactgcacttctagccagtagctctgcacaagttagctctgtagaagtaagaacttgggcttaaatcatgggctatctctccacagccaagtggagctctgagaatacaacaagtgctcaataaatgcttgctgattgactga

SEQ ID NO: 366425 - DNA, 2516 bp, Homo sapiens
gctggagcaaccaagcagggcctacaagccgaggagggctgtttaaaggcgcaggggccattttaccctccaggttggccctgctcaggaccaggaggaaacacctccagcccgcgacctcctcccacagggggaaaaggaaagcaggaggaccacagaagctttggcaccgaggatccccgcagtcttcacccgcggagattccggctgaaggagctgtccagcgactacaccgctaagcgcagggagcccaagcctccgcaccggattccggagcacaagctccaccgcgcatgcgcacacgccccagacccaggctcaggaggactgagaattttctgaccgcagtgcaccatgggaagctctgaagtttccataattcctgggctccagaaagaagaaaaggcggccgtggagagacgaagacttcatgtgctgaaagctctgaagaagctaaggattgaggctgatgaggccccagttgttgctgtgctgggctcaggcggaggactgcgggctcacattgcctgccttggggtcctgagtgagatgaaagaacagggcctgttggatgccgtcacgtacctcgcaggggtctctggatccacttgggcaatatcttctctctacaccaatgatggtgacatggaagctctcgaggctgacctgaaacatcgatttacccgacaggagtgggacttggctaagagcctacagaaaaccatccaagcagcgaggtctgagaattactctctgaccgacttctgggcctacatggttatctctaagcaaaccagagaactgccggagtctcatttgtccaatatgaagaagcccgtggaagaagggacactaccctacccaatatttgcagccattgacaatgacctgcaaccttcctggcaggaggcaagagcaccagagacctggttcgagttcacccctcaccacgctggcttctctgcactgggggcctttgtttccataacccacttcggaagcaaattcaagaagggaagactggtcagaactcaccctgagagagacctgactttcctgagaggtttatggggaagtgctcttggtaacactgaagtcattagggaatacatttttgaccagttaaggaatctgaccctgaaaggtttatggagaagggctgttgctaatgctaaaagcattggacaccttatttttgcccgattactgaggctgcaagaaagttcacaaggggaacatcctcccccagaagatgaaggcggtgagcctgaacacacctggctgactgagatgctcgagaattggaccaggacctccctggaaaagcaggagcagccccatgaggaccccgaaaggaaaggctcactcagtaacttgatggattttgtgaagaaaacaggcatttgcgcttcaaagtgggaatgggggaccactcacaacttcctgtacaaacacggtggcatccgggacaagataatgagcagccggaagcacctccacctggtggatgctggtttagccatcaacactcccttcccactcgtgctgcccccgacgcgggaggttcacctcatcctctccttcgacttcagtgccggagatcctttcgagaccatccgggctaccactgactactgccgccgccacaagatcccctttccccaagtagaagaggctgagctggatttgtggtccaaggcccccgccagctgctacatcctgaaaggagaaactggaccagtggtgatgcattttcccctgttcaacatagatgcctgtggaggtgatattgaggcatggagtgacacatacgacacattcaagcttgctgacacctacactctagatgtggtggtgctactcttggcattagccaagaagaatgtcagggaaaacaagaagaagatccttagagagttgatgaacgtggccgggtaggtgggagaccatagtcgctctgatgcctatgctcgttcagctctactacccgaaggatagtgcccgaagttgctgcttggcatagatgagcctcagcttccagggcactgtgggcctgttggtctactagggccctgaagtccacctggccttcctgttcttcactcccttcagccacacgcttcatggccttgagttcaccttggctgtcctaacagggccaatcaccagtgaccagctagactgtgattttgatagcgtcattcagaagaaggcgtccaaggagctgaaggtggtgaaatttgtcctgcaggtccctcgggagatcctggagctggagcatgagtgtctgacaatcagaagcatcatgtccaatgtccagatggccagaatgaatgtgatagttcagaccaatgccttccactgctcctttatgactgcacttctagccagtagctctgcacaagttagctctgtagaagtaagaacttgggcttaaatcatgggctatctctccacagccaagtggagctctgagaatacaacaagtgctcaataaatgcttgctgattgactga

SEQ ID NO: 366426 - DNA, 924 bp, Homo sapiens
  misc_feature (43)..(43): n is a, c, g, or t
atagaaaagtttgtaaaaaaagcaggtggtacggtcggaattnccgggatgatcctttcgagaccatccgggctaccactgactactgccgccgccacaagatcccctttccccaagtagaagaggctgagctggatttgtggtccaaggcccccgccagctgctacatcctgaaaggagaaactggaccagtggtgatgcattttcccctgttcaacatagatgcctgtggaggtgatattgaggcatggagtgacacatacgacacattcaagcttgctgacacctacactctagatgtggtggtgctactcttggcattagccaagaagaatgtcagggaaaacaagaagaagatccttagagagttgatgaacgtggccgggctctactacccgaaggatagtgcccgaagttgctgcttggcatagatgagcctcagcttccagggcactgtgggcctgttggtctactagggccctgaagtccacctggccttcctgttcttcactcccttcagccacacgcttcatggccttgagttcaccttggctgtcctaacagggccaatcaccagtgaccagctagactgtgattttgatagcgtcattcagaagaaggcgtccaaggagctgaaggtggtgaaatttgtcctgcaggtccctcgggagatcctggagctggagcatgagtgtctgacaatcagaagcatcatgtccaatgtccagatggccagaatgaatgtgatagttcagaccaatgccttccactgctcctttatgactgcacttctagccagtagctctgcacaagttagctctgtagaagtaagaacttgggcttaaatcatgggctatctctccacagccaagtggagctctgagaatacaacaagtgctcaataaatgcttgctgattgactga

SEQ ID NO: 366427 - DNA, 1345 bp, Homo sapiens
ctgaccaacatggagaaaccctgtctctactaaatatatgaaattagccgggcgtggtggagcatgtctgtaatcccagctactcgggaggcaggagaatcgcttggaccagggaggcggaggttgcagtgagctgagatcatgccattgcactccagcctgggcaacaagagtgaaactctgcctcaaaaataagaaaagaaaagtaccttcacggtgacattatatttctgttacacagtgatgatggagaatatctcatttatcttccaaatacccctgtgaggtggctattacagagatcctttgcagaggtgatgagatgcacccataccacatatctcgttgggctcctgggctcaaatgatcttcccatctcagcttcctgagtagctagggctacaggtgcacgcccccatgcctggctaattgaaatatatatatatatatatatactgtagagatgaggtctccaacatctttctgtggcagagctgggattcaaagcctcatctaggcaccattttccttgccctctgagtcccgcagcccccagccccaaaggttactctctaacctcgcgaatgttgtctctaggtgggctggggagtgcgggtgatggcagaggcttactctttcccttacagaagatgttgtccctgtccaagctgacccttgctctgttgtgtgtctgggctgttagctgaggtcccattgggtctccaggccccaggggtcttctggaggggtcttgcaaccatttcttattgcctccttctcagaccatccgggctaccactgactactgccgccgccacaagatcccctttccccaagtagaagaggctgagctggatttgtggtccaaggcccccgccagctgctacatcctgaaaggagaaactggaccagtggtgatgcattttcccctgttcaacatagatgcctgtggaggtaggtgcaggggaggagcaggtgagaagccacctgtattagtccatgctcacactgctaataaaaacatacctgagactgggtaatttacaaaggaagaaggtttaattgactcacagttcagcatggattgagaggcctcaggaaacttacagtcatggtggaaagcgaaggccaagcaagtcaccttcttcacaaggcggcaggaaggagaagtgagtgccagcagggcaattgccagatgcttataaaatcatcagatcagccgggcgcggtggctcatgcctgtaatcccagcactttgggaggctgaggcgggcggatcacaaggtcaggagattgagaccatcctggctaacacagtgaaaccccatctctactaaaaatacaa

SEQ ID NO: 366428 - DNA, 536 bp, Homo sapiens
tgtggtgggggcgtgtgtcctgcaaacagtctttccccatctcacaccctggggactcgcagcccttcacttgagtcacagtataggctgcagcccgtcacttccttcaaagggactgtggattccttcagatttcctgtctaattcctgaatcacttcttgaaaaaaaagttcacagtgtgaatctctacacagtgttttgtccttccaagtgggaggggtatgccagcaatgcctctaatccaacatgtttgctgtcctgctctttcatagtaggacagctaggactttccagaagtgcccccataaatctgcatgggccagagcttgacctccctctagctgcaagggaggctgggaaatatttgcccttcctgcctgtgggctgagaaacgttggcatggaagggagcttgaaatggccttggggtagccagtctacagtgcccggctggctccacccatagaaggttcctgaggacaaatctgtcttgtttactgctctattccaacagtcagaagagtgccgggtgccca

SEQ ID NO: 366429 - DNA, 1158 bp, Homo sapiens
tcagtctcctgaactcaccttggctgtctcggcttctttccctaggctcactcagtaacttgatggattttgtgaagaaaacaggcatttgcgcttcaaagtgggaatgggggaccactcacaacttcctgtacaaacacggtggcatccgggacaagataatgagcagccggaagcacctccacctggtggatgctggtttagccatcaacactcccttcccactcgtgctgcccccgacgcgggaggttcacctcatcctctccttcgacttcagtgccggagatcctttcgagaccatccgggctaccactgactactgccgccgccacaagatcccctttccccaagtagaagaggctgagctggatttgtggtccaaggcccccgccagctgctacatcctgaaaggagaaactggaccagtggtgatgcattttcccctgttcaacatagatgcctgtggaggtgatattgaggcatggagtgacacatacgacacattcaagcttgctgacacctacactctagatgtggtggtgctactcttggcattagccaagaagaatgtcagggaaaacaagaagaagatccttagagagttgatgaacgtggccgggctctactacccgaaggatagtgcccgaagttgctgcttggcatagatgagcctcagcttccagggcactgtgggcctgttggtctactagggccctgaagtccacctggccttcctgttcttcactcccttcagccacacgcttcatggccttgagttcaccttggctgtcctaacagggccaatcaccagtgaccagctagactgtgattttgatagcgtcattcagaagaaggcgtccaaggagctgaaggtggtgaaatttgtcctgcaggtccctcgggagatcctggagctggagcatgagtgtctgacaatcagaagcatcatgtccaatgtccagatggccagaatgaatgtgatagttcagaccaatgccttccactgctcctttatgactgcacttctagccagtagctctgcacaagttagctctgtagaagtaagaacttgggcttaaatcatgggctatctctccacagccaagtggagctctgagaatacaacaagtgctcaataaatgcttgctgattgactga

SEQ ID NO: 366430 - DNA, 1644 bp, Homo sapiens
ctgaccaacatggagaaaccctgtctctactaaatatatgaaattagccgggcgtggtggagcatgtctgtaatcccagctactcgggaggcaggagaatcgcttggaccagggaggcggaggttgcagtgagctgagatcatgccattgcactccagcctgggcaacaagagtgaaactctgcctcaaaaataagaaaagaaaagtaccttcacggtgacattatatttctgttacacagtgatgatggagaatatctcatttatcttccaaatacccctgtgaggtggctattacagagatcctttgcagaggtgatgagatgcacccataccacatatctcgttgggctcctgggctcaaatgatcttcccatctcagcttcctgagtagctagggctacaggtgcacgcccccatgcctggctaattgaaatatatatatatatatatatactgtagagatgaggtctccaacatctttctgtggcagagctgggattcaaagcctcatctaggcaccattttccttgccctctgagtcccgcagcccccagccccaaaggttactctctaacctcgcgaatgttgtctctaggtgggctggggagtgcgggtgatggcagaggcttactctttcccttacagaagatgttgtccctgtccaagctgacccttgctctgttgtgtgtctgggctgttagctgaggtcccattgggtctccaggccccaggggtcttctggaggggtcttgcaaccatttcttattgcctccttctcagaccatccgggctaccactgactactgccgccgccacaagatcccctttccccaagtagaagaggctgagctggatttgtggtccaaggcccccgccagctgctacatcctgaaaggagaaactggaccagtggtgatgcattttcccctgttcaacatagatgcctgtggaggtgatattgaggcatggagtgacacatacgacacattcaagcttgctgacacctacactctagatgtggtggtgctactcttggcattagccaagaagaatgtcagggaaaacaagaagaagatccttagagagttgatgaacgtggccgggctctactacccgaaggatagtgcccgaagttgctgcttggcatagatgagcctcagcttccagggcactgtgggcctgttggtctactagggccctgaagtccacctggccttcctgttcttcactcccttcagccacacgcttcatggccttgagttcaccttggctgtcctaacagggccaatcaccagtgaccagctagactgtgattttgatagcgtcattcagaagaaggcgtccaaggagctgaaggtggtgaaatttgtcctgcaggtccctcgggagatcctggagctggagcatgagtgtctgacaatcagaagcatcatgtccaatgtccagatggccagaatgaatgtgatagttcagaccaatgccttccactgctcctttatgactgcacttctagccagtagctctgcacaagttagctctgtagaagtaagaacttgggcttaaatcatgggctatctctccacagccaagtggagctctgagaatacaacaagtgctcaataaatgcttgctgattgactga

SEQ ID NO: 366431 - DNA, 573 bp, Homo sapiens
gactttgtctctcctttccgagtcaatggtgggttacactgatcttgttccactgattactctctctgccgagtccgctgcattaatgcagcggactcggcactgtgggcctgttggtctactagggccctgaagtccacctggccttcctgttcttcactcccttcagccacacgcttcatggccttgagttcaccttggctgtcctaacagggccaatcaccagtgaccagctagactgtgattttgatagcgtcattcagaagaaggcgtccaaggagctgaaggtggtgaaatttgtcctgcaggtccctcgggagatcctggagctggagcatgagtgtctgacaatcagaagcatcatgtccaatgtccagatggccagaatgaatgtgatagttcagaccaatgccttccactgctcctttatgactgcacttctagccagtagctctgcacaagttagctctgtagaagtaagaacttgggcttaaatcatgggctatctctccacagccaagtggagctctgagaatacaacaagtgctcaataaatgcttgctgattgactga

SEQ ID NO: 366432 - DNA, 1535 bp, Homo sapiens
gctggagcaaccaagcagggcctacaagccgaggagggctgtttaaaggcgcaggggccattttaccctccaggttggccctgctcaggaccaggaggaaacacctccagcccgcgacctcctcccacagggggaaaaggaaagcaggaggaccacagaagctttggcaccgaggatccccgcagtcttcacccgcggagattccggctgaaggagctgtccagcgactacaccgctaagcgcagggagcccaagcctccgcaccggattccggagcccaagcctccgcaccggattccggagcacaagctccaccgcgcatgcgcacacgccccagacccaggctcaggaggactgagaattttctgaccgcagtgcaccatgggaagctctgaagtttccataattcctgggctccagaaagaagaaaaggcggccgtggagagacgaagacttcatgtgctgaaagctctgaagaagctaaggattgaggctgatgaggccccagttgttgctgtgctgggctcaggcggaggactgcgggctcacattgcctgccttggggtcctgagtgagatgaaagaacagggcctgttggatgccgtcacgtacctcgcaggggtctctggatccacttgggcaatatcttctctctacaccaatgatggtgacatggaagctctcgaggctgacctgaaacatcgatttacccgacaggagtgggacttggctaagagcctacagaaaaccatccaagcagcgaggtctgagaattactctctgaccgacttctgggcctacatggttatctctaagcaaaccagagaactgccggagtctcatttgtccaatatgaagaagcccgtggaagaagggacactaccctacccaatatttgcagccattgacaatgacctgcaaccttcctggcaggaggcaagagcaccagagacctggttcgagttcacccctcaccacgctggcttctctgcactgggggcctttgtttccataacccacttcggaagcaaattcaagaagggaagactggtcagaactcaccctgagagagacctgactttcctgagaggtttatggggaagtgctcttggtaacactgaagtcattagggaatacatttttgaccagttaaggaatctgaccctgaaaggtttatggagaagggctgttgctaatgctaaaagcattggacaccttatttttgcccgattactgaggctgcaagaaagttcacaaggggaacatcctcccccagaagatgaaggcggtgagcctgaacacacctggctgactgagatgctcgagaattggaccaggacctccctggaaaagcaggagcagccccatgaggaccccgaaaggaaaggctcactcagtaacttgatggattttgtgaagaaaacaggcatttgcgcttcaaagtgggaatgggggaccactcacaacttcctgtacaaacacggatggctccaccaggagttgttctgtggattaaattaatacttgttaataca

SEQ ID NO: 366433 - DNA, 1716 bp, Homo sapiens
gctggagcaaccaagcagggcctacaagccgaggagggctgtttaaaggcgcaggggccattttaccctccaggttggccctgctcaggaccaggaggaaacacctccagcccgcgacctcctcccacagggggaaaaggaaagcaggaggaccacagaagctttggcaccgaggatccccgcagtcttcacccgcggagattccggctgaaggagctgtccagcgactacaccgctaagcgcagggagcccaagcctccgcaccggattccggagcccaagcctccgcaccggattccggagcacaagctccaccgcgcatgcgcacacgccccagacccaggctcaggaggactgagaattttctgaccgcagtgcaccatgggaagctctgaagtttccataattcctgggctccagaaagaagaaaaggcggccgtggagagacgaagacttcatgtgctgaaagctctgaagaagctaaggattgaggctgatgaggccccagttgttgctgtgctgggctcaggcggaggactgcgggctcacattgcctgccttggggtcctgagtgagatgaaagaacagggcctgttggatgccgtcacgtacctcgcaggggtctctggatccacttgggcaatatcttctctctacaccaatgatggtgacatggaagctctcgaggctgacctgaaacatcgatttacccgacaggagtgggacttggctaagagcctacagaaaaccatccaagcagcgaggtctgagaattactctctgaccgacttctgggcctacatggttatctctaagcaaaccagagaactgccggagtctcatttgtccaatatgaagaagcccgtggaagaagggacactaccctacccaatatttgcagccattgacaatgacctgcaaccttcctggcaggaggcaagagcaccagagacctggttcgagttcacccctcaccacgctggcttctctgcactgggggcctttgtttccataacccacttcggaagcaaattcaagaagggaagactggtcagaactcaccctgagagagacctgactttcctgagaggtttatggggaagtgctcttggtaacactgaagtcattagggaatacatttttgaccagttaaggaatctgaccctgaaaggtttatggagaagggctgttgctaatgctaaaagcattggacaccttatttttgcccgattactgaggctgcaagaaagttcacaaggggaacatcctcccccagaagatgaaggcggtgagcctgaacacacctggctgactgagatgctcgagaattggaccaggacctccctggaaaagcaggagcagccccatgaggaccccgaaaggaaaggtaccatgtgtagtgtgataagtgtcatcaacagtaagtgccaccaaccttctcccccctcttgctcttccccacccctgtgggccagtcctgcaggggacatgaccagatgtcccactggtacagtttggatatttgttcccttccacatctcatgttggaatgtaatcccccaatgtaaattagttcaaccattgtaggagacagtgtggaattcctcaaggatctagatccagaaatactatttggcccagcaatcccattactgggtatatgcccaaaggaatgtaaatcattctgttagaaagatacaggcacatgtatgttca

SEQ ID NO: 366434 - DNA, 650 bp, Homo sapiens
ccaacagccagaagagtgccgggtgcccactaattgcttcataaatatttatggaatggaagaatgatctttcttcctgctgcagatccctgcagtgctttatgccagtctgctggtgctttgaatatcaagcatgacagtcacgtgatggagaatgtttgaattttattgctcttttcttggcaggtttatggggaagtgctcttggtaacactgaagtcattagggaatacatttttgaccagttaaggaatctgaccctgaaaggtttatggagaagggctgttgctaatgctaaaagcattggacaccttatttttgcccgattactgaggctgcaagaaagttcacaaggggaacatcctcccccagaagatgaaggcggtgagcctgaacacacctggagctggagcatgagtgtctgacaatcagaagcatcatgtccaatgtccagatggccagaatgaatgtgatagttcagaccaatgccttccactgctcctttatgactgcacttctagccagtagctctgcacaagttagctctgtagaagtaagaacttgggcttaaatcatgggctatctctccacagccaagtggagctctgagaatacaacaagtgctcaataaatgcttgctgattgactga

SEQ ID NO: 366435 - DNA, 361 bp, Homo sapiens
ggtagccagtctacagtgcccggctggctccacccatagaaggttcctgaggacaaatctgtcttgtttactgctctattccaacagtcagaagagtgccgggtgcccactgattgcttcataaatatttatggaatggaagaatgatctttcttcctgctgcagatccctgcagtgctttatgccagtctgctggtgctttgaatatcaaacatgacagtcatgtgatggagaatgtttgaattttattgctattttcttggcaggtttatggagaagggctgttgctaatgctaaaagcattggacaccttatttttggtgagtatttggggaacagaaaggtcaaagcctagagatat

SEQ ID NO: 366436 - DNA, 2473 bp, Homo sapiens
gctggagcaaccaagcagggcctacaagccgaggagggctgtttaaaggcgcaggggccattttaccctccaggttggccctgctcaggaccaggaggaaacacctccagcccgcgacctcctcccacagggggaaaaggaaagcaggaggaccacagaagctttggcaccgaggatccccgcagtcttcacccgcggagattccggctgaaggagctgtccagcgactacaccgctaagcgcagggagcccaagcctccgcaccggattccggagcacaagctccaccgcgcatgcgcacacgccccagacccaggctcaggaggactgagaattttctgaccgcagtgcaccatgggaagctctgaagtttccataattcctgggctccagaaagaagaaaaggcggccgtggagagacgaagacttcatgtgctgaaagctctgaagaagctaaggattgaggctgatgaggccccagttgttgctgtgctgggctcaggcggaggactgcgggctcacattgcctgccttggggtcctgagtgagatgaaagaacagggcctgttggatgccgtcacgtacctcgcaggggtctctggatccacttgggcaatatcttctctctacaccaatgatggtgacatggaagctctcgaggctgacctgaaacatcgatttacccgacaggagtgggacttggctaagagcctacagaaaaccatccaagcagcgaggtctgagaattactctctgaccgacttctgggcctacatggttatctctaagcaaaccagagaactgccggagtctcatttgtccaatatgaagaagcccgtggaagaagggacactaccctacccaatatttgcagccattgacaatgacctgcaaccttcctggcaggaggcaagagcaccagagacctggttcgagttcacccctcaccacgctggcttctctgcactgggggcctttgtttccataacccacttcggaagcaaattcaagaagggaagactggtcagaactcaccctgagagagacctgactttcctgagaggtttatggggaagtgctcttggtaacactgaagtcattagggaatacatttttgaccagttaaggaatctgaccctgaaaggtttatggagaagggctgttgctaatgctaaaagcattggacaccttatttttgcccgattactgaggctgcaagaaagttcacaaggggaacatcctcccccagaagatgaaggcggtgagcctgaacacacctggctgactgagatgctcgagaattggaccaggacctccctggaaaagcaggagcagccccatgaggaccccgaaaggaaaggctcactcagtaacttgatggattttgtgaagaaaacaggcatttgcgcttcaaagtgggaatgggggaccactcacaacttcctgtacaaacacggtggcatccgggacaagataatgagcagccggaagcacctccacctggtggatgctggtttagccatcaacactcccttcccactcgtgctgcccccgacgcgggaggttcacctcatcctctccttcgacttcagtgccggagatcctttcgagaccatccgggctaccactgactactgccgccgccacaagatcccctttccccaagtagaagaggctgagctggatttgtggtccaaggcccccgccagctgctacatcctgaaaggagaaactggaccagtggtgatgcattttcccctgttcaacatagatgcctgtggaggtgatattgaggcatggagtgacacatacgacacattcaagcttgctgacacctacactctagatgtggtggtgctactcttggcattagccaagaagaatgtcagggaaaacaagaagaagatccttagagagttgatgaacgtggccgggctctactacccgaaggatagtgcccgaagttgctgcttggcatagatgagcctcagcttccagggcactgtgggcctgttggtctactagggccctgaagtccacctggccttcctgttcttcactcccttcagccacacgcttcatggccttgagttcaccttggctgtcctaacagggccaatcaccagtgaccagctagactgtgattttgatagcgtcattcagaagaaggcgtccaaggagctgaaggtggtgaaatttgtcctgcaggtccctcgggagatcctggagctggagcatgagtgtctgacaatcagaagcatcatgtccaatgtccagatggccagaatgaatgtgatagttcagaccaatgccttccactgctcctttatgactgcacttctagccagtagctctgcacaagttagctctgtagaagtaagaacttgggcttaaatcatgggctatctctccacagccaagtggagctctgagaatacaacaagtgctcaataaatgcttgctgattgactga

SEQ ID NO: 366437 - DNA, 2500 bp, Homo sapiens
gctggagcaaccaagcagggcctacaagccgaggagggctgtttaaaggcgcaggggccattttaccctccaggttggccctgctcaggaccaggaggaaacacctccagcccgcgacctcctcccacagggggaaaaggaaagcaggaggaccacagaagctttggcaccgaggatccccgcagtcttcacccgcggagattccggctgaaggagctgtccagcgactacaccgctaagcgcagggagcccaagcctccgcaccggattccggagcccaagcctccgcaccggattccggagcacaagctccaccgcgcatgcgcacacgccccagacccaggctcaggaggactgagaattttctgaccgcagtgcaccatgggaagctctgaagtttccataattcctgggctccagaaagaagaaaaggcggccgtggagagacgaagacttcatgtgctgaaagctctgaagaagctaaggattgaggctgatgaggccccagttgttgctgtgctgggctcaggcggaggactgcgggctcacattgcctgccttggggtcctgagtgagatgaaagaacagggcctgttggatgccgtcacgtacctcgcaggggtctctggatccacttgggcaatatcttctctctacaccaatgatggtgacatggaagctctcgaggctgacctgaaacatcgatttacccgacaggagtgggacttggctaagagcctacagaaaaccatccaagcagcgaggtctgagaattactctctgaccgacttctgggcctacatggttatctctaagcaaaccagagaactgccggagtctcatttgtccaatatgaagaagcccgtggaagaagggacactaccctacccaatatttgcagccattgacaatgacctgcaaccttcctggcaggaggcaagagcaccagagacctggttcgagttcacccctcaccacgctggcttctctgcactgggggcctttgtttccataacccacttcggaagcaaattcaagaagggaagactggtcagaactcaccctgagagagacctgactttcctgagaggtttatggggaagtgctcttggtaacactgaagtcattagggaatacatttttgaccagttaaggaatctgaccctgaaaggtttatggagaagggctgttgctaatgctaaaagcattggacaccttatttttgcccgattactgaggctgcaagaaagttcacaaggggaacatcctcccccagaagatgaaggcggtgagcctgaacacacctggctgactgagatgctcgagaattggaccaggacctccctggaaaagcaggagcagccccatgaggaccccgaaaggaaaggctcactcagtaacttgatggattttgtgaagaaaacaggcatttgcgcttcaaagtgggaatgggggaccactcacaacttcctgtacaaacacggtggcatccgggacaagataatgagcagccggaagcacctccacctggtggatgctggtttagccatcaacactcccttcccactcgtgctgcccccgacgcgggaggttcacctcatcctctccttcgacttcagtgccggagatcctttcgagaccatccgggctaccactgactactgccgccgccacaagatcccctttccccaagtagaagaggctgagctggatttgtggtccaaggcccccgccagctgctacatcctgaaaggagaaactggaccagtggtgatgcattttcccctgttcaacatagatgcctgtggaggtgatattgaggcatggagtgacacatacgacacattcaagcttgctgacacctacactctagatgtggtggtgctactcttggcattagccaagaagaatgtcagggaaaacaagaagaagatccttagagagttgatgaacgtggccgggctctactacccgaaggatagtgcccgaagttgctgcttggcatagatgagcctcagcttccagggcactgtgggcctgttggtctactagggccctgaagtccacctggccttcctgttcttcactcccttcagccacacgcttcatggccttgagttcaccttggctgtcctaacagggccaatcaccagtgaccagctagactgtgattttgatagcgtcattcagaagaaggcgtccaaggagctgaaggtggtgaaatttgtcctgcaggtccctcgggagatcctggagctggagcatgagtgtctgacaatcagaagcatcatgtccaatgtccagatggccagaatgaatgtgatagttcagaccaatgccttccactgctcctttatgactgcacttctagccagtagctctgcacaagttagctctgtagaagtaagaacttgggcttaaatcatgggctatctctccacagccaagtggagctctgagaatacaacaagtgctcaataaatgcttgctgattgactga

SEQ ID NO: 366438 - DNA, 1763 bp, Homo sapiens
gctggagcaaccaagcagggcctacaagccgaggagggctgtttaaaggcgcaggggccattttaccctccaggttggccctgctcaggaccaggaggaaacacctccagcccgcgacctcctcccacagggggaaaaggaaagcaggaggaccacagaagctttggcaccgaggatccccgcagtcttcacccgcggagattccggctgaaggagctgtccagcgactacaccgctaagcgcagggagcccaagcctccgcaccggattccggagcccaagcctccgcaccggattccggagcacaagctccaccgcgcatgcgcacacgccccagacccaggctcaggaggactgagaattttctgaccgcagtgcaccatgggaagctctgaagtttccataattcctgggctccagaaagaagaaaaggcggccgtggagagacgaagacttcatgtgctgaaagctctgaagaagctaaggattgaggctgatgaggccccagttgttgctgtgctgggctcaggcggaggactgcgggctcacattgcctgccttggggtcctgagtgagatgaaagaacagggcctgttggatgccgtcacgtacctcgcaggggtctctggatccacttgggcaatatcttctctctacaccaatgatggtgacatggaagctctcgaggctgacctgaaacatcgatttacccgacaggagtgggacttggctaagagcctacagaaaaccatccaagcagcgaggtctgagaattactctctgaccgacttctgggcctacatggttatctctaagcaaaccagagaactgccggagtctcatttgtccaatatgaagaagcccgtggaagaagggacactaccctacccaatatttgcagccattgacaatgacctgcaaccttcctggcaggaggcaagagcaccagagacctggttcgagttcacccctcaccacgctggcttctctgcactgggggcctttgtttccataacccacttcggaagcaaattcaagaagggaagactggtcagaactcaccctgagagagacctgactttcctgagaggtttatggggaagtgctcttggtaacactgaagtcattagggaatacatttttgaccagttaaggaatctgaccctgaaaggtttatggagaagggctgttgctaatgctaaaagcattggacaccttatttttgcccgattactgaggctgcaagaaagttcacaaggggaacatcctcccccagaagatgaaggcggtgagcctgaacacacctggctgactgagatgctcgagaattggaccaggacctccctggaaaagcaggagcagccccatgaggaccccgaaaggaaaggctcactcagtaacttgatggattttgtgaagaaaacaggcatttgcgcttcaaagtgggaatgggggaccactcacaacttcctgtacaaacacggtggcatccgggacaagataatgagcagccggaagcacctccacctggtggatgctggtttagccatcaacactcccttcccactcgtgctgcccccgacgcgggaggttcacctcatcctctccttcgacttcagtgccggagatcctttcgagcagctgtgtggcctgatccaatgtgcgtaacttctgtgcatgtcggtttcctcagctgtaaaattgggctaacgatggctccaccaggagttgttctgtggattaaattaatacttgttaataca

SEQ ID NO: 366439 - DNA, 1554 bp, Homo sapiens
gctggagcaaccaagcagggcctacaagccgaggagggctgtttaaaggcgcaggggccattttaccctccaggttggccctgctcaggaccaggaggaaacacctccagcccgcgacctcctcccacagggggaaaaggaaagcaggaggaccacagaagctttggcaccgaggatccccgcagtcttcacccgcggagattccggctgaaggagctgtccagcgactacaccgctaagcgcagggagcccaagcctccgcaccggattccggagcccaagcctccgcaccggattccggagcacaagctccaccgcgcatgcgcacacgccccagacccaggctcaggaggactgagaattttctgaccgcagtgcaccatgggaagctctgaagtttccataattcctgggctccagaaagaagaaaaggcggccgtggagagacgaagacttcatgtgctgaaagctctgaagaagctaaggattgaggctgatgaggccccagttgttgctgtgctgggctcaggcggaggactgcgggctcacattgcctgccttggggtcctgagtgagatgaaagaacagggcctgttggatgccgtcacgtacctcgcaggggtctctggatccacttgggcaatatcttctctctacaccaatgatggtgacatggaagctctcgaggctgacctgaaacatcgatttacccgacaggagtgggacttggctaagagcctacagaaaaccatccaagcagcgaggtctgagaattactctctgaccgacttctgggcctacatggttatctctaagcaaaccagagaactgccggagtctcatttgtccaatatgaagaagcccgtggaagaagggacactaccctacccaatatttgcagccattgacaatgacctgcaaccttcctggcaggaggcaagagcaccagagacctggttcgagttcacccctcaccacgctggcttctctgcactgggggcctttgtttccataacccacttcggaagcaaattcaagaagggaagactggtcagaactcaccctgagagagacctgactttcctgagaggtttatggggaagtgctcttggtaacactgaagtcattagggaatacatttttgaccagttaaggaatctgaccctgaaaggtttatggagaagggctgttgctaatgctaaaagcattggacaccttatttttgcccgattactgaggctgcaagaaagttcacaaggggaacatcctcccccagaagatgaaggcggtgagcctgaacacacctggagctggagcatgagtgtctgacaatcagaagcatcatgtccaatgtccagatggccagaatgaatgtgatagttcagaccaatgccttccactgctcctttatgactgcacttctagccagtagctctgcacaagttagctctgtagaagtaagaacttgggcttaaatcatgggctatctctccacagccaagtggagctctgagaatacaacaagtgctcaataaatgcttgctgattgactga

SEQ ID NO: 366440 - DNA, 346 bp, Homo sapiens
ctcttttaatgctcagaatgtcctaatcaggttgttcagatcacgaaactgaggttcagggaggtgaagtaatgtgtccaagaccacagagctagaaagtggcagaacccacattaaaaccagagactttgtaagcagagtctggcgttgataggtaccgaggtgtctttttttaggagaccacagaaaggtgttctaggacagttttaacatttggtatctttgtagtttttagtctaaaaatctactttgtagggaaagtaagtattaacacttaaatgaggtataagcttatttttagatttttgggactgaaacaataaaaaagcttcttaaaccttatttg

SEQ ID NO: 366441 - DNA, 391 bp, Homo sapiens
tcagagaagattatttccggctttatcttcaaaaactggaaaggaagggtcaaagaaaagacagtagcttatgttcatggcaagcacctctcatcacagtccagttccaaggaaaaattccagcattttctacattggctgctgccttgtctgaaatcagcactttccatggaggaaggaaacctgctttgttgcatcttctattctcgggtttaatgttggtaaatgagtaactctagcatttgtacaaggctccctaagactcctgcagctgtcgacaaagcccagggacataattgaatctggagattcctcaggccttgttttgaaaaagacttgaaatacacataggaagaaaggtacaaaaataaatgttcacttgtctctgcaa

SEQ ID NO: 366442 - DNA, 533 bp, Homo sapiens
aattcttgagggccccttgtgccaaaatttggcccttgggtggggacctacaggataacccccagactcagagcccgagagcccttcccaagccattggcttggctgcagagtagactgagagctggggccacgtatccctgtgctggcacctgctccctgtgctcagtattaattacgcccccttaactgtcccagtgaccttgtccagacctccacccaggagagggatgggacacagcactgggctgccaggattcccctggcccgtctgggccaacccttccatgggtgaagacaagcaagtccccctggaggcgggtggcccagaaagccatctacagggttccctaggccaggtggagatgaggatgggtaacagtattggggccagatccctaagccccccagctgtaaataggctgtggccagtgcctggtcatcagaagagggaggaggagcccaggcgtctgtttatgtatttatttatttatttattatacctattaataaaaaaggtgctcagcctccaaa

SEQ ID NO: 366443 - DNA, 281 bp, Homo sapiens
cctttgcagctgtcggtggcgctacgtcagggccgcgatgaggcactcgtgagcgtctgctgctcgtagcctgctaggtgcctcgcgtgggtccacaccaggcccagtaatgccaaccacctatcccctcaagccctcaagtggcgggaatacaggaggaagaacccactagggccacctggtttgtcagggaaagccaaacccccgacaatgacaacatattgtcccttgcaaaacttaaaaagaacttactcaagtcaccaaacaccacctgtccccag

SEQ ID NO: 366444 - DNA, 5286 bp, Homo sapiens
aggaaatcggcccagttcacctgtgtgatcccgtggaacagtgtctcagctggaactgtcgcggtagagcttggtcggagtgcaaaagggacagacgcatcaggggtccagctcaaggctcctgacagaggtgccaagctctcctgatgaaatgtgttctgccccactgggctccagggacagtgtctggtgctgttgaagcccttattcgaactttccagaatggatagtcccccaaagctgactggagagaccctcatcgttcatcacatccccctggtgcactgccaagtcccagacaggcagtgctgtggaggggcaggtggaggtggtgggagcacaagacctaatcccttctgcccacctgagctgggcatcacccagcccgatcaagacctaggacaagctgactccctgctattcagcagcctgcactctgctccaggaggaactgcacggtctatagacagcaccaagagtaggagtcgggatggaagaggccctggagcccccaaacgacacaaccccttcttgctgcaggagggtgtgggtgagccaggacttggtgacctgtatgatgacagcattggtgacagtgccacccagcagtccttccacctgcatggcactggccagcccaactttcatctatcctctttccagctgccaccatctggccccagagtgggcaggccatgggggacaacacgcagtcgggctggagtggtggaagggcaggaacaggagccagtgatgaccttggatactcagcagtgcggcaccagccactgctgccggccagagctggaagcagagactatggagctggatgagtgtgggggacctggtgggagtggcagtgggggtggagccagcgatacctctggcttttcctttgaccaggaatggaagctcagttcagatgaatccccaaggaaccctggatgctccggctcaggggaccagcactgccgctgcagtagcacatccagtcagtccgaggcagctgaccagtccatgggctatgtgagcgactcctcctgcaacagttcagatggtgtgctggtcaccttcagcaccctctacaacaagatgcatggcaccccccgtgccaatctcaactctgccccacagtcctgcagcgactcttccttctgcagccactcagaccctggcgccttctatctggatctgcagccctccccatttgagtctaagatgtcttatgagtcccatcaccctgaaagtggaggaagggaagggggctatggttgccctcatgcctcttctcctgagcttgatgccaactgcaactcctaccgcccacactgtgagccgtgcccagcagtggctgacctcacagcctgcttccaaagccaggcccgtcttgttgtggccacacaaaattactataaacttgtcacctgtgacctatcttcccaatcatccccaagccctgctggctcttccatcactagctgctctgaggaacacaccaagataagtcccccaccaggccctggcccagacccaggccccagccagccctctgagtattacctattccagaagccagaagtccagccagaggaacaagaagcagtgagttcctccacccaagcagcagctgctgtgggccccactgtgcttgagggacaagtatacacgaatacttcaccccccaacctcagcactggacgtcagcgctcccgcagctatgatcgcagcctgcagcgcagccctcctgtccgcctgggctcgctggaacgtatgttgagttgcccagtgcgcttgagtgagggccctgcagccatggccgggcctggctccccacccaggagggtcacctcctttgccgagctggccaagggccggaagaaaactggaggctctggctcgcccccacttcgtgtgagtgttggggactcctcccaggagttctcacccatccaagaagcccagcaagatcggggggccccactggatgagggcacttgctgtagccatagcctgccacccatgcctttggggccaggcatggacctacttggcccagacccaagtccaccctggtccacccaggtctgtcagggaccccactccagtgagatgcctcctgctggcctcagagctactgggcaaggccccctggctcagctgatggatccagggcctgctctcccagggagcccagccaacagccatacccagagggatgcaagagctagagctgacgggggtggcaccgagagccgaccagtccttcgctacagcaaggaacagaggccaaccacactgcccatccagcccttcgtgttccagcaccacttccccaagcagctggccaaggcccgggccctccacagcctttcccagctctacagcctctcaggctgcagccgtacacagcagcctgccccactggctgcccctgctgctcaagtctcagtcccagctccctcaggggaaccgcaggcatccactccccgagccactggcagaggtgccaggaaagctgggtctgagccagagacctctcggccatcgcccctgggcagctactcccccatccggagtgttggcccctttgggcccagcactgactcttctgcctccacttcgtgctcccctcccccagagcagcccacagccacagaaagcctgcccccatggagccactcctgtccttctgctgtccggcctgccacctcccagcagccgcagaaggaggatcagaagatactgaccttgactgagtaccggctccatggaacaggaagcttgccgcctctgggctcctggcgatctggcctcagccgagcagagagcctggcccggggaggtggtgagggcagcatggccaccaggcccagtaatgccaaccacctatcccctcaagccctcaagtggcgggaatacaggaggaagaacccactagggccacctggtttgtcagggagcctagaccgaagatcacaagaagctcggctggcccgaagaaaccctatctttgagttccctggctccctcagtgctgccagccatctgaactgccggctgaatggccaagcagtgaagccgttaccactgacctgccctgacttccaggaccccttttccttgacggagaagcctccagctgagttttgtctgtccccagatggcagctcagaggccatttccattgacctgcttcagaaaaaagggctggtaaaagctgttaacatcgctgtggacctcattgtggctcattttggcacaagccgggatcccggggtgaaggcaaagctgggaaacagttctgtgagccccaatgtgggccacctggttctgaagtacttgtgccctgccgtccgcgccgtgctggaggatgggctcaaggcctttgtactggacgtcatcatcgggcagcgtaagaacatgccatggagtgtggttgaggcttccacacagctaggcccatccaccaaggtcctgcatggcctctacaacaaagtcagccaattcccagagctcaccagtcataccatgcgcttcaacgccttcatcctcggcctgctcaacatccggtccctggagttctggtttaatcacctctataaccacgaagacatcatccagacccactaccagccctggggcttcctgagtgcagctcataccgtgtgtcccggcctctttgaagagctgctgctgctgctacagcccctggccctgctgcccttcagcctcgacttgctgttccagcaccggctgctgcaaagtgggcagcagcagcggcagcacaaggaactgctgcgggtgtcccaggacctgctgctgtctgcccactccacgctgcagctggcccgggcccggggccaggagggccctggagacgtggacagggcagcccaaggggagcgggtgaagggtgtgggtgcctcagaaggtggagaagaggaagaggaagaagaggagacagaagaggtggcagaggcagccgggggctcagggcgtgccaggtgggcccgaggtgggcaggccggctggtggtaccagctcatgcagagctcccaggtctacatcgatggctccattgagggttccaggttccctcgtggtagcagcaacagcagcagcgagaaaaagaaaggggcaggaggtgggggacctccccaggctccaccaccccgagagggagtagtggagggggctgaggcctgccctgcctctgaggaggccctgggccgggaaaggggctggcccttctggatggggagcccccctgactctgtgctggccgagctgaggcgcagtcgggagagggaagggcccgctgcctcgccagcagaaaatgaggaaggggcctcagagccttcacctggaggcatcaagtggggacacctctttggctcccgaaaagcccagcgggaggcccggcccacaaataggctcccctcggactggctgagcctggacaagtccatgttccaactagtggcgcagacagtgggttcccgccgggagccagagcccaaggagagcctgcaggagccacactccccagccctgccctccagtcctccgtgtgaggtgcaggcactgtgccaccacctggccaccggccctggacagctgagcttccacaaaggagacatcctacgagtgctggggcgagctggaggagactggctgcgctgcagccgtggccccgactctggcctggtgcccctggcctacgtgacattgaccccaactccaagtccaacccctggaagcagccaaaactgaggccctgtgcatgctggtggcctcagggaccctcataacccccagactcagagcccgagagcccttcccaagccattggcttggctgcagagtagactgagagctggggccacgtatccctgtgctggcacctgctccctgtgctcagtattaattacgcccccttaactgtcccagtgaccttgtccagacctccacccaggagagggatgggacacagcactgggctgccaggattcccctggcccgtctgggccaacccttccatgggtgaagacaagcaagtccccctggaggcgggtggcccagaaagccatctacagggttccctaggccaggtggagatgaggatgggtaacagtattggggccagatccctaagccccccagctgtaaataggctgtggccagtgcctggtcatcagaagagggaggaggagcccaggcgtctgtttatgtatttatttatttatttattatacctattaataaaaaaggtgctcagcctccaaa

SEQ ID NO: 366445 - DNA, 2195 bp, Homo sapiens
gcaaggcaggaggcaaggcaaggtaaggcacagaaaaacgcaaggcacaaggaaagggaggtcacaaggcaaggcacaaggcaaggcaaggcataagcaaggcatggcataagcaagacaaggcaaggcacaaggcaaggcaagtacaaggcaaagcaaggcaaggcacaagccgggatcccggggtgaaggcaaagctgggaaacagttctgtgagccccaatgtgggccacctggttctgaagtacttgtgccctgccgtccgcgccgtgctggaggatgggctcaaggcctttgtactggacgtcatcatcgggcagcgtaagaacatgccatggagtgtggttgaggcttccacacagctaggcccatccaccaaggtcctgcatggcctctacaacaaagtcagccaattcccagagctcaccagtcataccatgcgcttcaacgccttcatcctcggcctgctcaacatccggtccctggagttctggtttaatcacctctataaccacgaagacatcatccagacccactaccagccctggggcttcctgagtgcagctcataccgtgtgtcccggcctctttgaagagctgctgctgctgctacagcccctggccctgctgcccttcagcctcgacttgctgttccagcaccggctgctgcaaagtgggcagcagcagcggcagcacaaggaactgctgcgggtgtcccaggacctgctgctgtctgcccactccacgctgcagctggcccgggcccggggccaggagggccctggagacgtggacagggcagcccaaggggagcgggtgaagggtgtgggtgcctcagaaggtggagaagaggaagaggaagaagaggagacagaagaggtggcagaggcagccgggggctcagggcgtgccaggtgggcccgaggtgggcaggccggctggtggtaccagctcatgcagagctcccaggtctacatcgatggctccattgagggttccaggttccctcgtggtagcagcaacagcagcagcgagaaaaagaaaggggcaggaggtgggggacctccccaggctccaccaccccgagagggagtagtggagggggctgaggcctgccctgcctctgaggaggccctgggccgggaaaggggctggcccttctggatggggagcccccctgactctgtgctggccgagctgaggcgcagtcgggagagggaagggcccgctgcctcgccagcagaaaatgaggaaggggcctcagagccttcacctggaggcatcaagtggggacacctctttggctcccgaaaagcccagcgggaggcccggcccacaaataggctcccctcggactggctgagcctggacaagtccatgttccaactagtggcgcagacagtgggttcccgccgggagccagagcccaaggagagcctgcaggagccacactccccagccctgccctccagtcctccgtgtgaggtgcaggcactgtgccaccacctggccaccggccctggacagctgagcttccacaaaggagacatcctacgagtgctggggcgagctggaggagactggctgcgctgcagccgtggccccgactctggcctggtgcccctggcctacgtgacattgaccccaactccaagtccaacccctggaagcagccaaaactgaggccctgtgcatgctggtggcctcagggaccctcataacccccagactcagagcccgagagcccttcccaagccattggcttggctgcagagtagactgagagctggggccacgtatccctgtgctggcacctgctccctgtgctcagtattaattacgcccccttaactgtcccagtgaccttgtccagacctccacccaggagagggatgggacacagcactgggctgccaggattcccctggcccgtctgggccaacccttccatgggtgaagacaagcaagtccccctggaggcgggtggcccagaaagccatctacagggttccctaggccaggtggagatgaggatgggtaacagtattggggccagatccctaagccccccagctgtaaataggctgtggccagtgcctggtcatcagaagagggaggaggagcccaggcgtctgtttatgtatttatttatttatttattatacctattaataaaaaaggtgctcagcctccaaa

SEQ ID NO: 366446 - DNA, 990 bp, Homo sapiens
  misc_feature (24)..(24): n is a, c, g, or t
ccaggctggtacgcccccgagtantgggatatcgtcgaccacgccgtctgggcctcagagccttcacctggaggcatcaagtggggacacctctttggctcccgaaaagcccagcgggaggcccggcccacaaataggctcccctcggactggctgagcctggacaagtccatgttccaactagtggcgcagacagtgggttcccgccgggagccagagcccaaggagagcctgcaggagccacactccccagccctgccctccagtcctccgtgtgaggtgcaggcactgtgccaccacctggccaccggccctggacagctgagcttccacaaaggagacatcctacgagtgctggggcgagctggaggagactggctgcgctgcagccgtggccccgactctggcctggtgcccctggcctacgtgacattgaccccaactccaagtccaacccctggaagcagccaaaactgaggccctgtgcatgctggtggcctcagggaccctcataacccccagactcagagcccgagagcccttcccaagccattggcttggctgcagagtagactgagagctggggccacgtatccctgtgctggcacctgctccctgtgctcagtattaattacgcccccttaactgtcccagtgaccttgtccagacctccacccaggagagggatgggacacagcactgggctgccaggattcccctggcccgtctgggccaacccttccatgggtgaagacaagcaagtccccctggaggcgggtggcccagaaagccatctacagggttccctaggccaggtggagatgaggatgggtaacagtattggggccagatccctaagccccccagctgtaaataggctgtggccagtgcctggtcatcagaagagggaggaggagcccaggcgtctgtttatgtatttatttatttatttattatacctattaataaaaaaggtgctcagcctccaaa

SEQ ID NO: 366447 - DNA, 757 bp, Homo sapiens
aggaaatcggcccagttcacctgtgtgatcccgtggaacagtgtctcagctggaactgtcgcggtagagcttggtcggagtgcaaaagggacagacgcatcaggggtccagctcaaggctcctgacagaggtgccaagctctcctgatgaaatgtgttctgccccactgggctccagggacagtgtctggtgctgttgaagcccttattcgaactttccagaatggatagtcccccaaagctgactggagagaccctcatcgttcatcacatccccctggtgcactgccaagtcccagacaggcagtgctgtggaggggcaggtggaggtggtgggagcacaagacctaatcccttctgcccacctgagctgggcatcacccagcccgatcaagacctaggacaagctgactccctgctattcagcagcctgcactctgctccaggaggaactgcacggtctatagacagcaccaagagtaggagtcgggatggaagaggccctggagcccccaaacgacacaaccccttcttgctgcaggagggtgtgggtgagccaggacttggtgacctgtatgatgacagcattggtgacagtgccacccagcagtccttccacctgcatggcactggccagcccaactttcatctatcctctctgcgtttgcaaacgcagagaggacaaggggcccaaggagtgccatgtagcactcctgctttgtgaggacagctcatgtggtgggtcttgccggctctat

SEQ ID NO: 366448 - DNA, 345 bp, Homo sapiens
gtccaccctggtccacccaggtctgtcagggaccccactccagtgagatgcctcctgctggcctcagagctactgggcaaggccccctggctcagctgatggatccagggcctgctctcccagggagcccagccaacagccatacccagagggatgcaagagctagagctgacggtaaggagcctaagggttagcaaatatgtggctattcaccagcaggatatgcatggccacctccctgacaggtccctgccagaccaccccatccataccactagaggttccacatcctagatctgttatccttctaggccagggcaggacccacagctacagtggaatagg

SEQ ID NO: 366449 - DNA, 5384 bp, Homo sapiens
gagcaccttaggccgggcggaccgaaccaacgcgccgcccggaggggcggcctgagggcaacccagatcggaccatcgcgccacgccgacaggggccggcctttccaacccgcccggagggaggggccgccggcgcctctagcctgcaacgcgacccctggagggcgagacacgccgccgccgccgccgccgccggcgcggaaggacgaggctgaggcgagaaacgaggtgccaagctctcctgatgaaatgtgttctgccccactgggctccagggacagtgtctggtgctgttgaagcccttattcgaactttccagaatggatagtcccccaaagctgactggagagaccctcatcgttcatcacatccccctggtgcactgccaagtcccagacaggcagtgctgtggaggggcaggtggaggtggtgggagcacaagacctaatcccttctgcccacctgagctgggcatcacccagcccgatcaagacctaggacaagctgactccctgctattcagcagcctgcactctgctccaggaggaactgcacggtctatagacagcaccaagagtaggagtcgggatggaagaggccctggagcccccaaacgacacaaccccttcttgctgcaggagggtgtgggtgagccaggacttggtgacctgtatgatgacagcattggtgacagtgccacccagcagtccttccacctgcatggcactggccagcccaactttcatctatcctctttccagctgccaccatctggccccagagtgggcaggccatgggggacaacacgcagtcgggctggagtggtggaagggcaggaacaggagccagtgatgaccttggatactcagcagtgcggcaccagccactgctgccggccagagctggaagcagagactatggagctggatgagtgtgggggacctggtgggagtggcagtgggggtggagccagcgatacctctggcttttcctttgaccaggaatggaagctcagttcagatgaatccccaaggaaccctggatgctccggctcaggggaccagcactgccgctgcagtagcacatccagtcagtccgaggcagctgaccagtccatgggctatgtgagcgactcctcctgcaacagttcagatggtgtgctggtcaccttcagcaccctctacaacaagatgcatggcaccccccgtgccaatctcaactctgccccacagtcctgcagcgactcttccttctgcagccactcagaccctggcgccttctatctggatctgcagccctccccatttgagtctaagatgtcttatgagtcccatcaccctgaaagtggaggaagggaagggggctatggttgccctcatgcctcttctcctgagcttgatgccaactgcaactcctaccgcccacactgtgagccgtgcccagcagtggctgacctcacagcctgcttccaaagccaggcccgtcttgttgtggccacacaaaattactataaacttgtcacctgtgacctatcttcccaatcatccccaagccctgctggctcttccatcactagctgctctgaggaacacaccaagataagtcccccaccaggccctggcccagacccaggccccagccagccctctgagtattacctattccagaagccagaagtccagccagaggaacaagaagcagtgagttcctccacccaagcagcagctgctgtgggccccactgtgcttgagggacaagtatacacgaatacttcaccccccaacctcagcactggacgtcagcgctcccgcagctatgatcgcagcctgcagcgcagccctcctgtccgcctgggctcgctggaacgtatgttgagttgcccagtgcgcttgagtgagggccctgcagccatggccgggcctggctccccacccaggagggtcacctcctttgccgagctggccaagggccggaagaaaactggaggctctggctcgcccccacttcgtgtgagtgttggggactcctcccaggagttctcacccatccaagaagcccagcaagatcggggggccccactggatgagggcacttgctgtagccatagcctgccacccatgcctttggggccaggcatggacctacttggcccagacccaagtccaccctggtccacccaggtctgtcagggaccccactccagtgagatgcctcctgctggcctcagagctactgggcaaggccccctggctcagctgatggatccagggcctgctctcccagggagcccagccaacagccatacccagagggatgcaagagctagagctgacgggggtggcaccgagagccgaccagtccttcgctacagcaaggaacagaggccaaccacactgcccatccagcccttcgtgttccagcaccacttccccaagcagctggccaaggcccgggccctccacagcctttcccagctctacagcctctcaggctgcagccgtacacagcagcctgccccactggctgcccctgctgctcaagtctcagtcccagctccctcaggggaaccgcaggcatccactccccgagccactggcagaggtgccaggaaagctgggtctgagccagagacctctcggccatcgcccctgggcagctactcccccatccggagtgttggcccctttgggcccagcactgactcttctgcctccacttcgtgctcccctcccccagagcagcccacagccacagaaagcctgcccccatggagccactcctgtccttctgctgtccggcctgccacctcccagcagccgcagaaggaggatcagaagatactgaccttgactgagtaccggctccatggaacaggaagcttgccgcctctgggctcctggcgatctggcctcagccgagcagagagcctggcccggggaggtggtgagggcagcatggccaccaggcccagtaatgccaaccacctatcccctcaagccctcaagtggcgggaatacaggaggaagaacccactagggccacctggtttgtcagggagcctagaccgaagatcacaagaagctcggctggcccgaagaaaccctatctttgagttccctggctccctcagtgctgccagccatctgaactgccggctgaatggccaagcagtgaagccgttaccactgacctgccctgacttccaggaccccttttccttgacggagaagcctccagctgagttttgtctgtccccagatggcagctcagaggccatttccattgacctgcttcagaaaaaagggctggtaaaagctgttaacatcgctgtggacctcattgtggctcattttggcacaagccgggatcccggggtgaaggcaaagctgggaaacagttctgtgagccccaatgtgggccacctggttctgaagtacttgtgccctgccgtccgcgccgtgctggaggatgggctcaaggcctttgtactggacgtcatcatcgggcagcgtaagaacatgccatggagtgtggttgaggcttccacacagctaggcccatccaccaaggtcctgcatggcctctacaacaaagtcagccaattcccagagctcaccagtcataccatgcgcttcaacgccttcatcctcggcctgctcaacatccggtccctggagttctggtttaatcacctctataaccacgaagacatcatccagacccactaccagccctggggcttcctgagtgcagctcataccgtgtgtcccggcctctttgaagagctgctgctgctgctacagcccctggccctgctgcccttcagcctcgacttgctgttccagcaccggctgctgcaaagtgggcagcagcagcggcagcacaaggaactgctgcgggtgtcccaggacctgctgctgtctgcccactccacgctgcagctggcccgggcccggggccaggagggccctggagacgtggacagggcagcccaaggggagcgggtgaagggtgtgggtgcctcagaaggtggagaagaggaagaggaagaagaggagacagaagaggtggcagaggcagccgggggctcagggcgtgccaggtgggcccgaggtgggcaggccggctggtggtaccagctcatgcagagctcccaggtctacatcgatggctccattgagggttccaggttccctcgtggtagcagcaacagcagcagcgagaaaaagaaaggggcaggaggtgggggacctccccaggctccaccaccccgagagggagtagtggagggggctgaggcctgccctgcctctgaggaggccctgggccgggaaaggggctggcccttctggatggggagcccccctgactctgtgctggccgagctgaggcgcagtcgggagagggaagggcccgctgcctcgccagcagaaaatgaggaaggggcctcagagccttcacctggaggcatcaagtggggacacctctttggctcccgaaaagcccagcgggaggcccggcccacaaataggctcccctcggactggctgagcctggacaagtccatgttccaactagtggcgcagacagtgggttcccgccgggagccagagcccaaggagagcctgcaggagccacactccccagccctgccctccagtcctccgtgtgaggtgcaggcactgtgccaccacctggccaccggccctggacagctgagcttccacaaaggagacatcctacgagtgctggggcgagctggaggagactggctgcgctgcagccgtggccccgactctggcctggtgcccctggcctacgtgacattgaccccaactccaagtccaacccctggaagcagccaaaactgaggccctgtgcatgctggtggcctcagggaccctcataacccccagactcagagcccgagagcccttcccaagccattggcttggctgcagagtagactgagagctggggccacgtatccctgtgctggcacctgctccctgtgctcagtattaattacgcccccttaactgtcccagtgaccttgtccagacctccacccaggagagggatgggacacagcactgggctgccaggattcccctggcccgtctgggccaacccttccatgggtgaagacaagcaagtccccctggaggcgggtggcccagaaagccatctacagggttccctaggccaggtggagatgaggatgggtaacagtattggggccagatccctaagccccccagctgtaaataggctgtggccagtgcctggtcatcagaagagggaggaggagcccaggcgtctgtttatgtatttatttatttatttattatacctattaataaaaaaggtgctcagcctccaaa

SEQ ID NO: 366450 - DNA, 6617 bp, Homo sapiens
aggaaatcggcccagttcacctgtgtgatcccgtggaacagtgtctcagctggaactgtcgcggtagagcttggtcggagtgcaaaagggacagacgcatcaggggtccagctcaaggctcctgacagaggtgccaagctctcctgatgaaatgtgttctgccccactgggctccagggacagtgtctggtgctgttgaagcccttattcgaactttccagaatggatagtcccccaaagctgactggagagaccctcatcgttcatcacatccccctggtgcactgccaagtcccagacaggcagtgctgtggaggggcaggtggaggtggtgggagcacaagacctaatcccttctgcccacctgagctgggcatcacccagcccgatcaagacctaggacaagctgactccctgctattcagcagcctgcactctgctccaggaggaactgcacggtctatagacagcaccaagagtaggagtcgggatggaagaggccctggagcccccaaacgacacaaccccttcttgctgcaggagggtgtgggtgagccaggacttggtgacctgtatgatgacagcattggtgacagtgccacccagcagtccttccacctgcatggcactggccagcccaactttcatctatcctctttccagctgccaccatctggccccagagtgggcaggccatgggggacaacacgcagtcgggctggagtggtggaagggcaggaacaggagccagtgatgaccttggatactcagcagtgcggcaccagccactgctgccggccagagctggaagcagagactatggagctggatgagtgtgggggacctggtgggagtggcagtgggggtggagccagcgatacctctggcttttcctttgaccaggaatggaagctcagttcagatgaatccccaaggaaccctggatgctccggctcaggggaccagcactgccgctgcagtagcacatccagtcagtccgaggcagctgaccagtccatgggctatgtgagcgactcctcctgcaacagttcagatggtgtgctggtcaccttcagcaccctctacaacaagatgcatggcaccccccgtgccaatctcaactctgccccacagtcctgcagcgactcttccttctgcagccactcagaccctggcgccttctatctggatctgcagccctccccatttgagtctaagatgtcttatgagtcccatcaccctgaaagtggaggaagggaagggggctatggttgccctcatgcctcttctcctgagcttgatgccaactgcaactcctaccgcccacactgtgagccgtgcccagcagtggctgacctcacagcctgcttccaaagccaggcccgtcttgttgtggccacacaaaattactataaacttgtcacctgtgacctatcttcccaatcatccccaagccctgctggctcttccatcactagctgctctgaggaacacaccaagataagtcccccaccaggccctggcccagacccaggccccagccagccctctgagtattacctattccagaagccagaagtccagccagaggaacaagaagcagtgagttcctccacccaagcagcagctgctgtgggccccactgtgcttgagggacaagtatacacgaatacttcaccccccaacctcagcactggacgtcagcgctcccgcagctatgatcgcagcctgcagcgcagccctcctgtccgcctgggctcgctggaacgtatgttgagttgcccagtgcgcttgagtgagggccctgcagccatggccgggcctggctccccacccaggagggtcacctcctttgccgagctggccaagggccggaagaaaactggaggctctggctcgcccccacttcgtgtgagtgttggggactcctcccaggagttctcacccatccaagaagcccagcaagatcggggggccccactggatgagggcacttgctgtagccatagcctgccacccatgcctttggggccaggcatggacctacttggcccagacccaagtccaccctggtccacccaggtctgtcagggaccccactccagtgagatgcctcctgctggcctcagagctactgggcaaggccccctggctcagctgatggatccagggcctgctctcccagggagcccagccaacagccatacccagagggatgcaagagctagagctgacgggggtggcaccgagagccgaccagtccttcgctacagcaaggaacagaggccaaccacactgcccatccagcccttcgtgttccagcaccacttccccaagcagctggccaaggcccgggccctccacagcctttcccagctctacagcctctcaggctgcagccgtacacagcagcctgccccactggctgcccctgctgctcaagtctcagtcccagctccctcaggggaaccgcaggcatccactccccgagccactggcagaggtgccaggaaagctgggtctgagccagagacctctcggccatcgcccctgggcagctactcccccatccggagtgttggcccctttgggcccagcactgactcttctgcctccacttcgtgctcccctcccccagagcagcccacagccacagaaagcctgcccccatggagccactcctgtccttctgctgtccggcctgccacctcccagcagccgcagaaggaggatcagaagatactgaccttgactgagtaccggctccatggaacaggaagcttgccgcctctgggctcctggcgatctggcctcagccgagcagagagcctggcccggggaggtggtgagggcagcatggccaccaggcccagtaatgccaaccacctatcccctcaagccctcaagtggcgggaatacaggaggaagaacccactagggccacctggtttgtcagggagcctagaccgaagatcacaagaagctcggctggcccgaagaaaccctatctttgagttccctggctccctcagtgctgccagccatctgaactgccggctgaatggccaagcagtgaagccgttaccactgacctgccctgacttccaggaccccttttccttgacggagaagcctccagctgagttttgtctgtccccagatggcagctcagaggccatttccattgacctgcttcagaaaaaagggctggtaaaagctgttaacatcgctgtggacctcattgtggctcattttggcacaagccgggatcccggggtgaaggcaaagctgggaaacagttctgtgagccccaatgtgggccacctggttctgaagtacttgtgccctgccgtccgcgccgtgctggaggatgggctcaaggcctttgtactggacgtcatcatcgggcagcgtaagaacatgccatggagtgtggttgaggcttccacacagctaggcccatccaccaaggtcctgcatggcctctacaacaaagtcagccaattcccagagctcaccagtcataccatgcgcttcaacgccttcatcctcggcctgctcaacatccggtccctggagttctggtttaatcacctctataaccacgaagacatcatccagacccactaccagccctggggcttcctgagtgcagctcataccgtgtgtcccggcctctttgaagagctgctgctgctgctacagcccctggccctgctgcccttcagcctcgacttgctgttccagcaccggctgctgcaaagtgggcagcagcagcggcagcacaaggaactgctgcgggtgtcccaggacctgctgctgtctgcccactccacgctgcagctggcccgggcccggggccaggagggccctggagacgtggacagggcagcccaaggggagcgggtgaagggtgtgggtgcctcagaaggtggagaagaggaagaggaagaagaggagacagaagaggtggcagaggcagccgggggctcagggcgtgccaggtgggcccgaggtgggcaggccggctggtggtaccagctcatgcagagctcccaggtctacatcgatggctccattgagggttccaggttccctcgtggtagcagcaacagcagcagcgagaaaaagaaaggggcaggaggtgggggacctccccaggctccaccaccccgagagggagtagtggagggggctgaggcctgccctgcctctgaggaggccctgggccgggaaaggggctggcccttctggatggggagcccccctgactctgtgctggccgagctgaggcgcagtcgggagagggaagggcccgctgcctcgccagcagaaaatgaggaaggggcctcagagccttcacctggaggcatcaagtggggacacctctttggctcccgaaaagcccagcgggaggcccggcccacaaataggctcccctcggactggctgagcctggacaagtccatgttccaactagtggcgcagacagtgggttcccgccgggagccagagcccaaggagagcctgcaggagccacactccccagccctgccctccagtcctccgtgtgaggtgcaggcactgtgccaccacctggccaccggccctggacagctgagcttccacaaaggagacatcctacgagtgctggggcgagctggaggagactggctgcgctgcagccgtggccccgactctggcctggtgcccctggcctacgtgacattgaccccaactccaagtccaacccctggaagcagccaaaactgaggccctgtgcatgctggtggcctcagggaccctcataacccccagactcagagcccgagagcccttcccaagccattggcttggctgcagagtagactgagagctggggccacgtatccctgtgctggcacctgctccctgtgctcagtattaattacgcccccttaactgtcccagtgaccttgtccagacctccacccaggagagggatgggacacagcactgggctgccaggattcccctggcccgtctgggccaacccttccatgggtgaagacaagcaagtccccctggaggcgggtggcccagaaagccatctacagggttccctaggccaggtggagatgaggatgggtaacagtattggggccagatccctaagccccccagctgtaaataggctgtggccagtgcctggtcatcagaagagggaggaggagcccaggcgtctgtttatgtatttatttatttatttattatacctattaataaaaaaggtgctcagcctccaaaaaaaaaaaaaaaaaaaaaaaaaaaaaaaaaaaaaaaaaaaaaaaaaaaaaaaaaaaaaaaaaaaaaaaaagggggggcggcgcgcgacacaaagatacaccccgcggggggccacccaccctccggcgcgcgcacacccatctttttggagaaaaaggggggcgccaataggcggtggggcgatatcatatacgaaggaggggcggggggcgcagcaaaaaaagagatgcgggagcgggagacaaaacgcggcgcgacggcggcacacatcgtcggagacaggagacccctccccccgcgggagcggggggacacacagaagggggggagaaaaacacacaaaaaagacagagaataaaacccgccaccagaggcgaccaacacaacaccacccaacaagaaggagaacacgggggcgacacacaacaccagccgcaactccgtgagccaggcccgaaacaaagactgtcacacaaactagaagacacacagcaccacaaaaaaaaaaaaaacaacccggggggcgggttatagttaaaaacgcggccctgtccacatacctgacaacgcgagacgagccgcacacaaccacacccgcacgagagaccacacacgtcgcaggcgccagccgcacgccgcatgctcctcctgaccacacagcaccacctcgccgccacaccacccccgccacccgcgacccccgcaacgcaacctcgccgcgcccgacgacagcaccgagaagagaccgcaaaacagaccaataactaaagaggcgaagctaagcagagcagacggcccacagcggaaccagcacaggagagacaagcagcaagcagaaacaggaagcagacacaggcgacacgagcgagaggcgcggcgcgaggagagaaggcagagagcagcagggagagacagagcgagcagaaagagagagcacaggacggacgacacgaggaggacaacaagcgaccagcggcgcgcaagcaccagcacgcgcagaaaagcagacgcgagaacaggcaggaggcgaaggcgaagacacacgagaagcgaaagaagtcgacagaagacgagaaagacgaacgacgagagcggacgcgcgacggcgggcgacagagaggaacgcaaacaggggagccgaagaagccaacgggcgacagcacggagagcagagactaagagaaaacgaggacaggggcacagcagagacacgaggacggagaaagaggaggaaggaacaagagcgcagcgacgcgcaacgtccggcggagggacgggaggagaggagagagaacaggactgggccaagacgaaagaagaaggcggacgac

SEQ ID NO: 366451 - DNA, 2040 bp, Homo sapiens
gcagaggttgcagtgagccgagatcatgccactgcactccagcttgggcaacagagtgagactcagtctcaaaaaacaaaacaaaaaaccttggagccagcaggatactctagcaatctgggagttagggtggccaggaatccctgcatctcactcctctaaactcagggccaccgcctggggttggagagtttaggcactgcacagctgtgggcagcagcgtttatacttagtacatgcaagctgactagtgcacagcctgcaccgctgtctgcagcagctctgcccagactgtctttcaaagtcccacttgggccaggctctggttctctgtgtggatcagtccctctctcttttcccctagacatcatccagacccactaccagccctggggcttcctgagtgcagctcataccgtgtgtcccggcctctttgaagagctgctgctgctgctacagcccctggccctgctgcccttcagcctcgacttgctgttccagcaccggctgctgcaaagtgggcagcagcagcggcagcacaaggaactgctgcgggtgtcccaggacctgctgctgtctgcccactccacgctgcagctggcccgggcccggggccaggagggccctggagacgtggacagggcagcccaaggggagcgggtgaagggtgtgggtgcctcagaaggtggagaagaggaagaggaagaagaggagacagaagaggtggcagaggcagccgggggctcagggcgtgccaggtgggcccgaggtgggcaggccggctggtggtaccagctcatgcagagctcccaggtctacatcgatggctccattgagggttccaggttccctcgtggtagcagcaacagcagcagcgagaaaaagaaaggggcaggaggtgggggacctccccaggctccaccaccccgagagggagtagtggagggggctgaggcctgccctgcctctgaggaggccctgggccgggaaaggggctggcccttctggatggggagcccccctgactctgtgctggccgagctgaggcgcagtcgggagagggaagggcccgctgcctcgccagcagaaaatgaggaaggggcctcagagccttcacctggaggcatcaagtggggacacctctttggctcccgaaaagcccagcgggaggcccggcccacaaataggctcccctcggactggctgagcctggacaagtccatgttccaactagtggcgcagacagtgggttcccgccgggagccagagcccaaggagagcctgcaggagccacactccccagccctgccctccagtcctccgtgtgaggtgcaggcactgtgccaccacctggccaccggccctggacagctgagcttccacaaaggagacatcctacgagtgctggggcgagctggaggagactggctgcgctgcagccgtggccccgactctggcctggtgcccctggcctacgtgacattgaccccaactccaagtccaacccctggaagcagccaaaactgaggccctgtgcatgctggtggcctcagggaccctcataacccccagactcagagcccgagagcccttcccaagccattggcttggctgcagagtagactgagagctggggccacgtatccctgtgctggcacctgctccctgtgctcagtattaattacgcccccttaactgtcccagtgaccttgtccagacctccacccaggagagggatgggacacagcactgggctgccaggattcccctggcccgtctgggccaacccttccatgggtgaagacaagcaagtccccctggaggcgggtggcccagaaagccatctacagggttccctaggccaggtggagatgaggatgggtaacagtattggggccagatccctaagccccccagctgtaaataggctgtggccagtgcctggtcatcagaagagggaggaggagcccaggcgtctgtttatgtatttatttatttatttattatacctattaataaaaaaggtgctcagcctccaaa

SEQ ID NO: 366452 - DNA, 1290 bp, Homo sapiens
gaaatcctcggcctcggtggcggtggtggacacgtcgagccgggtagaagtggaggggccgttcgaagagtcgtgagggggtgacgggttaagattcggagagagaggtgctagtggctggacttgacctggaaagaatcttctgctgactctcaacttttcctggaaaaaatggatcattcccaccatatggggatgagctatatggactccaacagtaccatgcaaccttctcaccatcacccaaccacttcagcctcacactcccatggtggaggagacagcagcatgatgatgatgcctatgaccttctactttggctttaagaatgtggaactactgttttccggtttggtgatcaatacagctggagaaatggctggagcttttgtggcagtgtttttactagcaatgttctatgaaggactcaagatagcccgagagagcctgctgcgtaagtcacaagtcagcattcgctacaattccatgcctgtcccaggaccaaatggaaccatccttatggagacacacaaaactgttgggcaacagatgctgagctttcctcacctcctgcaaacatcccgaagtgctgggattacaggcatgagccaccacacctgtccctctccccctcgtattactcagacttaaactaccccaaaaaggctaaagtcctgctaagagtctccgtagaactgatgattcaagaggctcttatgatcacagctggtgattccctgtgttgaattagtgaaaacaggccaggcacagtaatcccagcactttgagaggactgcttaatgtcaggagctcaagcccagcttgggcaacacagatgcctgtctctacataaaacaataaaaatttttaaaaaaaatttttttttaatgcccagaacaatagggcatgattcaaaattatcctccgagctgcctctctggttctttctgggaaaaacacttaggcaagttgagaaaggaaggaaagttggaataatggcaaaactgttagaagcattcctctttcctccattgcctgtcctcccaacattatacccaaactagttacaaagccattctgtaaagagatcgggtacctacaatttcttcagatttacacaatatccactagaatttaatttctacaagggcagggatctttgttgagtggcacatggtagacactcaataaatacttattgaatagatgggttaagtgaaagtggcagggatcaactagagtgtcctgtgcttagggtcttttaataaagatggaaagaatgatgttaaa

SEQ ID NO: 366453 - DNA, 644 bp, Homo sapiens
gaaatcctcggcctcggtggcggtggtggacacgtcgagccgggtagaagtggaggggccgttcgaagagtcgtgagggggtgacgggttaagattcggagagagaggtgctagtggctggacttgacctggaaagaatcttctgctgactctcaacttttcctggaaaaaatggatcattcccaccatatggggatgagctatatggactccaacagtaccatgcaaccttctcaccatcacccaaccacttcagcctcacactcccatggtggaggagacagcagcatgatgatgatgcctatgaccttctactttggctttaagaatagtgaaactccatctcaaaaaaaaagaaaagaaggtccagcttttggattcaatgagtgggaaatacattgtgcctttctctagatgtgatacgttataccaaaatctttgtagtgtgcagagcggtggtttgagactaaatacaggcttagaacttgcagagtgtgtattcttggatggctgatgcatcgacttgcattcccacttaacactttgattagcatgaacttgccaatcaaaaaatgacaatcaatttgagaaaatagaaatagatatttttaaataaaaccattcacagtttaaaaaacttgata

SEQ ID NO: 366454 - DNA, 474 bp, Homo sapiens
aattttatagagtcagggtttccctgtctctacataaaacaataaaaatttttaaaaaaaatttttttttaatgcccagaacaatagggcatgattcaaaattatcctccgagctgcctctctggttctttctgggaaaaacacttaggcaagttgagaaaggaaggaaagttggaataatggcaaaactgttagaagcattcctctttcctccattgcctgtcctcccaacattatacccaaactagttacaaagccattctgtaaagagatcgggtacctacaatttcttcagatttacacaatatccactagaatttaatttctacaagggcagggatctttgttgagtggcacatggtagacactcaataaatacttattgaatagatgggttaagtgaaagtggcagggatcaactagagtgtcctgtgcttagggtcttttaataaagatggaaagaatgatgttaaa

SEQ ID NO: 366455 - DNA, 522 bp, Homo sapiens
gaaatcctcggcctcggtggcggtggtggacacgtcgagccgggtagaagtggaggggccgttcgaagagtcgtgagggggtgacgggttaagattcggagagagaggtgctagtggctggacttgacctggaaaggatcttgctttgttgcccaggctggagtgcaggagcacaatctcagctcactgcaacctctgtctcccaggctcaagcaatcttcccatctcagcctttcgagtagccgggactacaggcatgcaccaccacgcccagctaattttttgtatttttgatagagtcggggctttgccatgttgcccaggctggtctcaaactcctgagcttaagcagtctgcccaccttggcctcttagagtgctgggattacaggcatgagccaccatgtccagcctcatttgcattcttgtactgcattttcattaaatcattcaagttccttttatctgtgtaacatatttaattgcattttcctactgaataaaaaaaagggaacagttcaaa

SEQ ID NO: 366456 - DNA, 1667 bp, Homo sapiens
gaaatcctcggcctcggtggcggtggtggacacgtcgagccgggtagaagtggaggggccgttcgaagagtcgtgagggggtgacgggttaagattcggagagagaggtgctagtggctggacttgacctggaaagcctatgaccttctactttggctttaagaatgtggaactactgttttccggtttggtgatcaatacagctggagaaatggctggagcttttgtggcagtgtttttactagcaatgttctatgaaggactcaagatagcccgagagagcctgctgcgtaagtcacaagtcagcattcgctacaattccatgcctgtcccaggaccaaatggaaccatccttatggagacacacaaaactgttgggcaacagatgctgagctttcctcacctcctgcaaacagtgctgcacatcatccaggtggtcataagctacttcctcatgctcatcttcatgacctacaacgggtacctctgcattgcagtagcagcaggggccggtacaggatacttcctcttcagctggaagaaggcagtggtagtggatatcacagagcattgccattgacatcaaactctatggcgtggccttatcgattgcagtgggaagttgttgaagacttgaagacgtgattcctgctccaatcatcccttcttgctcctctttgtgcacgtacacacacacacacacacacacacacacacacccctgctcaacagaggtttagtttacagtctctgaactaaagtagtaacctcccaaattgttttttctaataagctgagattcccatttctcttaaggagaagccacccatgagatgtcttttccttctccatcatcttagagccaagttatatgttcttgtctaatccatgtagctttttgttcaatgacttgatcatctgcttcctttttgaatttttaacagatagtaagtaaatttggtggttttttcccctgggtcagtgatggaaaggggttaacttcagccaggattgatggcagctgagggaaattcttgcccaactaaacccagaactcaaacttaacattagaaaataaggtccagggccggacacagtggcccatgcctgtaatcccagcactttggggggccaaggcaggctggatcacctgaggacaggagttcgagaccagtctggccaacatggggaaaccccgtctctactaaaaatacaaaaattagccgggcatggtggtgggcgcctgtaatcccagctactcagaaggctgaggcaggagaatcacttgaacctaggaggcggaggttgcagtgagccaagatggcgccattgcactccagcctgggtgacaagagtgaaactccatctcaaaaaaaaagaaaagaaggtccagcttttggattcaatgagtgggaaatacattgtgcctttctctagatgtgatacgttataccaaaatctttgtagtgtgcagagcggtggtttgagactaaatacaggcttagaacttgcagagtgtgtattcttggatggctgatgcatcgacttgcattcccacttaacactttgattagcatgaacttgccaatcaaaaaatgacaatcaatttgagaaaatagaaatagatatttttaaataaaaccattcacagtttaaaaaacttgata

SEQ ID NO: 366457 - DNA, 1184 bp, Homo sapiens
  misc_feature (33)..(33): n is a, c, g, or t
  misc_feature (40)..(40): n is a, c, g, or t
  misc_feature (127)..(127): n is a, c, g, or t
  misc_feature (136)..(136): n is a, c, g, or t
  misc_feature (193)..(193): n is a, c, g, or t
ttcatggtcatattaaggctagtttctataatngtcaggnaggactgttctgtcttttctatttatatgaagctactatagataaaatcagagagaagattacaataaaatgtagaccacatacganacctaaaanttgaaaagtaatttactcagtgagggttttaagtccatcacatttctattctaaaanaaaagcttgcagagaattaaaacacacacacacacacacacacccctgctcaacagaggtttagtttacagtctctgaactaaagtagtaacctcccaaattgttttttctaataagctgagattcccatttctcttaaggagaagccacccatgagatgtcttttccttctccatcatcttagagccaagttatatgttcttgtctaatccatgtagctttttgttcaatgacttgatcatctgcttcctttttgaatttttaacagatagtaagtaaatttggtggttttttcccctgggtcagtgatggaaaggggttaacttcagccaggattgatggcagctgagggaaattcttgcccaactaaacccagaactcaaacttaacattagaaaataaggtccagggccggacacagtggcccatgcctgtaatcccagcactttggggggccaaggcaggctggatcacctgaggacaggagttcgagaccagtctggccaacatggggaaaccccgtctctactaaaaatacaaaaattagccgggcatggtggtgggcgcctgtaatcccagctactcagaaggctgaggcaggagaatcacttgaacctaggaggcggaggttgcagtgagccaagatggcgccattgcactccagcctgggtgacaagagtgaaactccatctcaaaaaaaaagaaaagaaggtccagcttttggattcaatgagtgggaaatacattgtgcctttctctagatgtgatacgttataccaaaatctttgtagtgtgcagagcggtggtttgagactaaatacaggcttagaacttgcagagtgtgtattcttggatggctgatgcatcgacttgcattcccacttaacactttgattagcatgaacttgccaatcaaaaaatgacaatcaatttgagaaaatagaaatagatatttttaaataaaaccattcacagtttaaaaaacttgata

SEQ ID NO: 366458 - DNA, 1259 bp, Homo sapiens
tcatgtctggctaatttttgtatttttagtagagatgagtttttgccatgttggccaggctagtcttgaactcctgagctcaggtgatccgcccgtctcggcctcccaaagtgctgggattgggaaaggtgtgagccactgtgcccggccataatacctgtttgaattaggcacctagcacaaaataggtattcgagccttagtattttttttattatctacaattgttgttactccagctttcagaatgaaaagtaacactcttcttgataaggttaataggttagtatttttctttttttgttgttgtttttgtttttgagacggagttttgcccttgttgcccagactcgagtgcaatggtgcaatctcagctcactgcaacctctgcctcctgggttcaagcacctccacctcagcctcccgagtagctaggattgcaggcatgcaccaccacgcccggctaattttgtatttttagtagagacagggtttctccatgttggtcaggctggtctcaaactctggacctcaggttatctgcccactcccgaagtgctgggattacaggcatgagccaccacacctgtccctctccccctcgtattactcagacttaaactaccccaaaaaggctaaagtcctgctaagagtctccgtagaactgatgattcaagaggctcttatgatcacagctggtgattccctgtgttgaattagtgaaaacaggccaggcacagtaatcccagcactttgagaggactgcttaatgtcaggagctcaagcccagcttgggcaacacagatgcctgtctctacataaaacaataaaaatttttaaaaaaaatttttttttaatgcccagaacaatagggcatgattcaaaattatcctccgagctgcctctctggttctttctgggaaaaacacttaggcaagttgagaaaggaaggaaagttggaataatggcaaaactgttagaagcattcctctttcctccattgcctgtcctcccaacattatacccaaactagttacaaagccattctgtaaagagatcgggtacctacaatttcttcagatttacacaatatccactagaatttaatttctacaagggcagggatctttgttgagtggcacatggtagacactcaataaatacttattgaatagatgggttaagtgaaagtggcagggatcaactagagtgtcctgtgcttagggtcttttaataaagatggaaagaatgatgttaaa

SEQ ID NO: 366459 - DNA, 588 bp, Homo sapiens
aattttatagagtcagggtttccctgtgttgcccaggctggtctaactcctggactcaagcaatcctcctgcctcagccactttgagaggactgcttaatgtcaggagctcaagcccagcttgggcaacacagatgcctgtctctacataaaacaataaaaatttttaaaaaaaatttttttttaatgcccagaacaatagggcatgattcaaaattatcctccgagctgcctctctggttctttctgggaaaaacacttaggcaagttgagaaaggaaggaaagttggaataatggcaaaactgttagaagcattcctctttcctccattgcctgtcctcccaacattatacccaaactagttacaaagccattctgtaaagagatcgggtacctacaatttcttcagatttacacaatatccactagaatttaatttctacaagggcagggatctttgttgagtggcacatggtagacactcaataaatacttattgaatagatgggttaagtgaaagtggcagggatcaactagagtgtcctgtgcttagggtcttttaataaagatggaaagaatgatgttaaa

SEQ ID NO: 366460 - DNA, 309 bp, Homo sapiens
gtggaggggccgttcgaagagtcgtgagggggtgacgggttaagattcggagagagaggtgctagtggctggacttgacctggaaaggtaaggcttctctcggcccctctttcgcacccctgtgcatgggtaccgtccttttcccagcgggacaaggaccttcctcgccgctttcctcagctccgcggaaggagaaagagctcgggactggagggttaaagactggggcttcggcccggcccctgcagtggcatagccagagtgaccttgggccggggtgctcggtgcctcagtttccccgtgtatgca

SEQ ID NO: 366461 - DNA, 1831 bp, Homo sapiens
gaaatcctcggcctcggtggcggtggtggacacgtcgagccgggtagaagtggaggggccgttcgaagagtcgtgagggggtgacgggttaagattcggagagagaggtgctagtggctggacttgacctggaaagaatcttctgctgactctcaacttttcctggaaaaaatggatcattcccaccatatggggatgagctatatggactccaacagtaccatgcaaccttctcaccatcacccaaccacttcagcctcacactcccatggtggaggagacagcagcatgatgatgatgcctatgaccttctactttggctttaagaatgtggaactactgttttccggtttggtgatcaatacagctggagaaatggctggagcttttgtggcagtgtttttactagcaatgttctatgaaggactcaagatagcccgagagagcctgctgcgtaagtcacaagtcagcattcgctacaattccatgcctgtcccaggaccaaatggaaccatccttatggagacacacaaaactgttgggcaacagatgctgagctttcctcacctcctgcaaacagtgctgcacatcatccaggtggtcataagctacttcctcatgctcatcttcatgacctacaacgggtacctctgcattgcagtagcagcaggggccggtacaggatacttcctcttcagctggaagaaggcagtggtagtggatatcacagagcattgccattgacatcaaactctatggcgtggccttatcgattgcagtgggaagttgttgaagacttgaagacgtgattcctgctccaatcatcccttcttgctcctctttgtgcacgtacacacacacacacacacacacacacacacacccctgctcaacagaggtttagtttacagtctctgaactaaagtagtaacctcccaaattgttttttctaataagctgagattcccatttctcttaaggagaagccacccatgagatgtcttttccttctccatcatcttagagccaagttatatgttcttgtctaatccatgtagctttttgttcaatgacttgatcatctgcttcctttttgaatttttaacagatagtaagtaaatttggtggttttttcccctgggtcagtgatggaaaggggttaacttcagccaggattgatggcagctgagggaaattcttgcccaactaaacccagaactcaaacttaacattagaaaataaggtccagggccggacacagtggcccatgcctgtaatcccagcactttggggggccaaggcaggctggatcacctgaggacaggagttcgagaccagtctggccaacatggggaaaccccgtctctactaaaaatacaaaaattagccgggcatggtggtgggcgcctgtaatcccagctactcagaaggctgaggcaggagaatcacttgaacctaggaggcggaggttgcagtgagccaagatggcgccattgcactccagcctgggtgacaagagtgaaactccatctcaaaaaaaaagaaaagaaggtccagcttttggattcaatgagtgggaaatacattgtgcctttctctagatgtgatacgttataccaaaatctttgtagtgtgcagagcggtggtttgagactaaatacaggcttagaacttgcagagtgtgtattcttggatggctgatgcatcgacttgcattcccacttaacactttgattagcatgaacttgccaatcaaaaaatgacaatcaatttgagaaaatagaaatagatatttttaaataaaaccattcacagtttaaaaaacttgata

SEQ ID NO: 366462 - DNA, 1688 bp, Homo sapiens
  misc_feature (1688)..(1688): n is a, c, g, or t
gaaatcctcggcctcggtggcggtggtggacacgtcgagccgggtagaagtggaggggccgttcgaagagtcgtgagggggtgacgggttaagattcggagagagaggtgctagtggctggacttgacctggaaagaatcttctgctgactctcaacttttcctggaaaaaatggatcattcccaccatatggggatgagctatatggactccaacagtaccatgcaaccttctcaccatcacccaaccacttcagcctcacactcccatggtggaggagacagcagcatgatgatgatgcctatgaccttctactttggctttaagaatgtggaactactgttttccggtttggtgatcaatacagctggagaaatggctggagcttttgtggcagtgtttttactagcaatgttctatgaaggactcaagatagcccgagagagcctgctgcgtaagtcacaagtcagcattcgctacaattccatgcctgtcccaggaccaaatggaaccatccttatggagacacacaaaactgttgggcaacagatgctgagctttcctcacctcctgcaaacagtgctgcacatcatccaggtggtcataagctacttcctcatgctcatcttcatgacctacaacgggtacctctgcattgcagtagcagcaggggccggtacaggatacttcctcttcagctggaagaaggcagtggtagtggatatcacagagcattgccattgacatcaaactctatggcgtggccttatcgattgcagtgggaagttgttgaagacttgaagacgtgattcctgctccaatcatcccttcttgctcctctttgtgcacgtacacacacacacacacacacacacacacacacccctgctcaacagaggtttagtttacagtctctgaactaaagtagtaacctcccaaattgttttttctaataagctgagattcccatttctcttaaggagaagccacccatgagatgtcttttccttctccatcatcttagagccaagttatatgttcttgtctaatccatgtagctttttgttcaatgacttgatcatctgcttcctttttgaatttttaacagatagtaagtaaatttggtggttttttcccctgggtcagtgatggaaaggggttaacttcagccaggattgatggcagctgagggaaattcttgcccaactaaacccagaactcaaacttaacattagaaaataaggtccagggccggacacagtggcccatgcctgtaatcccagcactttggggggccaaggcaggctggatcacctgaggacaggagttcgagaccagtctggccaacatggggaaaccccgtctctactaaaaatacaaaaattagccgggcatggtggtgggcgcctgtaatcccagctactcagaaggctgaggcaggagaatcacttgaacctaggaggcggaggttgcagtgagccaagatggcgccattgcactccagcctgggtgacaagagtgaaactccaacaaagacgagccgtcggtccggggacatggctcccatgcgttccaactgggggaggggtgacacggccacggaggtcgggggaccgccacaggggcaaaaacgaaatcacccaaactgcggagggccgctgcgctcgcgccctctccatgccatcccn

SEQ ID NO: 366463 - DNA, 1263 bp, Homo sapiens
ggcgggtgacctagaggatccccccatcatcacccatgtgggcatcactgcatgtcatcttcatgacctacaacgggtacctctgcattgcagtagcagcaggggccggtacaggatacttcctcttcagctggaagaaggcagtggtagtggatatcacagagcattgccattgacatcaaactctatggcgtggccttatcgattgcagtgggaagttgttgaagacttgaagacgtgattcctgctccaatcatcccttcttgctcctctttgtgcacgtacacacacacacacacacacacacacacacacccctgctcaacagaggtttagtttacagtctctgaactaaagtagtaacctcccaaattgttttttctaataagctgagattcccatttctcttaaggagaagccacccatgagatgtcttttccttctccatcatcttagagccaagttatatgttcttgtctaatccatgtagctttttgttcaatgacttgatcatctgcttcctttttgaatttttaacagatagtaagtaaatttggtggttttttcccctgggtcagtgatggaaaggggttaacttcagccaggattgatggcagctgagggaaattcttgcccaactaaacccagaactcaaacttaacattagaaaataaggtccagggccggacacagtggcccatgcctgtaatcccagcactttggggggccaaggcaggctggatcacctgaggacaggagttcgagaccagtctggccaacatggggaaaccccgtctctactaaaaatacaaaaattagccgggcatggtggtgggcgcctgtaatcccagctactcagaaggctgaggcaggagaatcacttgaacctaggaggcggaggttgcagtgagccaagatggcgccattgcactccagcctgggtgacaagagtgaaactccatctcaaaaaaaaagaaaagaaggtccagcttttggattcaatgagtgggaaatacattgtgcctttctctagatgtgatacgttataccaaaatctttgtagtgtgcagagcggtggtttgagactaaatacaggcttagaacttgcagagtgtgtattcttggatggctgatgcatcgacttgcattcccacttaacactttgattagcatgaacttgccaatcaaaaaatgacaatcaatttgagaaaatagaaatagatatttttaaataaaaccattcacagtttaaaaaacttgata

SEQ ID NO: 366464 - DNA, 438 bp, Homo sapiens
ataaaaatatatccatattgcatatttgagaatttctttacatttttatttacttgattgtttatgttattggagttgaaaattattttcacttagaattttgctcagttttcttctattcttgagagtttctgttgaagtgctttggcattctgattcccagtcgtttacacatggcctattttttctgtggaaatatttaagattttctctttatttctgatctaagtttttatagtgatgtgtgttgctttgactttgattattatttttatttagttagtttttgagatagggtctcgccctgtcacctagacaggagtgcggtgacacaattatagctcagtgcaacctcaaattcctgggctcaagctatcctcccacctcagtctcctgagtagctgggaccacagacacgcaccaccaggcctggctaat

SEQ ID NO: 366465 - DNA, 595 bp, Homo sapiens
ctggtaatcattgaagaatcattgtattgactattaaacatctagggatcacctgtttaaatcaagttaacaaaacacttacttaacaaatatatattgattgcctattatgaagtagatgctatagtaggtgctggcagtataaacatgaaaagagacattgtgtgtgcatattaatatacagcaaattaaacttcagccagagaagtactttactagaaggttgatagaagtgtggtggtagcttgcaggaggaagcagttagcctccttggaaatgagtaatcttcacagaaagtatgacatttgacctgcttcttggagaagatgcatattaaacctattaaatccatgtcagcctttaacacctttgctcagattagtttctcgagctgttttcccacctggtgagcagataagagcaggacaggaaagttctgatgaaaggaagaagtgccagagagagaaggccttgcaagcaaagaagcctgacaggcaggagcccctgagtatcctaaggagaagtaccagcgatttagggaagaaaattgctgccagaagtgcaggaaataaaaattctgacctagatcatttta

SEQ ID NO: 366466 - DNA, 689 bp, Homo sapiens
ctggtaatcattgaagaatcattgtattgactattaaacatctagggatcacctgtttaaatcaagttaacaaaacacttacttaacaaatatatattgattgcctattatgaagtagatgctatagtaggtgctggcagtataaacatgaaaagagacattgtgtgtgcatattaatatacagcaaattaaacttcagccagagaagtactttactagaaggttgatagaagtgtggtggtagcttgcaggaggaagcagttagcctccttggaaatgagtaatcttcacagaaagtatgacatttgacctgcttcttggagaagatgcatattaaacctattaaatccatgtcagcctttaacacctttgctcagattagtttctcgagctgttttcccacctggtgagcagataagagcaggacaggaaagttctgatgaaaggaagaagtgccagagagagaaggccttgcaagcaaagaagcctgacaggcaggagcccctgagtatcctaaggagaagtaccagcgatttagggaagaaaattgctgccagaagtgcaggaaatacttgggggtccttttataatcacatttcattaaccaggcaagattaatcagtgaccagataggacagtcactgactcttaagactttacaatttgaaacagtgtgtacaaatgtatag

SEQ ID NO: 366467 - DNA, 1965 bp, Homo sapiens
catatatgtgcactgataaaagaaaaatgaacaagatgtagaggagtaagttatcatttgctttaaaagattgtgtgtgcttgcatatgcatagaacatttatgggaagatactgaaaaatgtttaacagtatgtctaagaaatagaacagaggtcttcagggaatgggtggtaaggaaaagagactgtactcttcattatatatttgttcttagtgcatgtatatttttaaccatgtaaatagtgttctttatttaaaaacagtattttaaagtttctataatgtaaatttttatttggtaaatctaataaattacttaattccatatcatgccatctctaaaatcttttggaaattgcctcccctctgtcgtgctcattaataaaacaatattaagagtagtaaccctacttacttcagaaagtagttgtttttattaatggcatatgaaagcaatttgagaaccataaactaatatggaaatataaggcattctaaggacagagatgaaaagggaaggatataggggaggataaaggaaagaggaaaagcagaaagaaaaaggaaaaaaatactcagttgggttctgggatagaagtctgataagaactttttgacatcctgtcatttatttgaatgacttgttcctcaaacccaacgcgcacatttcatgttttttttagtttttttttctgttttttttcctgtttgatagctgtcagttatagtgattggtatttaatacaaaaaaaaccaaagatatgaaaattgttctatattttaatctgcaaattgctccattaggcagatttaattatttgtggatttacttatggtgcttccagatatcttgtacctcttaatgtgaccatcagaaaacttgactgagaaacatttgtactatacaaaatacaaaatgctttcagtatattattgcaagtgcttcttaaaaacatatagtattgttaaatgtgtactttttaatgttgtcttgtttaaattggaaaattaaccaaatgttatccatttaaacatgctttataacatattaaatgtgagtgcttaataagtacttttaatgatactggtacgggtgttggaacccagtcctagtcaagagtctaaatcttcatctctgtttttcagacaaatgtagtaggacattctttaggatgtacttggcattccttgaggaattctcctggtgaaaagatcaacttactgaaaagaagcctccttagtattccaaatacagattacatccagctgcttagtgaaattgccaaggaacaaggttttaatataacatatttggatataggtatgatttttttttctttggctttcccaagacatgtttatttaaaaatgtgtttgaggaacaaaaatgtgtttgaggaataaaaatttctattacaatttattttattgatcagggattctaagtatatataattactaggccagtaatatatataattgatatgtcccattcttgtggatagtaataatagctaacatctatacagttataacaaaaacaacaatagcaaagatagagttttactgtgtgccagacactgttctaagattacacgtatctacttactgaatcctcagactaactctatgaagcaaattctgttatccttatttataagtaaaggaagaaaggcacagaaaggttgagaaacttgcccaagatcacatagctagtcagcggtagagcaagatttggggaagagtcccagaagataccctggctgttaaactagccctgctgggcaaatgaaaaggcacctacatttctagcacaagtacaagtttgtggtgcccagaccttttctctctactttgtcactgtatgctgattctgggaggtaaatggaaccaagtcaatttatagttttatcccatctcagccatcatcatctgtattttctctagcccttaatcatttggat

SEQ ID NO: 366468 - DNA, 1843 bp, Homo sapiens
gaggcccgcagaggagcagcgagggggcgtagccggagctacggcaccaaggctccgcccccaccctgcctgccccctcgctggagcaacgcaagcaggaggcgggggagtcggaggaggtggcggcgctggagctcctcccggggaccagcgacccggggagcgagcacgtcgctccgcaccgctcttcctccagccgctgagccgtcccttctcgccatgtcccagagcaggcaccgcgccgaggccccgccgctggagcgcgaggacagtgggaccttcagtttggggaagatgataacagctaagccagggaaaacaccgattcaggtattacacgaatacggcatgaagaccaagaacatcccagtttatgaatgtgaaagatctgatgtgcaaatacacgtgcccactttcaccttcagagtaaccgttggtgacataacctgcacaggtgaaggtacaagtaagaagctggcgaaacatagagctgcagaggctgccataaacattttgaaagccaatgcaagtatttgctttgcagttcctgaccccttaatgcctgacccttccaagcaaccaaagaaccagcttaatcctattggttcattacaggaattggctattcatcatggctggagacttcctgaatataccctttcccaggagggaggacctgctcataagagagaatatactacaatttgcaggctagagtcatttatggaaactggaaagggggcatcaaaaaagcaagccaaaaggaatgctgctgagaaatttcttgccaaatttagtaatatttctccagagaaccacatttctttaacaaatgtagtaggacattctttaggatgtacttggcattccttgaggaattctcctggtgaaaagatcaacttactgaaaagaagcctccttagtattccaaatacagattacatccagctgcttagtgaaattgccaaggaacaaggttttaatataacatatttggatatagatgaactgagcgccaatggacaatatcaatgtcttgctgaactgtccaccagccccatcacagtctgtcatggctccggtatctcctgtggcaatgcacaaagtgatgcagctcacaatgctttgcagtatttaaagataatagcagaaagaaagtaaatctggagcaacttaaaaaatctttcagtagcacataaaaagttcccctctggccccttcccaagtaaaacttttaccgtagtgtttatgtcttgtttctaaatctcttcatagattccatcaacactccagatttaattatctcctcatagttgttattaagctctttttaatggcttcaactttgtatcagtatactgtatttataaactttgtaccacaagagagagtgtagcacccattttacagtgccatgcacatcagagaaagaaactgcatgtttgttgttgatgatgaaataaaaatgctagcgacagtctttcttactggtgcttaagctcttctttgcacaaagctttataaagggaattcaaaggaagccctttagaattagagtcttgagggacagcactaacaggcctttattaagtatgattgattgttaaatttcagggaacatgattggtctgctgtgtatttgaattcatgtaacaaagaactgttacgatgggattctgctcattttattaaaaagctactgacttgactgtcatcctgttcttgttagccattgtgaataagattttaatgttgataattctgttatttacatatctctaatttactttgaaattcaaaggtgaaaataaaaaatgatggcctaagtaaaatttacaaacat

SEQ ID NO: 366469 - DNA, 998 bp, Homo sapiens
ttttctggatcattgttactcttccgttttttgtatagttgtaaccagagtattctttaaatacatttttatggcatccctattatgtacaaaacacccacaaagccttatgtaggtaagtgatacataggcccctacctcaaggagcttactgtctgaacaggggagaggtgtggtgaaggatggacaaattatatgtatttgtaagagtatataatttatggtaaaacaatttcaagaaaggattaaaccatgtgttataatgtttcaaagaagggagagattataaaccactggggtaaaaggataggcttcttggaggaagtgacatttgagatatatcttggatgaccgatcagattcccatagaagaggtctgagaaaagggcattccatgtagaaggaatgacaagagcaaagacatagagagttaattagaaaatgcttgtcatttatttcataattcgggggaaattattttgttttataacacttttaaaaaatatttagctttgcagttcctgaccccttaatgcctgacccttccaagcaaccaaagaaccagcttaatcctattggttcattacaggtaagttgtacagttctttgcctactgatgaaatatataataagtttgtaatgtcagaggggctaacacaaggaattaatattttaaagacaagatagtgatatattttgttttccaacttacgatcattagattaacagagctaacttgaaattattttcctatttatgttctgggttttctttcatatacagtatttgcctttggcttatagaattctcatttaagatcaacaggccctcagtgcacatgggtaaagtgttttatactttaagaatagttcttgctactcttgtgacaaatctctttctacttctgttgagacagaagactttatagagagcctaaatcaaatcagtgaacctaactgaagaaaaggagtctatttgcttattctaccaaaaaaaaa

SEQ ID NO: 366470 - DNA, 643 bp, Homo sapiens
taatcccagctgcttgggaggctgagacacgagaattccttggacccagtgggcagtggttgcagtgagctgggatcgcgccattgcactccagcctgggcgacagagcaagactctgtctccaaacaaacaaaaaaagacatgccaaatgacatggcaggtattgggttctcccccactggtgatggccatgctgtttctgtatagcctgaaggtgaacccaaccattaagtacatttgtagaaatgaggggtatggagtgtcctttctgcatcttggcactttgtcagcaaaaaaagctaacaaactttactatatttgtgcttcttgacagataaaatgggaattactaagctgtaatcaggcctaaagtggcctgactttaatacagagactttctcacttctccatcacaattatttgggtagcttcggcatgcagcattgtaagtgaatactcatatctcatcagcctatgtaaagcttgaaattctcacagttggaaaaaaaaaaccttgaggaagtggcaataactaaacctcatttgtcatggaaaaatgactccagttgcctaggtggtactaaccttgaaatgccgcttattcagttttaagtactgacctgctaagtaactagtaattcca

SEQ ID NO: 366471 - DNA, 1714 bp, Homo sapiens
gaggcccgcagaggagcagcgagggggcgtagccggagctacggcaccaaggctccgcccccaccctgcctgccccctcgctggagcaacgcaagcaggaggcgggggagtcggaggaggtggcggcgctggagctcctcccggggaccagcgacccggggagcgagcacgtcgctccgcaccgctcttcctccagccgctgagccgtcccttctcgccatgtcccagagcaggcaccgcgccgaggccccgccgctggagcgcgaggacagtgggaccttcagtttggggaagatgataacagctaagccagggaaaacaccgattcaggtattacacgaatacggcatgaagaccaagaacatcccagtttatgaatgtgaaagatctgatgtgcaaatacacgtgcccactttcaccttcagagtaaccgttggtgacataacctgcacaggtgaaggtacaagtaagaagctggcgaaacatagagctgcagaggctgccataaacattttgaaagccaatgcaagtatttgctttgcagttcctgaccccttaatgcctgacccttccaagcaaccaaagaaccagcttaatcctattggttcattacaggaattggctattcatcatggctggagacttcctgaatataccctttcccaggagggaggacctgctcataagagagaatatactacaatttgcaggctagagtcatttatggaaactggaaagggggcatcaaaaaagcaagccaaaaggaatgctgctgagaaatttcttgccaaatttagtaatatttctccagagaaccacatttctttaacaaatgtagtaggacattctttaggatgtacttggcattccttgaggaattctcctggtgaaaagatcaacttactgaaaagaagcctccttagtattccaaatacagattacatccagctgcttagtgaaattgccaaggaacaaggttttaatataacatatttggatatagatgaactgagcgccaatggacaatatcaatgtcttgctgaactgtccaccagccccatcacagtctgtcatggctccggtatctcctgtggcaatgcacaaagtgatgcagctcacaatgctttgcagtatttaaagataatagcagaaagaaagtaaatctggagcaacttaaaaaatctttcagtagcacataaaaagttcccctctggccccttcccaagtaaaacttttaccgtagtgtttatgtcttgtttctaaatctcttcatagattccatcaacactccagatttaattatctcctcatagttgttattaagctctttttaatggcttcaactttgtatcagtatactgtatttataaactttgtaccacaagagagagtgtagcacccattttacagtgccatgcacatcagagaaagaaactgcatgtttgttgttgatgatgaaataaaaatgctagcgacagtctttcttactggtgcttaagctcttctttgcacaaagctttataaagggaattcaaaggaagccctttagaattagagtcttgagggacagcactaacaggcctttattaagtatgattgattgttaaatttcagggaacatgattggtctgctgtgtatttgaattcatgtaacaaagaactgttacgatgggattctgctcattttattaaaaagctactgacttgactgtca

SEQ ID NO: 366472 - DNA, 1480 bp, Homo sapiens
gaggcccgcagaggagcagcgagggggcgtagccggagctacggcaccaaggctccgcccccaccctgcctgccccctcgctggagcaacgcaagcaggaggcgggggagtcggaggaggtggcggcgctggagctcctcccggggaccagcgacccggggagcgagcacgtcgctccgcaccgctcttcctccagccgctgagccgtcccttctcgccatgtcccagagcaggcaccgcgccgaggccccgccgctggagcgcgaggacagtgggaccttcagtttggggaagatgataacagctaagccagggaaaacaccgattcaggtattacacgaatacggcatgaagaccaagaacatcccagtttatgaatgtgaaagatctgatgtgcaaatacacgtgcccactttcaccttcagagtaaccgttggtgacataacctgcacaggtgaaggtacaagtaagaagctggcgaaacatagagctgcagaggctgccataaacattttgaaagccaatgcaagtatttgctttgcagttcctgaccccttaatgcctgacccttccaagcaaccaaagaaccagcttaatcctattggttcattacaggaattggctattcatcatggctggagacttcctgaatataccctttcccaggagggaggacctgctcataagagagaatatactacaatttgcaggctagagtcatttatggaaactggaaagggggcatcaaaaaagcaagccaaaaggaatgctgctgagaaatttcttgccaaatttagtaatatttctccagagaaccacatttctttaacaaatgtagtaggacattctttaggatgtacttggcattccttgaggaattctcctggtgaaaagatcaacttactgaaaagaagcctccttagtattccaaatacagattacatccagctgcttagtgaaattgccaaggaacaaggttttaatataacatatttggatatagatgaactgagcgccaatggacaatatcaatgtcttgctgaactgtccaccagccccatcacagtctgtcatggctccggtatctcctgtggcaatgcacaaagtgatgcagctcacaatgctttgcagtatttaaagataatagcagaaagaaagtaaatctggagcaacttaaaaaatctttcagtagcacataaaaagttcccctctggccccttcccaagtaaaacttttaccgtagtgtttatgtcttgtttctaaatctcttcatagattccatcaacactccagatttaattatctcctcatagttgttattaagctctttttaatggcttcaactttgtatcagtatactgtatttataaactttgtaccacaagagagagtgtagcacccattttacagtgccatgcacatcagagaaagaaactgcatgtttgttgttgatgatgaaataaaaatgctagcgacagtc

SEQ ID NO: 366473 - DNA, 1798 bp, Homo sapiens
gaggcccgcagaggagcagcgagggggcgtagccggagctacggcaccaaggctccgcccccaccctgcctgccccctcgctggagcaacgcaagcaggaggcgggggagtcggaggaggtggcggcgctggagctcctcccggggaccagcgacccggggagcgagcacgtcgctccgcaccgctcttcctccagccgctgagccgtcccttctcgccatgtcccagagcaggcaccgcgccgaggccccgccgctggagcgcgaggacagtgggaccttcagtttggggaagatgataacagctaagccagggaaaacaccgattcaggtattacacgaatacggcatgaagaccaagaacatcccagtttatgaatgtgaaagatctgatgtgcaaatacacgtgcccactttcaccttcagagtaaccgttggtgacataacctgcacaggtgaaggtacaagtaagaagctggcgaaacatagagctgcagaggctgccataaacattttgaaagccaatgcaagtatttgctttgcagttcctgaccccttaatgcctgacccttccaagcaaccaaagaaccagcttaatcctattggttcattacaggaattggctattcatcatggctggagacttcctgaatataccctttcccaggagggaggacctgctcataagagagaatatactacaatttgcaggctagagtcatttatggaaactggaaagggggcatcaaaaaagcaagccaaaaggaatgctgctgagaaatttcttgccaaatttagtaatatttctccagagaaccacatttctttaacaaatgtagtaggacattctttaggatgtacttggcattccttgaggaattctcctggtgaaaagatcaacttactgaaaagaagcctccttagtattccaaatacagattacatccagctgcttagtgaaattgccaaggaacaaggttttaatataacatatttggatatagatgaactgagcgccaatggacaatatcaatgtcttgctgaactgtccaccagccccatcacagtctgtcatggctccggtatctcctgtggcaatgcacaaagtgatgcagctcacaatgctttgcagtatttaaagataatagcagaaagaaagtaaatctggagcaacttaaaaaatctttcagtagcacataaaaagttcccctctggccccttcccaagtaaaacttttaccgtagtgtttatgtcttgtttctaaatctcttcatagattccatcaacactccagatttaattatctcctcatagttgttattaagctctttttaatggcttcaactttgtatcagtatactgtatttataaactttgtaccacaagagagagtgtagcacccattttacagtgccatgcacatcagagaaagaaactgcatgtttgttgttgatgatgaaataaaaatgctagcgacagtcaaaaaaaaaaaaaaaaaaaaaaaaaaaaaaaaaaaaaaaaaaaaaaaaaaaaaaaaaaaaaaaaacaaaaagacaacagcacaaaacaacgactcagagcaaacaaaaacaaggacaaccaacaagaagagacgcgacagctaaacgaagacaccacacaccgccgaggccgagaaacgcctcaacagaaagacacaccaaaacaaaggcgcacccgccgaagcgacacaacagcacgcagcagacaaaatgagatgcacaaccgacggagagagcactcaaccagagcagcaaacaagaaccagcataacgcgcaaa

SEQ ID NO: 366474 - DNA, 2247 bp, Homo sapiens
gaggcccgcagaggagcagcgagggggcgtagccggagctacggcaccaaggctccgcccccaccctgcctgccccctcgctggagcaacgcaagcaggaggcgggggagtcggaggaggtggcggcgctggagctcctcccggggaccagcgacccggggagcgagcacgtcgctccgcaccgctcttcctccagccgctgagccgtcccttctcgccatgtcccagagcaggcaccgcgccgaggccccgccgctggagcgcgaggacagtgggaccttcaggtcagcgtgcgggcagtcagggccccagggccgggagcgttgggcggcagggccggggcgcggggagccggccctccagaggcattctgggtaaagccgtgcccggcgcccacgcctccgcggctgtgggtgctcggccccgccctctcggcggcgagggttggggtctgcggccgggccccgcccctctcgtggtccctggcggcgcgcggggcgggcggaggtgacgctcggtcggcgcgcccgggaagggatcgtcaggttttccctgagaggctgcggcgctgctgccagccctgttctgttgagaatctctcctacccgcattcaagtgctctctctaaagacctcgctcaccccgcctgctcctgcggagtgactgccgcagcggggccggaagacagtttggggaagatgataacagctaagccagggaaaacaccgattcaggtattacacgaatacggcatgaagaccaagaacatcccagtttatgaatgtgaaagatctgatgtgcaaatacacgtgcccactttcaccttcagagtaaccgttggtgacataacctgcacaggtgaaggtacaagtaagaagctggcgaaacatagagctgcagaggctgccataaacattttgaaagccaatgcaagtatttgctttgcagttcctgaccccttaatgcctgacccttccaagcaaccaaagaaccagcttaatcctattggttcattacaggaattggctattcatcatggctggagacttcctgaatataccctttcccaggagggaggacctgctcataagagagaatatactacaatttgcaggctagagtcatttatggaaactggaaagggggcatcaaaaaagcaagccaaaaggaatgctgctgagaaatttcttgccaaatttagtaatatttctccagagaaccacatttctttaacaaatgtagtaggacattctttaggatgtacttggcattccttgaggaattctcctggtgaaaagatcaacttactgaaaagaagcctccttagtattccaaatacagattacatccagctgcttagtgaaattgccaaggaacaaggttttaatataacatatttggatatagatgaactgagcgccaatggacaatatcaatgtcttgctgaactgtccaccagccccatcacagtctgtcatggctccggtatctcctgtggcaatgcacaaagtgatgcagctcacaatgctttgcagtatttaaagataatagcagaaagaaagtaaatctggagcaacttaaaaaatctttcagtagcacataaaaagttcccctctggccccttcccaagtaaaacttttaccgtagtgtttatgtcttgtttctaaatctcttcatagattccatcaacactccagatttaattatctcctcatagttgttattaagctctttttaatggcttcaactttgtatcagtatactgtatttataaactttgtaccacaagagagagtgtagcacccattttacagtgccatgcacatcagagaaagaaactgcatgtttgttgttgatgatgaaataaaaatgctagcgacagtctttcttactggtgcttaagctcttctttgcacaaagctttataaagggaattcaaaggaagccctttagaattagagtcttgagggacagcactaacaggcctttattaagtatgattgattgttaaatttcagggaacatgattggtctgctgtgtatttgaattcatgtaacaaagaactgttacgatgggattctgctcattttattaaaaagctactgacttgactgtcatcctgttcttgttagccattgtgaataagattttaatgttgataattctgttatttacatatctctaatttactttgaaattcaaaggtgaaaataaaaaatgatggcctaagtaaaatttacaaacat

SEQ ID NO: 366475 - DNA, 1954 bp, Homo sapiens
gaggcccgcagaggagcagcgagggggcgtagccggagctacggcaccaaggctccgcccccaccctgcctgccccctcgctggagcaacgcaagcaggaggcgggggagtcggaggaggtggcggcgctggagctcctcccggggaccagcgacccggggagcgagcacgtcgctccgcaccgctcttcctccagccgctgagccgtcccttctcgccatgtcccagagcaggcaccgcgccgaggccccgccgctggagcgcgaggacagtgggaccttcagtttggggaagatgataacagctaagccagggaaaacaccgattcaggtattacacgaatacggcatgaagaccaagaacatcccagtttatgaatgtgaaagatctgatgtgcaaatacacgtgcccactttcaccttcagagtaaccgttggtgacataacctgcacaggtgaaggtacaagtaagaagctggcgaaacatagagctgcagaggctgccataaacattttgaaagccaatgcaagtatttgataaaatgggaattactaagctgtaatcaggcctaaagtggcctgactttaatacagagactttctcacttctccatcacaattatttgggtagcttcggcatgcagcattctttgcagttcctgaccccttaatgcctgacccttccaagcaaccaaagaaccagcttaatcctattggttcattacaggaattggctattcatcatggctggagacttcctgaatataccctttcccaggagggaggacctgctcataagagagaatatactacaatttgcaggctagagtcatttatggaaactggaaagggggcatcaaaaaagcaagccaaaaggaatgctgctgagaaatttcttgccaaatttagtaatatttctccagagaaccacatttctttaacaaatgtagtaggacattctttaggatgtacttggcattccttgaggaattctcctggtgaaaagatcaacttactgaaaagaagcctccttagtattccaaatacagattacatccagctgcttagtgaaattgccaaggaacaaggttttaatataacatatttggatatagatgaactgagcgccaatggacaatatcaatgtcttgctgaactgtccaccagccccatcacagtctgtcatggctccggtatctcctgtggcaatgcacaaagtgatgcagctcacaatgctttgcagtatttaaagataatagcagaaagaaagtaaatctggagcaacttaaaaaatctttcagtagcacataaaaagttcccctctggccccttcccaagtaaaacttttaccgtagtgtttatgtcttgtttctaaatctcttcatagattccatcaacactccagatttaattatctcctcatagttgttattaagctctttttaatggcttcaactttgtatcagtatactgtatttataaactttgtaccacaagagagagtgtagcacccattttacagtgccatgcacatcagagaaagaaactgcatgtttgttgttgatgatgaaataaaaatgctagcgacagtctttcttactggtgcttaagctcttctttgcacaaagctttataaagggaattcaaaggaagccctttagaattagagtcttgagggacagcactaacaggcctttattaagtatgattgattgttaaatttcagggaacatgattggtctgctgtgtatttgaattcatgtaacaaagaactgttacgatgggattctgctcattttattaaaaagctactgacttgactgtcatcctgttcttgttagccattgtgaataagattttaatgttgataattctgttatttacatatctctaatttactttgaaattcaaaggtgaaaataaaaaatgatggcctaagtaaaatttacaaacat

SEQ ID NO: 366476 - DNA, 1817 bp, Homo sapiens
ttttctggatcattgttactcttccgttttttgtatagttgtaaccagagtattctttaaatacatttttatggcatccctattatgtacaaaacacccacaaagccttatgtaggtaagtgatacataggcccctacctcaaggagcttactgtctgaacaggggagaggtgtggtgaaggatggacaaattatatgtatttgtaagagtatataatttatggtaaaacaatttcaagaaaggattaaaccatgtgttataatgtttcaaagaagggagagattataaaccactggggtaaaaggataggcttcttggaggaagtgacatttgagatatatcttggatgaccgatcagattcccatagaagaggtctgagaaaagggcattccatgtagaaggaatgacaagagcaaagacatagagagttaattagaaaatgcttgtcatttatttcataattcgggggaaattattttgttttataacacttttaaaaaatatttagctttgcagttcctgaccccttaatgcctgacccttccaagcaaccaaagaaccagcttaatcctattggttcattacaggaattggctattcatcatggctggagacttcctgaatataccctttcccaggagggaggacctgctcataagagagaatatactacaatttgcaggctagagtcatttatggaaactggaaagggggcatcaaaaaagcaagccaaaaggaatgctgctgagaaatttcttgccaaatttagtaatatttctccagagaaccacatttctttaacaaatgtagtaggacattctttaggatgtacttggcattccttgaggaattctcctggtgaaaagatcaacttactgaaaagaagcctccttagtattccaaatacagattacatccagctgcttagtgaaattgccaaggaacaaggttttaatataacatatttggatatagatgaactgagcgccaatggacaatatcaatgtcttgctgaactgtccaccagccccatcacagtctgtcatggctccggtatctcctgtggcaatgcacaaagtgatgcagctcacaatgctttgcagtatttaaagataatagcagaaagaaagtaaatctggagcaacttaaaaaatctttcagtagcacataaaaagttcccctctggccccttcccaagtaaaacttttaccgtagtgtttatgtcttgtttctaaatctcttcatagattccatcaacactccagatttaattatctcctcatagttgttattaagctctttttaatggcttcaactttgtatcagtatactgtatttataaactttgtaccacaagagagagtgtagcacccattttacagtgccatgcacatcagagaaagaaactgcatgtttgttgttgatgatgaaataaaaatgctagcgacagtctttcttactggtgcttaagctcttctttgcacaaagctttataaagggaattcaaaggaagccctttagaattagagtcttgagggacagcactaacaggcctttattaagtatgattgattgttaaatttcagggaacatgattggtctgctgtgtatttgaattcatgtaacaaagaactgttacgatgggattctgctcattttattaaaaagctactgacttgactgtcatcctgttcttgttagccattgtgaataagattttaatgttgataattctgttatttacatatctctaatttactttgaaattcaaaggtgaaaataaaaaatgatggcctaagtaaaatttacaaacat

SEQ ID NO: 366477 - DNA, 1752 bp, Homo sapiens
taatcccagctgcttgggaggctgagacacgagaattccttggacccagtgggcagtggttgcagtgagctgggatcgcgccattgcactccagcctgggcgacagagcaagactctgtctccaaacaaacaaaaaaagacatgccaaatgacatggcaggtattgggttctcccccactggtgatggccatgctgtttctgtatagcctgaaggtgaacccaaccattaagtacatttgtagaaatgaggggtatggagtgtcctttctgcatcttggcactttgtcagcaaaaaaagctaacaaactttactatatttgtgcttcttgacagataaaatgggaattactaagctgtaatcaggcctaaagtggcctgactttaatacagagactttctcacttctccatcacaattatttgggtagcttcggcatgcagcattctttgcagttcctgaccccttaatgcctgacccttccaagcaaccaaagaaccagcttaatcctattggttcattacaggaattggctattcatcatggctggagacttcctgaatataccctttcccaggagggaggacctgctcataagagagaatatactacaatttgcaggctagagtcatttatggaaactggaaagggggcatcaaaaaagcaagccaaaaggaatgctgctgagaaatttcttgccaaatttagtaatatttctccagagaaccacatttctttaacaaatgtagtaggacattctttaggatgtacttggcattccttgaggaattctcctggtgaaaagatcaacttactgaaaagaagcctccttagtattccaaatacagattacatccagctgcttagtgaaattgccaaggaacaaggttttaatataacatatttggatatagatgaactgagcgccaatggacaatatcaatgtcttgctgaactgtccaccagccccatcacagtctgtcatggctccggtatctcctgtggcaatgcacaaagtgatgcagctcacaatgctttgcagtatttaaagataatagcagaaagaaagtaaatctggagcaacttaaaaaatctttcagtagcacataaaaagttcccctctggccccttcccaagtaaaacttttaccgtagtgtttatgtcttgtttctaaatctcttcatagattccatcaacactccagatttaattatctcctcatagttgttattaagctctttttaatggcttcaactttgtatcagtatactgtatttataaactttgtaccacaagagagagtgtagcacccattttacagtgccatgcacatcagagaaagaaactgcatgtttgttgttgatgatgaaataaaaatgctagcgacagtctttcttactggtgcttaagctcttctttgcacaaagctttataaagggaattcaaaggaagccctttagaattagagtcttgagggacagcactaacaggcctttattaagtatgattgattgttaaatttcagggaacatgattggtctgctgtgtatttgaattcatgtaacaaagaactgttacgatgggattctgctcattttattaaaaagctactgacttgactgtcatcctgttcttgttagccattgtgaataagattttaatgttgataattctgttatttacatatctctaatttactttgaaattcaaaggtgaaaataaaaaatgatggcctaagtaaaatttacaaacat

SEQ ID NO: 366478 - DNA, 2318 bp, Homo sapiens
gaggcccgcagaggagcagcgagggggcgtagccggagctacggcaccaaggctccgcccccaccctgcctgccccctcgctggagcaacgcaagcaggaggcgggggagtcggaggaggtggcggcgctggagctcctcccggggaccagcgacccggggagcgagcacgtcgctccgcaccgctcttcctccagccgctgagccgtcccttctcgccatgtcccagagcaggcaccgcgccgaggccccgccgctggagcgcgaggacagtgggaccttcaggtcagcgtgcgggcagtcagggccccagggccgggagcgttgggcggcagggccggggcgcggggagccggccctccagaggcattctgggtaaagccgtgcccggcgcccacgcctccgcggctgtgggtgctcggccccgccctctcggcggcgagggttggggtctgcggccgggccccgcccctctcgtggtccctggcggcgcgcggggcgggcggaggtgacgctcggtcggcgcgcccgggaagggatcgtcaggttttccctgagaggctgcggcgctgctgccagccctgttctgttgagaatctctcctacccgcattcaagtgctctctctaaagacctcgctcaccccgcctgctcctgcggagtgactgccgcagcggggccggaagacaggtgcgccccagcctcgccagctctggccctggcctccggggaactcggcgcctccctcgtcaccgtcggtggcggttaaaactggcctctacgcttctgcttcaatctccaatttggcatgcaaagcacacctttttgtggtttttgcagtttggggaagatgataacagctaagccagggaaaacaccgattcaggtattacacgaatacggcatgaagaccaagaacatcccagtttatgaatgtgaaagatctgatgtgcaaatacacgtgcccactttcaccttcagagtaaccgttggtgacataacctgcacaggtgaaggtacaagtaagaagctggcgaaacatagagctgcagaggctgccataaacattttgaaagccaatgcaagtatttggaattggctattcatcatggctggagacttcctgaatataccctttcccaggagggaggacctgctcataagagagaatatactacaatttgcaggctagagtcatttatggaaactggaaagggggcatcaaaaaagcaagccaaaaggaatgctgctgagaaatttcttgccaaatttagtaatatttctccagagaaccacatttctttaacaaatgtagtaggacattctttaggatgtacttggcattccttgaggaattctcctggtgaaaagatcaacttactgaaaagaagcctccttagtattccaaatacagattacatccagctgcttagtgaaattgccaaggaacaaggttttaatataacatatttggatatagatgaactgagcgccaatggacaatatcaatgtcttgctgaactgtccaccagccccatcacagtctgtcatggctccggtatctcctgtggcaatgcacaaagtgatgcagctcacaatgctttgcagtatttaaagataatagcagaaagaaagtaaatctggagcaacttaaaaaatctttcagtagcacataaaaagttcccctctggccccttcccaagtaaaacttttaccgtagtgtttatgtcttgtttctaaatctcttcatagattccatcaacactccagatttaattatctcctcatagttgttattaagctctttttaatggcttcaactttgtatcagtatactgtatttataaactttgtaccacaagagagagtgtagcacccattttacagtgccatgcacatcagagaaagaaactgcatgtttgttgttgatgatgaaataaaaatgctagcgacagtctttcttactggtgcttaagctcttctttgcacaaagctttataaagggaattcaaaggaagccctttagaattagagtcttgagggacagcactaacaggcctttattaagtatgattgattgttaaatttcagggaacatgattggtctgctgtgtatttgaattcatgtaacaaagaactgttacgatgggattctgctcattttattaaaaagctactgacttgactgtcatcctgttcttgttagccattgtgaataagattttaatgttgataattctgttatttacatatctctaatttactttgaaattcaaaggtgaaaataaaaaatgatggcctaagtaaaatttacaaacat

SEQ ID NO: 366479 - DNA, 2162 bp, Homo sapiens
catatatgtgcactgataaaagaaaaatgaacaagatgtagaggagtaagttatcatttgctttaaaagattgtgtgtgcttgcatatgcatagaacatttatgggaagatactgaaaaatgtttaacagtatgtctaagaaatagaacagaggtcttcagggaatgggtggtaaggaaaagagactgtactcttcattatatatttgttcttagtgcatgtatatttttaaccatgtaaatagtgttctttatttaaaaacagtattttaaagtttctataatgtaaatttttatttggtaaatctaataaattacttaattccatatcatgccatctctaaaatcttttggaaattgcctcccctctgtcgtgctcattaataaaacaatattaagagtagtaaccctacttacttcagaaagtagttgtttttattaatggcatatgaaagcaatttgagaaccataaactaatatggaaatataaggcattctaaggacagagatgaaaagggaaggatataggggaggataaaggaaagaggaaaagcagaaagaaaaaggaaaaaaatactcagttgggttctgggatagaagtctgataagaactttttgacatcctgtcatttatttgaatgacttgttcctcaaacccaacgcgcacatttcatgttttttttagtttttttttctgttttttttcctgtttgatagctgtcagttatagtgattggtatttaatacaaaaaaaaccaaagatatgaaaattgttctatattttaatctgcaaattgctccattaggcagatttaattatttgtggatttacttatggtgcttccagatatcttgtacctcttaatgtgaccatcagaaaacttgactgagaaacatttgtactatacaaaatacaaaatgctttcagtatattattgcaagtgcttcttaaaaacatatagtattgttaaatgtgtactttttaatgttgtcttgtttaaattggaaaattaaccaaatgttatccatttaaacatgctttataacatattaaatgtgagtgcttaataagtacttttaatgatactggtacgggtgttggaacccagtcctagtcaagagtctaaatcttcatctctgtttttcagacaaatgtagtaggacattctttaggatgtacttggcattccttgaggaattctcctggtgaaaagatcaacttactgaaaagaagcctccttagtattccaaatacagattacatccagctgcttagtgaaattgccaaggaacaaggttttaatataacatatttggatatagatgaactgagcgccaatggacaatatcaatgtcttgctgaactgtccaccagccccatcacagtctgtcatggctccggtatctcctgtggcaatgcacaaagtgatgcagctcacaatgctttgcagtatttaaagataatagcagaaagaaagtaaatctggagcaacttaaaaaatctttcagtagcacataaaaagttcccctctggccccttcccaagtaaaacttttaccgtagtgtttatgtcttgtttctaaatctcttcatagattccatcaacactccagatttaattatctcctcatagttgttattaagctctttttaatggcttcaactttgtatcagtatactgtatttataaactttgtaccacaagagagagtgtagcacccattttacagtgccatgcacatcagagaaagaaactgcatgtttgttgttgatgatgaaataaaaatgctagcgacagtctttcttactggtgcttaagctcttctttgcacaaagctttataaagggaattcaaaggaagccctttagaattagagtcttgagggacagcactaacaggcctttattaagtatgattgattgttaaatttcagggaacatgattggtctgctgtgtatttgaattcatgtaacaaagaactgttacgatgggattctgctcattttattaaaaagctactgacttgactgtcatcctgttcttgttagccattgtgaataagattttaatgttgataattctgttatttacatatctctaatttactttgaaattcaaaggtgaaaataaaaaatgatggcctaagtaaaatttacaaacat

SEQ ID NO: 366480 - DNA, 1267 bp, Homo sapiens
gcataacaaacaaagttatcaggtcagtaagaacatagtctagtatataataaaaaccgtgaggttctctgattaaacacagtacttcatacgtttgatcatcctctgtggacactaatttcttttctaaatctaccatttctttttctttgttcaggaaagggggcatcaaaaaagcaagccaaaaggaatgctgctgagaaatttcttgccaaatttagtaatatttctccagagaaccacatttctttaacaaatgtagtaggacattctttaggatgtacttggcattccttgaggaattctcctggtgaaaagatcaacttactgaaaagaagcctccttagtattccaaatacagattacatccagctgcttagtgaaattgccaaggaacaaggttttaatataacatatttggatatagatgaactgagcgccaatggacaatatcaatgtcttgctgaactgtccaccagccccatcacagtctgtcatggctccggtatctcctgtggcaatgcacaaagtgatgcagctcacaatgctttgcagtatttaaagataatagcagaaagaaagtaaatctggagcaacttaaaaaatctttcagtagcacataaaaagttcccctctggccccttcccaagtaaaacttttaccgtagtgtttatgtcttgtttctaaatctcttcatagattccatcaacactccagatttaattatctcctcatagttgttattaagctctttttaatggcttcaactttgtatcagtatactgtatttataaactttgtaccacaagagagagtgtagcacccattttacagtgccatgcacatcagagaaagaaactgcatgtttgttgttgatgatgaaataaaaatgctagcgacagtctttcttactggtgcttaagctcttctttgcacaaagctttataaagggaattcaaaggaagccctttagaattagagtcttgagggacagcactaacaggcctttattaagtatgattgattgttaaatttcagggaacatgattggtctgctgtgtatttgaattcatgtaacaaagaactgttacgatgggattctgctcattttattaaaaagctactgacttgactgtcatcctgttcttgttagccattgtgaataagattttaatgttgataattctgttatttacatatctctaatttactttgaaattcaaaggtgaaaataaaaaatgatggcctaagtaaaatttacaaacat

SEQ ID NO: 366481 - DNA, 2302 bp, Homo sapiens
gaggcccgcagaggagcagcgagggggcgtagccggagctacggcaccaaggctccgcccccaccctgcctgccccctcgctggagcaacgcaagcaggaggcgggggagtcggaggaggtggcggcgctggagctcctcccggggaccagcgacccggggagcgagcacgtcgctccgcaccgctcttcctccagccgctgagccgtcccttctcgccatgtcccagagcaggcaccgcgccgaggccccgccgctggagcgcgaggacagtgggaccttcaggtcagcgtgcgggcagtcagggccccagggccgggagcgttgggcggcagggccggggcgcggggagccggccctccagaggcattctgggtaaagccgtgcccggcgcccacgcctccgcggctgtgggtgctcggccccgccctctcggcggcgagggttggggtctgcggccgggccccgcccctctcgtggtccctggcggcgcgcggggcgggcggaggtgacgctcggtcggcgcgcccgggaagggatcgtcaggttttccctgagaggctgcggcgctgctgccagccctgttctgttgagaatctctcctacccgcattcaagtgctctctctaaagacctcgctcaccccgcctgctcctgcggagtgactgccgcagcggggccggaagacaggtgcgccccagcctcgccagctctggccctggcctccggggaactcggcgcctccctcgtcaccgtcggtggcggttaaaactggcctctacgcttctgcttcaatctccaatttggcatgcaaagcacacctttttgtggtttttgcagtttggggaagatgataacagctaagccagggaaaacaccgattcaggtattacacgaatacggcatgaagaccaagaacatcccagtttatgaatgtgaaagatctgatgtgcaaatacacgtgcccactttcaccttcagagtaaccgttggtgacataacctgcacaggtgaaggtacaagtaagaagctggcgaaacatagagctgcagaggctgccataaacattttgaaagccaatgcaagtatttgctttgcagttcctgaccccttaatgcctgacccttccaagcaaccaaagaaccagcttaatcctattggttcattacaggaattggctattcatcatggctggagacttcctgaatataccctttcccaggagggaggacctgctcataagagagaatatactacaatttgcaggctagagtcatttatggaaactgacaaatgtagtaggacattctttaggatgtacttggcattccttgaggaattctcctggtgaaaagatcaacttactgaaaagaagcctccttagtattccaaatacagattacatccagctgcttagtgaaattgccaaggaacaaggttttaatataacatatttggatatagatgaactgagcgccaatggacaatatcaatgtcttgctgaactgtccaccagccccatcacagtctgtcatggctccggtatctcctgtggcaatgcacaaagtgatgcagctcacaatgctttgcagtatttaaagataatagcagaaagaaagtaaatctggagcaacttaaaaaatctttcagtagcacataaaaagttcccctctggccccttcccaagtaaaacttttaccgtagtgtttatgtcttgtttctaaatctcttcatagattccatcaacactccagatttaattatctcctcatagttgttattaagctctttttaatggcttcaactttgtatcagtatactgtatttataaactttgtaccacaagagagagtgtagcacccattttacagtgccatgcacatcagagaaagaaactgcatgtttgttgttgatgatgaaataaaaatgctagcgacagtctttcttactggtgcttaagctcttctttgcacaaagctttataaagggaattcaaaggaagccctttagaattagagtcttgagggacagcactaacaggcctttattaagtatgattgattgttaaatttcagggaacatgattggtctgctgtgtatttgaattcatgtaacaaagaactgttacgatgggattctgctcattttattaaaaagctactgacttgactgtcatcctgttcttgttagccattgtgaataagattttaatgttgataattctgttatttacatatctctaatttactttgaaattcaaaggtgaaaataaaaaatgatggcctaagtaaaatttacaaacat

SEQ ID NO: 366482 - DNA, 801 bp, Homo sapiens
gaggcccgcagaggagcagcgagggggcgtagccggagctacggcaccaaggctccgcccccaccctgcctgccccctcgctggagcaacgcaagcaggaggcgggggagtcggaggaggtggcggcgctggagctcctcccggggaccagcgacccggggagcgagcacgtcgctccgcaccgctcttcctccagccgctgagccgtcccttctcgccatgtcccagagcaggcaccgcgccgaggccccgccgctggagcgcgaggacagtgggaccttcagtttggggaagatgataacagctaagccagggaaaacaccgattcaggtattacacgaatacggcatgaagaccaagaacatcccagtttatgaatgtgaaagatctgatgtgcaaatacacgtgcccactttcaccttcagagtaaccgttggtgacataacctgcacaggtgaaggtacaagtaagaagctggcgaaacatagagctgcagaggctgccataaacattttgaaagccaatgcaagtatttgctttgcagttcctgaccccttaatgcctgacccttccaagcaaccaaagaaccagcttaatcctattggttcattacaggaattggctattcatcatggctggagacttcctgaatataccctttcccaggagggaggacctgctcataagagagaatatactacaatttgcaggctagagtcatttatggaaactggtacttatttcttacaattaaaggcatttgaaatattttcagatgatgaatgactatcgaaatttctg

SEQ ID NO: 366483 - DNA, 1355 bp, Homo sapiens
gaggcccgcagaggagcagcgagggggcgtagccggagctacggcaccaaggctccgcccccaccctgcctgccccctcgctggagcaacgcaagcaggaggcgggggagtcggaggaggtggcggcgctggagctcctcccggggaccagcgacccggggagcgagcacgtcgctccgcaccgctcttcctccagccgctgagccgtcccttctcgccatgtcccagagcaggcaccgcgccgaggccccgccgctggagcgcgaggacagtgggaccttcaggtcagcgtgcgggcagtcagggccccagggccgggagcgttgggcggcagggccggggcgcggggagccggccctccagaggcattctgggtaaagccgtgcccggcgcccacgcctccgcggctgtgggtgctcggccccgccctctcggcggcgagggttggggtctgcggccgggccccgcccctctcgtggtccctggcggcgcgcggggcgggcggaggtgacgctcggtcggcgcgcccgggaagggatcgtcaggttttccctgagaggctgcggcgctgctgccagccctgttctgttgagaatctctcctacccgcattcaagtgctctctctaaagacctcgctcaccccgcctgctcctgcggagtgactgccgcagcggggccggaagacaggtgcgccccagcctcgccagctctggccctggcctccggggaactcggcgcctccctcgtcaccgtcggtggcggttaaaactggcctctacgcttctgcttcaatctccaatttggcatgcaaagcacacctttttgtggtttttgcagtttggggaagatgataacagctaagccagggaaaacaccgattcaggtattacacgaatacggcatgaagaccaagaacatcccagtttatgaatgtgaaagatctgatgtgcaaatacacgtgcccactttcaccttcagagtaaccgttggtgacataacctgcacaggtgaaggtacaagtaagaagctggcgaaacatagagctgcagaggctgccataaacattttgaaagccaatgcaagtatttgctttgcagttcctgaccccttaatgcctgacccttccaagcaaccaaagaaccagcttaatcctattggttcattacaggaattggctattcatcatggctggagacttcctgaatataccctttcccaggagggaggacctgctcataagagagaatatactacaatttgcaggctagagtcatttatggaaactggtacttatttcttacaattaaaggcatttgaaatattttcagatgatgaatgactatcgaaatttctg

SEQ ID NO: 366484 - DNA, 453 bp, Homo sapiens
cttcagaggtgtgacacggtctactttattaccatgttatataataaacatatataatgtagaaataaggatttttatgcaggtatgcatagaattatatagaactttaaaaagttattttttaaaattttttcacatggtgaatattttattacagtatataaccatgtagtatataacatgtacatatttttatgtacagtatataacgtacatatttttattacctagtatgtgtatgtaaaatctatagtgactttgttttgtgtattgaaaacatctttgtaagctgcacatttttgtgggagataaagacttctttttttaaatcttaattcaggtgaaggtacaagtaagaagctggcgaaacatagagctgcagaggctgccataaacattttgaaagccaatgcaagtatttggtgagctaaatttctttgtattcagcagctc

SEQ ID NO: 366485 - DNA, 1877 bp, Homo sapiens
gaggcccgcagaggagcagcgagggggcgtagccggagctacggcaccaaggctccgcccccaccctgcctgccccctcgctggagcaacgcaagcaggaggcgggggagtcggaggaggtggcggcgctggagctcctcccggggaccagcgacccggggagcgagcacgtcgctccgcaccgctcttcctccagccgctgagccgtcccttctcgccatgtcccagagcaggcaccgcgccgaggccccgccgctggagcgcgaggacagtgggaccttcagtttggggaagatgataacagctaagccagggaaaacaccgattcaggtattacacgaatacggcatgaagaccaagaacatcccagtttatgaatgtgaaagatctgatgtgcaaatacacgtgcccactttcaccttcagagtaaccgttggtgacataacctgcacaggtgaaggtacaagtaagaagctggcgaaacatagagctgcagaggctgccataaacattttgaaagccaatgcaagtatttgctttgcagttcctgaccccttaatgcctgacccttccaagcaaccaaagaaccagcttaatcctattggttcattacaggaattggctattcatcatggctggagacttcctgaatataccctttcccaggagggaggacctgctcataagagagaatatactacaatttgcaggctagagtcatttatggaaactggaaagggggcatcaaaaaagcaagccaaaaggaatgctgctgagaaatttcttgccaaatttagtaatatttctccagagaaccacatttctttaacaaatgtagtaggacattctttaggatgtacttggcattccttgaggaattctcctggtgaaaagatcaacttactgaaaagaagcctccttagtattccaaatacagattacatccagctgcttagtgaaattgccaaggaacaaggttttaatataacatatttggatatagatgaactgagcgccaatggacaatatcaatgtcttgctgaactgtccaccagccccatcacagtctgtcatggctccggtatctcctgtggcaatgcacaaagtgatgcagctcacaatgctttgcagtatttaaagataatagcagaaagaaagtaaatctggagcaacttaaaaaatctttcagtagcacataaaaagttcccctctggccccttcccaagtaaaacttttaccgtagtgtttatgtcttgtttctaaatctcttcatagattccatcaacactccagatttaattatctcctcatagttgttattaagctctttttaatggcttcaactttgtatcagtatactgtatttataaactttgtaccacaagagagagtgtagcacccattttacagtgccatgcacatcagagaaagaaactgcatgtttgttgttgatgatgaaataaaaatgctagcgacagtctttcttactggtgcttaagctcttctttgcacaaagctttataaagggaattcaaaggaagccctttagaattagagtcttgagggacagcactaacaggcctttattaagtatgattgattgttaaatttcagggaacatgattggtctgctgtgtatttgaattcatgtaacaaagaactgttacgatgggattctgctcattttattaaaaagctactgacttgactgtcatcctgttcttgttagccattgtgaataagattttaatgttgataattctgttatttacatatctctaatttactttgaaattcaaaggtgaaaataaaaaatgatggcctaagtaaaatttacaaacatacatgtaatgggttacttccttactttctctaag

SEQ ID NO: 366486 - DNA, 2397 bp, Homo sapiens
gaggcccgcagaggagcagcgagggggcgtagccggagctacggcaccaaggctccgcccccaccctgcctgccccctcgctggagcaacgcaagcaggaggcgggggagtcggaggaggtggcggcgctggagctcctcccggggaccagcgacccggggagcgagcacgtcgctccgcaccgctcttcctccagccgctgagccgtcccttctcgccatgtcccagagcaggcaccgcgccgaggccccgccgctggagcgcgaggacagtgggaccttcaggtcagcgtgcgggcagtcagggccccagggccgggagcgttgggcggcagggccggggcgcggggagccggccctccagaggcattctgggtaaagccgtgcccggcgcccacgcctccgcggctgtgggtgctcggccccgccctctcggcggcgagggttggggtctgcggccgggccccgcccctctcgtggtccctggcggcgcgcggggcgggcggaggtgacgctcggtcggcgcgcccgggaagggatcgtcaggttttccctgagaggctgcggcgctgctgccagccctgttctgttgagaatctctcctacccgcattcaagtgctctctctaaagacctcgctcaccccgcctgctcctgcggagtgactgccgcagcggggccggaagacaggtgcgccccagcctcgccagctctggccctggcctccggggaactcggcgcctccctcgtcaccgtcggtggcggttaaaactggcctctacgcttctgcttcaatctccaatttggcatgcaaagcacacctttttgtggtttttgcagtttggggaagatgataacagctaagccagggaaaacaccgattcaggtattacacgaatacggcatgaagaccaagaacatcccagtttatgaatgtgaaagatctgatgtgcaaatacacgtgcccactttcaccttcagagtaaccgttggtgacataacctgcacaggtgaaggtacaagtaagaagctggcgaaacatagagctgcagaggctgccataaacattttgaaagccaatgcaagtatttgctttgcagttcctgaccccttaatgcctgacccttccaagcaaccaaagaaccagcttaatcctattggttcattacaggaattggctattcatcatggctggagacttcctgaatataccctttcccaggagggaggacctgctcataagagagaatatactacaatttgcaggctagagtcatttatggaaactggaaagggggcatcaaaaaagcaagccaaaaggaatgctgctgagaaatttcttgccaaatttagtaatatttctccagagaaccacatttctttaacaaatgtagtaggacattctttaggatgtacttggcattccttgaggaattctcctggtgaaaagatcaacttactgaaaagaagcctccttagtattccaaatacagattacatccagctgcttagtgaaattgccaaggaacaaggttttaatataacatatttggatatagatgaactgagcgccaatggacaatatcaatgtcttgctgaactgtccaccagccccatcacagtctgtcatggctccggtatctcctgtggcaatgcacaaagtgatgcagctcacaatgctttgcagtatttaaagataatagcagaaagaaagtaaatctggagcaacttaaaaaatctttcagtagcacataaaaagttcccctctggccccttcccaagtaaaacttttaccgtagtgtttatgtcttgtttctaaatctcttcatagattccatcaacactccagatttaattatctcctcatagttgttattaagctctttttaatggcttcaactttgtatcagtatactgtatttataaactttgtaccacaagagagagtgtagcacccattttacagtgccatgcacatcagagaaagaaactgcatgtttgttgttgatgatgaaataaaaatgctagcgacagtctttcttactggtgcttaagctcttctttgcacaaagctttataaagggaattcaaaggaagccctttagaattagagtcttgagggacagcactaacaggcctttattaagtatgattgattgttaaatttcagggaacatgattggtctgctgtgtatttgaattcatgtaacaaagaactgttacgatgggattctgctcattttattaaaaagctactgacttgactgtcatcctgttcttgttagccattgtgaataagattttaatgttgataattctgttatttacatatctctaatttactttgaaattcaaaggtgaaaataaaaaatgatggcctaagtaaaatttacaaacat

SEQ ID NO: 366487 - DNA, 1673 bp, Homo sapiens
gaggcccgcagaggagcagcgagggggcgtagccggagctacggcaccaaggctccgcccccaccctgcctgccccctcgctggagcaacgcaagcaggaggcgggggagtcggaggaggtggcggcgctggagctcctcccggggaccagcgacccggggagcgagcacgtcgctccgcaccgctcttcctccagccgctgagccgtcccttctcgccatgtcccagagcaggcaccgcgccgaggccccgccgctggagcgcgaggacagtgggaccttcaggtgaaggtacaagtaagaagctggcgaaacatagagctgcagaggctgccataaacattttgaaagccaatgcaagtatttgctttgcagttcctgaccccttaatgcctgacccttccaagcaaccaaagaaccagcttaatcctattggttcattacaggaattggctattcatcatggctggagacttcctgaatataccctttcccaggagggaggacctgctcataagagagaatatactacaatttgcaggctagagtcatttatggaaactggaaagggggcatcaaaaaagcaagccaaaaggaatgctgctgagaaatttcttgccaaatttagtaatatttctccagagaaccacatttctttaacaaatgtagtaggacattctttaggatgtacttggcattccttgaggaattctcctggtgaaaagatcaacttactgaaaagaagcctccttagtattccaaatacagattacatccagctgcttagtgaaattgccaaggaacaaggttttaatataacatatttggatatagatgaactgagcgccaatggacaatatcaatgtcttgctgaactgtccaccagccccatcacagtctgtcatggctccggtatctcctgtggcaatgcacaaagtgatgcagctcacaatgctttgcagtatttaaagataatagcagaaagaaagtaaatctggagcaacttaaaaaatctttcagtagcacataaaaagttcccctctggccccttcccaagtaaaacttttaccgtagtgtttatgtcttgtttctaaatctcttcatagattccatcaacactccagatttaattatctcctcatagttgttattaagctctttttaatggcttcaactttgtatcagtatactgtatttataaactttgtaccacaagagagagtgtagcacccattttacagtgccatgcacatcagagaaagaaactgcatgtttgttgttgatgatgaaataaaaatgctagcgacagtctttcttactggtgcttaagctcttctttgcacaaagctttataaagggaattcaaaggaagccctttagaattagagtcttgagggacagcactaacaggcctttattaagtatgattgattgttaaatttcagggaacatgattggtctgctgtgtatttgaattcatgtaacaaagaactgttacgatgggattctgctcattttattaaaaagctactgacttgactgtcatcctgttcttgttagccattgtgaataagattttaatgttgataattctgttatttacatatctctaatttactttgaaattcaaaggtgaaaataaaaaatgatggcctaagtaaaatttacaaacat

SEQ ID NO: 366488 - DNA, 2446 bp, Homo sapiens
gaggcccgcagaggagcagcgagggggcgtagccggagctacggcaccaaggctccgcccccaccctgcctgccccctcgctggagcaacgcaagcaggaggcgggggagtcggaggaggtggcggcgctggagctcctcccggggaccagcgacccggggagcgagcacgtcgctccgcaccgctcttcctccagccgctgagccgtcccttctcgccatgtcccagagcaggcaccgcgccgaggccccgccgctggagcgcgaggacagtgggaccttcaggtcagcgtgcgggcagtcagggccccagggccgggagcgttgggcggcagggccggggcgcggggagccggccctccagaggcattctgggtaaagccgtgcccggcgcccacgcctccgcggctgtgggtgctcggccccgccctctcggcggcgagggttggggtctgcggccgggccccgcccctctcgtggtccctggcggcgcgcggggcgggcggaggtgacgctcggtcggcgcgcccgggaagggatcgtcaggttttccctgagaggctgcggcgctgctgccagccctgttctgttgagaatctctcctacccgcattcaagtgctctctctaaagacctcgctcaccccgcctgctcctgcggagtgactgccgcagcggggccggaagacaggtgcgccccagcctcgccagctctggccctggcctccggggaactcggcgcctccctcgtcaccgtcggtggcggttaaaactggcctctacgcttctgcttcaatctccaatttggcatgcaaagcacacctttttgtggtttttgcagtttggggaagatgataacagctaagccagggaaaacaccgattcaggtattacacgaatacggcatgaagaccaagaacatcccagtttatgaatgtgaaagatctgatgtgcaaatacacgtgcccactttcaccttcagagtaaccgttggtgacataacctgcacaggtgaaggtacaagtaagaagctggcgaaacatagagctgcagaggctgccataaacattttgaaagccaatgcaagtatttggtgagctaaatttctttgtattcagcagctcaaaaatatcatggctgagctttgcagttcctgaccccttaatgcctgacccttccaagcaaccaaagaaccagcttaatcctattggttcattacaggaattggctattcatcatggctggagacttcctgaatataccctttcccaggagggaggacctgctcataagagagaatatactacaatttgcaggctagagtcatttatggaaactggaaagggggcatcaaaaaagcaagccaaaaggaatgctgctgagaaatttcttgccaaatttagtaatatttctccagagaaccacatttctttaacaaatgtagtaggacattctttaggatgtacttggcattccttgaggaattctcctggtgaaaagatcaacttactgaaaagaagcctccttagtattccaaatacagattacatccagctgcttagtgaaattgccaaggaacaaggttttaatataacatatttggatatagatgaactgagcgccaatggacaatatcaatgtcttgctgaactgtccaccagccccatcacagtctgtcatggctccggtatctcctgtggcaatgcacaaagtgatgcagctcacaatgctttgcagtatttaaagataatagcagaaagaaagtaaatctggagcaacttaaaaaatctttcagtagcacataaaaagttcccctctggccccttcccaagtaaaacttttaccgtagtgtttatgtcttgtttctaaatctcttcatagattccatcaacactccagatttaattatctcctcatagttgttattaagctctttttaatggcttcaactttgtatcagtatactgtatttataaactttgtaccacaagagagagtgtagcacccattttacagtgccatgcacatcagagaaagaaactgcatgtttgttgttgatgatgaaataaaaatgctagcgacagtctttcttactggtgcttaagctcttctttgcacaaagctttataaagggaattcaaaggaagccctttagaattagagtcttgagggacagcactaacaggcctttattaagtatgattgattgttaaatttcagggaacatgattggtctgctgtgtatttgaattcatgtaacaaagaactgttacgatgggattctgctcattttattaaaaagctactgacttgactgtcatcctgttcttgttagccattgtgaataagattttaatgttgataattctgttatttacatatctctaatttactttgaaattcaaaggtgaaaataaaaaatgatggcctaagtaaaatttacaaacat

SEQ ID NO: 366489 - DNA, 1469 bp, Homo sapiens
gaggcccgcagaggagcagcgagggggcgtagccggagctacggcaccaaggctccgcccccaccctgcctgccccctcgctggagcaacgcaagcaggaggcgggggagtcggaggaggtggcggcgctggagctcctcccggggaccagcgacccggggagcgagcacgtcgctccgcaccgctcttcctccagccgctgagccgtcccttctcgccatgtcccagagcaggcaccgcgccgaggccccgccgctggagcgcgaggacagtgggaccttcagtttggggaagatgataacagctaagccagggaaaacaccgattcaggtattacacgaatacggcatgaagaccaagaacatcccagtttatgaatgtgaaagatctgatgtgcaaatacacgtgcccactttcaccttcagagtaaccgttggtgacataacctgcacaggtgaaggtacaagtaagaagctggcgaaacatagagctgcagaggctgccataaacattttgaaagccaatgcaagtatttgctttgcagttcctgaccccttaatgcctgacccttccaagcaaccaaagaaccagcttaatcctattggttcattacaggaattggctattcatcatggctggagacttcctgaatataccctttcccaggagggaggacctgctcataagagagaatatactacaatttgcaggctagagtcatttatggaaactggaaagggggcatcaaaaaagcaagccaaaaggaatgctgctgagaaatttcttgccaaatttagtaatatttctccagagaaccacatttctttaacaaatgtagtaggacattctttaggatgtacttggcattccttgaggaattctcctggtgaaaagatcaacttactgaaaagaagcctccttagtattccaaatacagattacatccagctgcttagtgaaattgccaaggaacaaggttttaatataacatatttggatatagatgaactgagcgccaatggacaatatcaatgtcttgctgaactgtccaccagccccatcacagtctgtcatggctccggtatctcctgtggcaatgcacaaagtgatgcagctcacaatgctttgcagtatttaaagataatagcagaaagaaagtaaatctggagcaacttaaaaaatctttcagtagcacataaaaagttcccctctggccccttcccaagtaaaacttttaccgtagtgtttatgtcttgtttctaaatctcttcatagattccatcaacactccagattatatctcttctagtgtataagcttttaaggtcactggtcgtacgttttaacttggcccaggagggtggccattgggcgcgcttaaacggggtgggggggaaaaggcggaggctgggggactgcagataggaaggcaatgggccctttttgaaggggtgtaaagctacaggggg

SEQ ID NO: 366490 - DNA, 1646 bp, Homo sapiens
gaggcccgcagaggagcagcgagggggcgtagccggagctacggcaccaaggctccgcccccaccctgcctgccccctcgctggagcaacgcaagcaggaggcgggggagtcggaggaggtggcggcgctggagctcctcccggggaccagcgacccggggagcgagcacgtcgctccgcaccgctcttcctccagccgctgagccgtcccttctcgccatgtcccagagcaggcaccgcgccgaggccccgccgctggagcgcgaggacagtgggaccttcagtttggggaagatgataacagctaagccagggaaaacaccgattcaggtattacacgaatacggcatgaagaccaagaacatcccagtttatgaatgtgaaagatctgatgtgcaaatacacgtgcccactttcaccttcagagtaaccgttggtgacataacctgcacaggtgaaggtacaagtaagaagctggcgaaacatagagctgcagaggctgccataaacattttgaaagccaatgcaagtatttgctttgcagttcctgaccccttaatgcctgacccttccaagcaaccaaagaaccagcttaatcctattggttcattacaggaattggctattcatcatggctggagacttcctgaatataccctttcccaggagggaggacctgctcataagagagaatatactacaatttgcaggctagagtcatttatggaaactggaaagggggcatcaaaaaagcaagccaaaaggaatgctgctgagaaatttcttgccaaatttagtaatatttctccagagaaccacatttctttaacaaatgtagtaggacattctttaggatgtacttggcattccttgaggaattctcctggtgaaaagatcaacttactgaaaagaagcctccttagtattccaaatacagattacatccagctgcttagtgaaattgccaaggaacaaggttttaatataacatatttggatataggtatgatttttttttctttggctttcccaagacatgtttatttaaaaatgtgtttgaggaacaaaaatgtgtttgaggaataaaaatttctattacaatttattttattgatcagggattctaagtatatataattactaggccagtaatatatataattgatatgtcccattcttgtggatagtaataatagctaacatctatacagttataacaaaaacaacaatagcaaagatagagttttactgtgtgccagacactgttctaagattacacgtatctacttactgaatcctcagactaactctatgaagcaaattctgttatccttatttataagtaaaggaagaaaggcacagaaaggttgagaaacttgcccaagatcacatagctagtcagcggtagagcaagatttggggaagagtcccagaagataccctggctgttaaactagccctgctgggcaaatgaaaaggcacctacatttctagcacaagtacaagtttgtggtgcccagaccttttctctctactttgtcactgtatgctgattctgggaggtaaatggaaccaagtcaatttatagttttatcccatctcagccatcatcatctgtattttctctagcccttaatcatttggat

SEQ ID NO: 366491 - DNA, 1024 bp, Homo sapiens
gaggcccgcagaggagcagcgagggggcgtagccggagctacggcaccaaggctccgcccccaccctgcctgccccctcgctggagcaacgcaagcaggaggcgggggagtcggaggaggtggcggcgctggagctcctcccggggaccagcgacccggggagcgagcacgtcgctccgcaccgctcttcctccagccgctgagccgtcccttctcgccatgtcccagagcaggcaccgcgccgaggccccgccgctggagcgcgaggacagtgggaccttcagtttggggaagatgataacagctaagccagggaaaacaccgattcaggtattacacgaatacggcatgaagaccaagaacatcccagtttatgaatgtgaaagatctgatgtgcaaatacacgtgcccactttcaccttcagagtaaccgttggtgacataacctgcacaggtgaaggtacaagtaagaagctggcgaaacatagagctgcagaggctgccataaacattttgaaagccaatgcaagtatttgctttgcagttcctgaccccttaatgcctgacccttccaagcaaccaaagaaccagcttaatcctattggttcattacaggtaagttgtacagttctttgcctactgatgaaatatataataagtttgtaatgtcagaggggctaacacaaggaattaatattttaaagacaagatagtgatatattttgttttccaacttacgatcattagattaacagagctaacttgaaattattttcctatttatgttctgggttttctttcatatacagtatttgcctttggcttatagaattctcatttaagatcaacaggccctcagtgcacatgggtaaagtgttttatactttaagaatagttcttgctactcttgtgacaaatctctttctacttctgttgagacagaagactttatagagagcctaaatcaaatcagtgaacctaactgaagaaaaggagtctatttgcttattctaccaaaaaaaaa

SEQ ID NO: 366492 - DNA, 888 bp, Homo sapiens
ggctggcctggacgaacgggaagccgggagctcggccacgggtggcgaggctgcggtgaggcctggtctccggctgccagaccatgctgagtggagcacgctgcaggctcgcctcagcgctgcggggaacgcgcgcgccgccgtccgcggtcgcccgtaggtgcctgcacgcgtcggggtcgcggcctttggccggaccggggcaagaagactgaggagccgccccgcgacttcgatccggcgctgctggagttcctggtgtgcccgctctccaagaagccgctcaggtaactcgctggccttggcccttcctttgcagcctcccggtgggcggaaagggagcggtggaccgcggcctcttgcagccactggggccttgtaggtcggtcaggtactctccgctgccacattctggactctgtcctcgccgggcgcacagcgggcaggacgggggagaccggaggccaggggagctgcgtcccacatctcccagaacgcaacgccagcctgcgggaatggctcgaagcgttttagggttcgcgaccggctgcgcattgcaatcacccggggaccgttttaaaaatgccgattccccgacagcccccaagacgggcagacttggaatgctcgcgggatgggacctgaacatttgtatttcttttcctttatttatatccttttaagagacagggtgccccctacgttgcccagactggccttaagaactcccgcctcagcctcctcaggagtcgagagacaggcgccgcccccaggcccagctaatctgtgttcttaaaagggtccctaaatgatttctaatgtaccaccaggtttatgaaccactgcgattcaggacaagtccgaagccttccggtttttaagccaaga

SEQ ID NO: 366493 - DNA, 1331 bp, Homo sapiens
ggctggcctggacgaacgggaagccgggagctcggccacgggtggcgaggctgcggtgaggcctggtctccggctgccagaccatgctgagtggagcacgctgcaggctcgcctcagcgctgcggggaacgcgcgcgccgccgtccgcggtcgcccgtaggtgcctgcacgcgtcggggtcgcggcctttggccggaccggggcaagaagactgaggagccgccccgcgacttcgatccggcgctgctggagttcctggtgtgcccgctctccaagaagccgtcagatatgaagcatcaacaaacgaattgattaatgaagagttgggaatagcttatccaatcattgatgggatccctaatatgataccacaggcagctaggatgacacgtcaaagtaagaagcaagaagaagtggagcagcgctagttcataatttaaaaaaattaaaaaaacgcaacagccaacttttcttaataccatataccttttaaaacacagtggcaggtaataagtggaagagaagaatgtttctgtctcttcctacgttgactgttcttattccactggtttctttagcaggactgttctactcagcctctgtggaagaaaacttcccacagggctgcactagcacagccagcctttgcttttacagcctgctcttgcctattaccataccagtgtatgtattcttccacctttggacttggatgggtattaaactcttcaggcataattgatgcaactagagtcaatatgctgtatatattaatgatagctcttgggcatcgatctctgaaagctcaaatggatggaatttagtttgcgggaaagaggctttgctttgcgcatatcaggcttaggactgtgggaggcttaagttgcagatgcttcttttattgtactcttgttctgcccttgttttttgaaggctctgacttataactgctgtatcagaagaaacattttgacagtgtcttggttggagatgaacatccctaattgacatgtgatgactatttcttattccattcatctaagagtcattgaaattttgttttgcttgtttgtttagcttcaaggtctttggtaaagtcacatgttaaggatgactgaaataattccaaaggagtgatgttggaatagtccctctaagggagagaaatgcatttgaacgaatgtgatataaaaccacataatcaaatagaaacttcatgtacttacaaaaactgagtttgtaaaattaccttcatttctttgacattaaatgcttatattagcaataaacatgttgacactttcctataaaaaataaaccagtttgcagta

SEQ ID NO: 366494 - DNA, 794 bp, Homo sapiens
ggctggcctggacgaacgggaagccgggagctcggccacgggtggcgaggctgcggtgaggcctggtctccggctgccagaccatgctgagtggagcacgctgcaggctcgcctcagcgctgcggggaacgcgcgcgccgccgtccgcggtcgcccgtaggtgcctgcacgcgtcggggtcgcggcctttggccggaccggggcaagaagactgaggagccgccccgcgacttcgatccggcgctgctggagttcctggtgtgcccgctctccaagaagccgtcagatatgaagcatcaacaaacgaattgattaatgaagagttgggaatagcttatccaatcattgatgggatccctaatatgataccacaggcagctaggatgacacgtcaaagctctgacttataactgctgtatcagaagaaacattttgacagtgtcttggttggagatgaacatccctaattgacatgtgatgactatttcttattccattcatctaagagtcattgaaattttgttttgcttgtttgtttagcttcaaggtctttggtaaagtcacatgttaaggatgactgaaataattccaaaggagtgatgttggaatagtccctctaagggagagaaatgcatttgaacgaatgtgatataaaaccacataatcaaatagaaacttcatgtacttacaaaaactgagtttgtaaaattaccttcatttctttgacattaaatgcttatattagcaataaacatgttgacactttcctataaaaaataaaccagtttgcagta

SEQ ID NO: 366495 - DNA, 445 bp, Homo sapiens
actttacagagattatcttgtctagtcccgtcagaaccctataaggtagataggtgtcattagtaaaaatggcttgtattttacttaggagtgtgttttttgtacttgtatgaaagtacagatatatttacatctgagactttattgaaaatgaaatattgaaatcacacatgtatgacttggtttgggaataactggttgtatttggttccccataccattttctggtcatctatctgtatgctgtccatctgtttgtcacctggtatcacaggaaataccagacttttcttgttttttgtaattaggtaaaggcaaaataatagcaaaagctgagagctaaagcagtgaattgaacagcacccaatatagcctgttaatttgcacactggtttataatggagctattgcagcagtgagaggcttctgaggataatcgggttgt

SEQ ID NO: 366496 - DNA, 478 bp, Homo sapiens
ggtggtgcaatcatagctcactgaagccttgaactcctgtgctcaagaaatcctcccacctcagcttcccaaatgtctggggctacaggcatgcaccatcacacttggctaattttttttttatttttgtagagacagggtctcaccatgttgtcaagactggtcttgaactcctggtctcaagcaatcctcctgcctcagccttccaaagtaccgggattacaggcatgacccactacactcagccccactggtggtcttttcacatggattatcatctaaatactccatttcttccagcctcaagaatagtctaacagagagccgacagagtgagtctagtgggctttccacacatgagtgaccactcttcagttgatatggtcaagcacaccactttacctcctgacctcaggtgcaattagcttccaaatattccacatgctccagtggacctttctaattgtaagcatccccc

SEQ ID NO: 366497 - DNA, 6258 bp, Homo sapiens
  misc_feature (4408)..(4408): n is a, c, g, or t
ggcggccgccgtcggggccaagccggggccccgaagccagagccggagccgggcgggccgcggggtcatggctgggccgcggggcgcgctgctggcctggtgccgccgccagtgcgagggctaccgcggcgtggagatccgcgacctgagcagctccttccgggacggcctggccttctgcgccatcctgcaccggcaccggcccgacctgctagattttgattcgctttccaaggacaatgtcttcgagaataaccgtttggcctttgaagtggctgagaaggagctggggatccccgctctcctggaccccaatgacatggtctccatgagcgtccctgactgcctcagcatcatgacctatgtgtcccagtattacaaccacttctgcagtcctggccaagctggtgtctcgccacccagaaagggccttgcaccctgttccccgccgtctgtagcacccactccagtggaaccagaagatgtggctcagggcgaggagctctcctcaggcagcctgtcagagcagggcaccggccagacccccagcagcacgtgcgcagcctgccagcagcatgtgcacttggtgcagcgctacctggctgacggcaggctgtaccatcgccactgcttccggtgtcggcggtgctccagcaccctgctccctggggcttatgagaatgggcctgaggagggcacctttgtgtgtgcagaacactgtgccaggctgggcccggggacacggtcggggaccaggcctgggcccttctcacagccaaagcagcagcaccagcagcaactcgcagaagatgccaaggatgttccaggaggcggccccagctccagtgctcctgcaggggctgaggccgatggacccaaggccagccctgaggcccggccgcagatccctaccaagccccgggttcctggcaaactacaggagctggccagcccccctgcgggccgccccacccctgcccccaggaaggcctctgagagcaccaccccagcaccccccacgccccggccccgctccagtctgcagcaggagaacctggtggagcaggctggcagcagcagcctggtgaacgggagactgcacgaactgcctgtccccaagccgagggggacaccgaagccgtccgaggggacaccagcccccaggaaggaccccccatggatcacgctggtgcaggcagaaccaaagaagaagccagccccacttcccccaagcagcagcccggggccaccaagccaggacagcaggcaggtggagaatggaggcaccgaggaggtggcccagccgagcccaacggcagcctggagtccaaaccctataacccctttgaggaggaggaggaggacaaggaggaagaggctccagctgcacccagcctggccaccagccctgccctgggccacccggagtccacacccaagtccctgcacccctggtacggcatcacccctaccagcagccccaagacaaagaagcgccctgccccgcgcgcacccagcgcgtccccactggctctccacgcctcccgcctctcgcactcggagccgccctcggccacaccatcgccagcgctcagcgtggagagcctgtcgtctgagagcgccagccagactgcaggtgcagagcttctggagccgccagctgtgcccaagagctcctcagagcctgctgtccatgcccctggtacccctggaaaccctgtcagcctctctaccaactcctccctggcctcctctggggaactagtggagcctagagtggaacaaatgcctcaagccagccctggccttgcccccaggaccaggggcagctcaggtccccagccagccaagccctgcagtggcgccaccccaacgcctctcttgttggttggagacaggagcccggtgccttcccctggaagctcgtccccacagctgcaggtaaagtcctcctgcaaggagaatccttttaaccggaagccatcacctgcagcgtccccagccacaaagaaggccaccaagggatccaagccagtgaggccacctgcccctggacacggctttccactcatcaaacgcaaggtccaggctgaccagtacatccctgaggaggacatccatggagagatggataccattgagcgccggctggatgccctggagcaccgtggggtgctgctggaggagaagctgcgtggcggcctgaatgagggccgtgaggatgacatgctggtggactggttcaagctcatccacgagaagcacctactggtgcggcgagagtccgagctcatctatgtcttcaagcagcagaacctggagcagcgccaggctgatgtcgagtatgagctccggtgcctcctcaataagccagaaaaggactggacggaggaggaccgggcccgggagaaggtgctgatgcaggagcttgtgaccctcattgagcagcgcaacgctatcatcaactgcctggatgaggaccggcagagggaggaagaggaagacaagatgttggaagccatgatcaagaagaaagagttccagagggaggctgaacctgagggcaagaagaaggggaagttcaagaccatgaagatgttgaaactgctaggaaacaaacgtgatgccaagagcaagtcccccagagacaagagctaacagcacgagaagccagttggggactgccccctcctggagcagctcctgggctgtgctctgtttgaagggggcgccctgctcccctcagatcagtcaggaggaagatgactaaggggagggatcctctgggtgatggcctcttcctcctcagggacctctgactgctctgggccaaagaatctcttgtttcttctccgagccccaggcagcggtgattcagccctgcccaacctgattctgatgactgcggatgctgtgacggacccaaggggcaaatagggtcccagggtccagggaggggcgcctgctgagcacttccgcccctcaccctgcccagcccctgccatgagctctgggctgggtctccgcctccagggttctgctcttccaggcaggccagcaagtggcgctgggccacactggcttcttcctgccccatccctggctctgagtctctgtcttcctgtcctgtgcaggcgcccttggatctcagtttccctcactcaggaactctgtttctgaagtcttcagttaagtttgagtttatgactgagtggcctgtactgtcagacgtgaatgggcctgacgggcaaatccatccctctctccctcacagttccaggagcggcttccctcgtctccccttactccacagggagcctcccttgccaggaccagggctgcgacggccatgctggggcaggtgagtgctctgttagctgctcccagtgctgtccccaggctgcagttctggtccctggttgtcaggtaggaagggtgcacttgaagcaggtgctcatctcggttccttaacgtttatagtctgacccctcacttaggctttcctctgccaccccggtccagggaagaggctcgctcccgcccatggtcatcactggtctgtctgctctgttgtctgttctttccctgactccctcccaccgaaggcctgatggctactcacccctctgggatggctatgggagaggaggagtgatggggaccgccaccttttctgcaggaaatgtgcccagcagctcttggtcaaagcactgttgctataagctatctctgggatgcctctaggcccccttccctctacacacctctgggaaaagattacactgtattaactctcgaggagtttcctcaccaataaacagacaacctcaactgccagtgccctgcagcctcgggccacagcggcagccttgtttgccttcccacctgcctctgccacacctggtggctgaacatctctggtcgcccagaggccatgttggggccatcctccaagagggatctctgccctcaccgcctgccactgggcaggatccctttcctctgcagggagaggtggctcctcggccatgcagcccctggcaggctccttctaaacatgcctgttgacctggagctggcgccaccaactccagggcctttccagggccagacaggtaacacgcatgaacccgagtgacagctctgacgggctgtttcggtgtcaggagacaaagctggcaggggcaggggtgaactggaggcaagtcaagtcacctgtggcctgtggggctgaatgtgggcccggtgttgccagatcctttgtcataagaagctagaaatccagattttatgtgtgtgtaatttgtaaatgctgaaagctagcctgaattttttttttttttttgagacagagtctcgctctgtcgcccaggctggagtgcagtggcgcgatctcagctcactgcangctccgcctcctgggttcacgccatcctcctgcctcggcctcctgagcagctgggactacaggcgcatgctacgacgcctggctaattttttgtatttttagtagagacggggtttcaccgtgttaaccaggatggtctcgatctcctgaccttgtgatccacccaccttggcctcccaaagtgctgggattacaggcgtgagccaccacgcccggccactagcctgaatttcaatcaagggttggctgatactgtgtgtccagggtggactggatttgtcctggggggttctctggtttgctgcctcctgaccacatgatggggccttcgaggtcgaggacaactgttcccattagattgcaccctctgccctcaggttcttgagggtgtgtggacacagaggctttccatgggatgtccctgagccggcccttgattggggcctcaccatttacagggccgttttattctgcaaaccgaaacttgggtcatgtgacctgatgggattatgggactccctccaggtgcccgagacaaggttgatatttccaaaatattttggtgatttagtgggacaagcaaatgacagaataccggagaaggcagggatcgtgggtgtcaggagccagaggggagggggacagatgtgctgtgtacaggacaaggtgtcaggtgactccttcccagcagggcctcgcagatgcacaagcacggagctggtgggttttgcccaagaaaggtcacgcggcacatgcagggattggaactcccaggccagggctctaggtcgctcccaccttttcatgtttctttctgtggccatgggtatagtggaaagacataaagctaaagccaacttttaatcctgaatgcactgcttgccaggtaaatgcccttggttgtggtatcttgttgagacttagttttcacagagggataatgaaccgttgcagaggtttattgagatcattaacagagtggaattcagcacccgccactgcactccagcctgggcgacagagcaagactcagtctcaaaaaaaaaaaaaattagctgggcagggcatggtgatggtgcctgtaatcctagctacttgggaggctgaggcatgagaattgcctgaacccaggaggtggaggttgcagtgagccgagatcgtgccactgtactccagcctgggtgacagcgcgagactccgtctcaaaaaaagctgggtgtggggaacacctgtggtcccagctattctggagactgaggcaggaggattgcttgagctcaggagttctggctgcagtgagctatgatcatgccactgtattacagaatgggtgacagaatgagagcgacactgtctcaaaaaaaaaaaaaaaaaaaggccgggagcggtcgtttgtgcctgtaatcccaacactttgggaggccagggtgggcggatcacttgaggccaggagttcaagaccagcctggccaacatggtgaatccccatctctactaaaaaaattaactggacatggtggtggacacttgtaatcccagctactcaggaggctgacacatgagaattgcttgaacccgggaggcggaggttacagtgagccgagatagcaccactgcactccaacctgggcacagagtaaggctctgtctttaaaaaaaaaaaaaaaaaaaaagttttgtcaaaacttagcagagcaaggctaagaaagctcaggaacctggggcctcggcgatgcctgtagtggcaacttatgtataggggctgcagggagaggttaggctgtggcattgagccctgatagcccctatcatcaggaagtggtagatttcagttaatcctgagttctgga

SEQ ID NO: 366498 - DNA, 3830 bp, Homo sapiens
ggcggccgccgtcggggccaagccggggccccgaagccagagccggagccgggcgggccgcggggtcatggctgggccgcggggcgcgctgctggcctggtgccgccgccagtgcgagggctaccgcggcgtggagatccgcgacctgagcagctccttccgggacggcctggccttctgcgccatcctgcaccggcaccggcccgacctgctagattttgattcgctttccaaggacaatgtcttcgagaataaccgtttggcctttgaagtggctgagaaggagctggggatccccgctctcctggaccccaatgacatggtctccatgagcgtccctgactgcctcagcatcatgacctatgtgtcccagtattacaaccacttctgcagtcctggccaagctggtgtctcgccacccagaaagggccttgcaccctgttccccgccgtctgtagcacccactccagtggaaccagaagatgtggctcagggcgaggagctctcctcaggcagcctgtcagagcagggcaccggccagacccccagcagcacgtgcgcagcctgccagcagcatgtgcacttggtgcagcgctacctggctgacggcaggctgtaccatcgccactgcttccggtgtcggcggtgctccagcaccctgctccctggggcttatgagaatgggcctgaggagggcacctttgtgtgtgcagaacactgtgccaggctgggcccggggacacggtcggggaccaggcctgggcccttctcacagccaaagcagcagcaccagcagcaactcgcagaagatgccaaggatgttccaggaggcggccccagctccagtgctcctgcaggggctgaggccgatggacccaaggccagccctgaggcccggccgcagatccctaccaagccccgggttcctggcaaactacaggagctggccagcccccctgcgggccgccccacccctgcccccaggaaggcctctgagagcaccaccccagcaccccccacgccccggccccgctccagtctgcagcaggagaacctggtggagcaggctggcagcagcagcctggtgaacgggagactgcacgaactgcctgtccccaagccgagggggacaccgaagccgtccgaggggacaccagcccccaggaaggaccccccatggatcacgctggtgcaggcagaaccaaagaagaagccagccccacttcccccaagcagcagcccggggccaccaagccaggacagcaggcaggtggagaatggaggcaccgaggaggtggcccagccgagcccaacggcagcctggagtccaaaccctataacccctttgaggaggaggaggaggacaaggaggaagaggctccagctgcacccagcctggccaccagccctgccctgggccacccggagtccacacccaagtccctgcacccctggtacggcatcacccctaccagcagccccaagacaaagaagcgccctgccccgcgcgcacccagcgcgtccccactggctctccacgcctcccgcctctcgcactcggagccgccctcggccacaccatcgccagcgctcagcgtggagagcctgtcgtctgagagcgccagccagactgcaggtgcagagcttctggagccgccagctgtgcccaagagctcctcagagcctgctgtccatgcccctggtacccctggaaaccctgtcagcctctctaccaactcctccctggcctcctctggggaactagtggagcctagagtggaacaaatgcctcaagccagccctggccttgcccccaggaccaggggcagctcaggtccccagccagccaagccctgcagtggcgccaccccaacgcctctcttgttggttggagacaggagcccggtgccttcccctggaagctcgtccccacagctgcaggtaaagtcctcctgcaaggagaatccttttaaccggaagccatcacctgcagcgtccccagccacaaagaaggccaccaagggatccaagccagtgaggccacctgcccctggacacggctttccactcatcaaacgcaaggtccaggctgaccagtacatccctgaggaggacatccatggagagatggataccattgagcgccggctggatgccctggagcaccgtggggtgctgctggaggagaagctgcgtggcggcctgaatgagggccgtgaggatgacatgctggtggactggttcaagctcatccacgagaagcacctactggtgcggcgagagtccgagctcatctatgtcttcaagcagcagaacctggagcagcgccaggctgatgtcgagtatgagctccggtgcctcctcaataagccagaaaaggactggacggaggaggaccgggcccgggagaaggtgctgatgcaggagcttgtgaccctcattgagcagcgcaacgctatcatcaactgcctggatgaggaccggcagagggaggaagaggaagacaagatgttggaagccatgatcaagaagaaagagttccagagggaggctgaacctgagggcaagaagaaggggaagttcaagaccatgaagatgttgaaactgctaggaaacaaacgtgatgccaagagcaagtcccccagagacaagagctaacagcacgagaagccagttggggactgccccctcctggagcagctcctgggctgtgctctgtttgaagggggcgccctgctcccctcagatcagtcaggaggaagatgactaaggggagggatcctctgggtgatggcctcttcctcctcagggacctctgactgctctgggccaaagaatctcttgtttcttctccgagccccaggcagcggtgattcagccctgcccaacctgattctgatgactgcggatgctgtgacggacccaaggggcaaatagggtcccagggtccagggaggggcgcctgctgagcacttccgcccctcaccctgcccagcccctgccatgagctctgggctgggtctccgcctccagggttctgctcttccaggcaggccagcaagtggcgctgggccacactggcttcttcctgccccatccctggctctgagtctctgtcttcctgtcctgtgcaggcgcccttggatctcagtttccctcactcaggaactctgtttctgaagtcttcagttaagtttgagtttatgactgagtggcctgtactgtcagacgtgaatgggcctgacgggcaaatccatccctctctccctcacagttccaggagcggcttccctcgtctccccttactccacagggagcctcccttgccaggaccagggctgcgacggccatgctggggcaggtgagtgctctgttagctgctcccagtgctgtccccaggctgcagttctggtccctggttgtcaggtaggaagggtgcacttgaagcaggtgctcatctcggttccttaacgtttatagtctgacccctcacttaggctttcctctgccaccccggtccagggaagaggctcgctcccgcccatggtcatcactggtctgtctgctctgttgtctgttctttccctgactccctcccaccgaaggcctgatggctactcacccctctgggatggctatgggagaggaggagtgatggggaccgccaccttttctgcaggaaatgtgcccagcagctcttggtcaaagcactgttgctataagctatctctgggatgcctctaggcccccttccctctacacacctctgggaaaagattacactgtattaactctcgaggagtttcctcaccaataaacagacaacctca

SEQ ID NO: 366499 - DNA, 4992 bp, Homo sapiens
ggcggccgccgtcggggccaagccggggccccgaagccagagccggagccgggcgggccgcggggtcatggctgggccgcggggcgcgctgctggcctggtgccgccgccagtgcgagggctaccgcggcgtggagatccgcgacctgagcagctccttccgggacggcctggccttctgcgccatcctgcaccggcaccggcccgacctgctagattttgattcgctttccaaggacaatgtcttcgagaataaccgtttggcctttgaagtggctgagaaggagctggggatccccgctctcctggaccccaatgacatggtctccatgagcgtccctgactgcctcagcatcatgacctatgtgtcccagtattacaaccacttctgcagtcctggccaagctggtgtctcgccacccagaaagggccttgcaccctgttccccgccgtctgtagcacccactccagtggaaccagaagatgtggctcagggcgaggagctctcctcaggcagcctgtcagagcagggcaccggccagacccccagcagcacgtgcgcagcctgccagcagcatgtgcacttggtgcagcgctacctggctgacggcaggctgtaccatcgccactgcttccggtgtcggcggtgctccagcaccctgctccctggggcttatgagaatgggcctgaggagggcacctttgtgtgtgcagaacactgtgccaggctgggcccggggacacggtcggggaccaggcctgggcccttctcacagccaaagcagcagcaccagcagcaactcgcagaagatgccaaggatgttccaggaggcggccccagctccagtgctcctgcaggggctgaggccgatggacccaaggccagccctgaggcccggccgcagatccctaccaagccccgggttcctggcaaactacaggagctggccagcccccctgcgggccgccccacccctgcccccaggaaggcctctgagagcaccaccccagcaccccccacgccccggccccgctccagtctgcagcaggagaacctggtggagcaggctggcagcagcagcctggtgaacgggagactgcacgaactgcctgtccccaagccgagggggacaccgaagccgtccgaggggacaccagcccccaggaaggaccccccatggatcacgctggtgcaggcagaaccaaagaagaagccagccccacttcccccaagcagcagcccggggccaccaagccaggacagcaggcaggtggagaatggaggcaccgaggaggtggcccagccgagcccaacggcagcctggagtccaaaccctataacccctttgaggaggaggaggaggacaaggaggaagaggctccagctgcacccagcctggccaccagccctgccctgggccacccggagtccacacccaagtccctgcacccctggtacggcatcacccctaccagcagccccaagacaaagaagcgccctgccccgcgcgcacccagcgcgtccccactggctctccacgcctcccgcctctcgcactcggagccgccctcggccacaccatcgccagcgctcagcgtggagagcctgtcgtctgagagcgccagccagactgcaggtgcagagcttctggagccgccagctgtgcccaagagctcctcagagcctgctgtccatgcccctggtacccctggaaaccctgtcagcctctctaccaactcctccctggcctcctctggggaactagtggagcctagagtggaacaaatgcctcaagccagccctggccttgcccccaggaccaggggcagctcaggtccccagccagccaagccctgcagtggcgccaccccaacgcctctcttgttggttggagacaggagcccggtgccttcccctggaagctcgtccccacagctgcaggtaaagtcctcctgcaaggagaatccttttaaccggaagccatcacctgcagcgtccccagccacaaagaaggccaccaagggatccaagccagtgaggccacctgcccctggacacggctttccactcatcaaacgcaaggtccaggctgaccagtacatccctgaggaggacatccatggagagatggataccattgagcgccggctggatgccctggagcaccgtggggtgctgctggaggagaagctgcgtggcggcctgaatgagggccgtgaggatgacatgctggtggactggttcaagctcatccacgagaagcacctactggtgcggcgagagtccgagctcatctatgtcttcaagcagcagaacctggagcagcgccaggctgatgtcgagtatgagctccggtgcctcctcaataagccagaaaaggactggacggaggaggaccgggcccgggagaaggtgctgatgcaggagcttgtgaccctcattgagcagcgcaacgctatcatcaactgcctggatgaggaccggcagagggaggaagaggaagacaagatgttggaagccatgatcaagaagaaagagttccagagggaggctgaacctgagggcaagaagaaggggaagttcaagaccatgaagatgttgaaactgctaggaaacaaacgtgatgccaagagcaagtcccccagagacaagagctaacagcacgagaagccagttggggactgccccctcctggagcagctcctgggctgtgctctgtttgaagggggcgccctgctcccctcagatcagtcaggaggaagatgactaaggggagggatcctctgggtgatggcctcttcctcctcagggacctctgactgctctgggccaaagaatctcttgtttcttctccgagccccaggcagcggtgattcagccctgcccaacctgattctgatgactgcggatgctgtgacggacccaaggggcaaatagggtcccagggtccagggaggggcgcctgctgagcacttccgcccctcaccctgcccagcccctgccatgagctctgggctgggtctccgcctccagggttctgctcttccaggcaggccagcaagtggcgctgggccacactggcttcttcctgccccatccctggctctgagtctctgtcttcctgtcctgtgcaggcgcccttggatctcagtttccctcactcaggaactctgtttctgaagtcttcagttaagtttgagtttatgactgagtggcctgtactgtcagacgtgaatgggcctgacgggcaaatccatccctctctccctcacagttccaggagcggcttccctcgtctccccttactccacagggagcctcccttgccaggaccagggctgcgacggccatgctggggcaggtgagtgctctgttagctgctcccagtgctgtccccaggctgcagttctggtccctggttgtcaggtaggaagggtgcacttgaagcaggtgctcatctcggttccttaacgtttatagtctgacccctcacttaggctttcctctgccaccccggtccagggaagaggctcgctcccgcccatggtcatcactggtctgtctgctctgttgtctgttctttccctgactccctcccaccgaaggcctgatggctactcacccctctgggatggctatgggagaggaggagtgatggggaccgccaccttttctgcaggaaatgtgcccagcagctcttggtcaaagcactgttgctataagctatctctgggatgcctctaggcccccttccctctacacacctctgggaaaagattacactgtattaactctcgaggagtttcctcaccaataaacagacaacctcaactgccagtgccctgcagcctcgggccacagcggcagccttgtttgccttcccacctgcctctgccacacctggtggctgaacatctctggtcgcccagaggccatgttggggccatcctccaagagggatctctgccctcaccgcctgccactgggcaggatccctttcctctgcagggagaggtggctcctcggccatgcagcccctggcaggctccttctaaacatgcctgttgacctggagctggcgccaccaactccagggcctttccagggccagacaggtaacacgcatgaacccgagtgacagctctgacgggctgtttcggtgtcaggagacaaagctggcaggggcaggggtgaactggaggcaagtcaagtcacctgtggcctgtggggctgaatgtgggcccggtgttgccagatcctttgtcataagaagctagaaatccagattttatgtgtgtgtaatttgtaaatactgcactctagcctgggcaataagagcaagactgtctcaaaataaataaataaataaataaatagtgtttctcacttgttggcccttggccctcagggatcccctgactgctccatccaattctgggccccctcctcacattacccccacccccagcatgactggtccgtcggagtcttacgctcttcaaatcggtctagctcaggggctggagccttctgtcgtgcaggaggggcctttcttttccgttcctccatgtccttccctgtggcaaagatattttggagtctttgtttctccttctccaaatcccctgtagggccaaaaagaaatggcctagttaggctgtaaagggtgcccttattcatggtctgtgttcccaagtgcacgtgcttgctgcagggtgcctggtcatgcagacagggcttccgtacacctgctgctaccctgggttctcctgagcaatactgtactgtcaagagaggcaggaagaggtggaaagaaccaagaaaagagtttgggtatggtctgtaattccaacactttgggaggctgaggtgggaggattgcttaggaccaggagttcaagaccagcctaatggatgtagtgagacccccatctctttttttcttcttttttattttttttgaaacagggtcggactctgtcgcccagactg

SEQ ID NO: 366500 - DNA, 5655 bp, Homo sapiens
  misc_feature (4272)..(4272): n is a, c, g, or t
ggcggccgccgtcggggccaagccggggccccgaagccagagccggagccgggcgggccgcggggtcatggctgggccgcggggcgcgctgctggcctggtgccgccgccagtgcgagggctaccgcggcgtggagatccgcgacctgagcagctccttccgggacggcctggccttctgcgccatcctgcaccggcaccggcccgacctgctagattttgattcgctttccaaggacaatgtcttcgagaataaccgtttggcctttgaagtggctgagaaggagctggggatccccgctctcctggaccccaatgacatggtctccatgagcgtccctgactgcctcagcatcatgacctatgtgtcccagtattacaaccacttctgcagtcctggccaagctggtgtctcgccacccagaaagggccttgcaccctgttccccgccgtctgtagcacccactccagtggaaccagaagatgtggctcagggcgaggagctctcctcaggcagcctgtcagagcagggcaccggccagacccccagcagcacgtgcgcagcctgccagcagcatgtgcacttggtgcagcgctacctggctgacggcaggctgtaccatcgccactgcttccggtgtcggcggtgctccagcaccctgctccctggggcttatgagaatgggcctgaggagggcacctttgtgtgtgcagaacactgtgccaggctgggcccggggacacggtcggggaccaggcctgggcccttctcacagccaaagcagcagcaccagcagcaactcgcagaagatgccaaggatgttccaggaggcggccccagctccagtgctcctgcaggggctgaggccgatggacccaaggccagccctgaggcccggccgcagatccctaccaagccccgggttcctggcaaactacaggagctggccagcccccctgcgggccgccccacccctgcccccaggaaggcctctgagagcaccaccccagcaccccccacgccccggccccgctccagtctgcagcaggagaacctggtggagcaggctggcagcagcagcctggtgaacgggagactgcacgaactgcctgtccccaagccgagggggacaccgaagccgtccgaggggacaccagcccccaggaaggaccccccatggatcacgctggtgcaggcagaaccaaagaagaagccagccccacttcccccaagcagcagcccggggccaccaagccaggacagcaggcaggtggagaatggaggcaccgaggaggtggcccagccgagcccaacggcagcctggagtccaaaccctataacccctttgaggaggaggaggaggacaaggaggaagaggctccagctgcacccagcctggccaccagccctgccctgggccacccggagtccacacccaagtccctgcacccctggtacggcatcacccctaccagcagccccaagacaaagaagcgccctgccccgcgcgcacccagcgcgtccccactggctctccacgcctcccgcctctcgcactcggagccgccctcggccacaccatcgccagcgctcagcgtggagagcctgtcgtctgagagcgccagccagactgcaggtgcagagcttctggagccgccagctgtgcccaagagctcctcagagcctgctgtccatgcccctggtacccctggaaaccctgtcagcctctctaccaactcctccctggcctcctctggggaactagtggagcctagagtggaacaaatgcctcaagccagccctggccttgcccccaggaccaggggcagctcaggtccccagccagccaagccctgcagtggcgccaccccaacgcctctcttgttggttggagacaggagcccggtgccttcccctggaagctcgtccccacagctgcaggtaaagtcctcctgcaaggagaatccttttaaccggaagccatcacctgcagcgtccccagccacaaagaaggccaccaagggatccaagccagtgaggccacctgcccctggacacggctttccactcatcaaacgcaaggtccaggctgaccagtacatccctgaggaggacatccatggagagatggataccattgagcgccggctggatgccctggagcaccgtggggtgctgctggaggagaagctgcgtggcggcctgaatgagggccgtgaggatgacatgctggtggactggttcaagctcatccacgagaagcacctactggtgcggcgagagtccgagctcatctatgtcttcaagcagcagaacctggagcagcgccaggctgatgtcgagtatgagctccggtgcctcctcaataagccagaaaaggactggacggaggaggaccgggcccgggagaaggtgctgatgcaggagcttgtgaccctcattgagcagcgcaacgctatcatcaactgcctggatgaggaccggcagagggaggaagaggaagacaagatgttggaagccatgatcaagaagaaagagttccagagggaggctgaacctgagggcaagaagaaggggaagttcaagaccatgaagatgttgaaactgctaggaaacaaacgtgatgccaagagcaagtcccccagagacaagagctaacagcacgagaagccagttggggactgccccctcctggagcagctcctgggctgtgctctgtttgaagggggcgccctgctcccctcagatcagtcaggaggaagatgactaaggggagggatcctctgggtgatggcctcttcctcctcagggacctctgactgctctgggccaaagaatctcttgtttcttctccgagccccaggcagcggtgattcagccctgcccaacctgattctgatgactgcggatgctgtgacggacccaaggggcaaatagggtcccagggtccagggaggggcgcctgctgagcacttccgcccctcaccctgcccagcccctgccatgagctctgggctgggtctccgcctccagggttctgctcttccaggcaggccagcaagtggcgctgggccacactggcttcttcctgccccatccctggctctgagtctctgtcttcctgtcctgtgcaggcgcccttggatctcagtttccctcactcaggaactctgtttctgaagtcttcagttaagtttgagtttatgactgagtggcctgtactgtcagacgtgaatgggcctgacgggcaaatccatccctctctccctcacagttccaggagcggcttccctcgtctccccttactccacagggagcctcccttgccaggaccagggctgcgacggccatgctggggcaggctttcctctgccaccccggtccagggaagaggctcgctcccgcccatggtcatcactggtctgtctgctctgttgtctgttctttccctgactccctcccaccgaaggcctgatggctactcacccctctgggatggctatgggagaggaggagtgatggggaccgccaccttttctgcaggaaatgtgcccagcagctcttggtcaaagcactgttgctataagctatctctgggatgcctctaggcccccttccctctacacacctctgggaaaagattacactgtattaactctcgaggagtttcctcaccaataaacagacaacctcaactgccagtgccctgcagcctcgggccacagcggcagccttgtttgccttcccacctgcctctgccacacctggtggctgaacatctctggtcgcccagaggccatgttggggccatcctccaagagggatctctgccctcaccgcctgccactgggcaggatccctttcctctgcagggagaggtggctcctcggccatgcagcccctggcaggctccttctaaacatgcctgttgacctggagctggcgccaccaactccagggcctttccagggccagacaggtaacacgcatgaacccgagtgacagctctgacgggctgtttcggtgtcaggagacaaagctggcaggggcaggggtgaactggaggcaagtcaagtcacctgtggcctgtggggctgaatgtgggcccggtgttgccagatcctttgtcataagaagctagaaatccagattttatgtgtgtgtaatttgtaaatgctgaaagctagcctgaattttttttttttttttgagacagagtctcgctctgtcgcccaggctggagtgcagtggcgcgatctcagctcactgcangctccgcctcctgggttcacgccatcctcctgcctcggcctcctgagcagctgggactacaggcgcatgctacgacgcctggctaattttttgtatttttagtagagacggggtttcaccgtgttaaccaggatggtctcgatctcctgaccttgtgatccacccaccttggcctcccaaagtgctgggattacaggcgtgagccaccacgcccggccactagcctgaatttcaatcaagggttggctgatactgtgtgtccagggtggactggatttgtcctggggggttctctggtttgctgcctcctgaccacatgatggggccttcgaggtcgaggacaactgttcccattagattgcaccctctgccctcaggttcttgagggtgtgtggacacagaggctttccatgggatgtccctgagccggcccttgattggggcctcaccatttacagggccgttttattctgcaaaccgaaacttgggtcatgtgacctgatgggattatgggactccctccaggtgcccgagacaaggttgatatttccaaaatattttggtgatttagtgggacaagcaaatgacagaataccggagaaggcagggatcgtgggtgtcaggagccagaggggagggggacagatgtgctgtgtacaggacaaggtgtcaggtgactccttcccagcagggcctcgcagatgcacaagcacggagctggtgggttttgcccaagaaaggtcacgcggcacatgcagggattggaactcccaggccagggctctaggtcgctcccaccttttcatgtttctttctgtggccatgggtatagtggaaagacataaagctaaagccaacttttaatcctgaatgcactgcttgccaggtaaatgcccttggttgtggtatcttgttgagacttagttttcacagagggataatgaaccgttgcagaggtttattgagatcattaacagagtggaattcagcacccgccacagcagccagccatggggtgcccaagaggttggttcccgttgccacttgaaatatgcaaacaggtagctagaaaccatctgggcttgacaaagtctaatgccttgaacaaataagcttatccctctgaaaacaaaatggtgcttgtaatgacccacgttaaatatgttttattggccagttaatcattgtggttgaatacttgcctaaggcggtaagaaatcaaataagtaaatcctaaaacaggaagaaaggaatcatattcattcctgaattcagaaaactaaatgaacaggccacaggtcagaagtggtgggaagcaggcccagtggatacctttagacacatgtcctagtagggatgctcgggctttgcttctctgcggac

SEQ ID NO: 366501 - DNA, 4438 bp, Homo sapiens
ggcggccgccgtcggggccaagccggggccccgaagccagagccggagccgggcgggccgcggggtcatggctgggccgcggggcgcgctgctggcctggtgccgccgccagtgcgagggctaccgcggcgtggagatccgcgacctgagcagctccttccgggacggcctggccttctgcgccatcctgcaccggcaccggcccgacctgctagattttgattcgctttccaaggacaatgtcttcgagaataaccgtttggcctttgaagtggctgagaaggagctggggatccccgctctcctggaccccaatgacatggtctccatgagcgtccctgactgcctcagcatcatgacctatgtgtcccagtattacaaccacttctgcagtcctggccaagctggtgtctcgccacccagaaagggccttgcaccctgttccccgccgtctgtagcacccactccagtggaaccagaagatgtggctcagggcgaggagctctcctcaggcagcctgtcagagcagggcaccggccagacccccagcagcacgtgcgcagcctgccagcagcatgtgcacttggtgcagcgctacctggctgacggcaggctgtaccatcgccactgcttccggtgtcggcggtgctccagcaccctgctccctggggcttatgagaatgggcctgaggagggcacctttgtgtgtgcagaacactgtgccaggctgggcccggggacacggtcggggaccaggcctgggcccttctcacagccaaagcagcagcaccagcagcaactcgcagaagatgccaaggatgttccaggaggcggccccagctccagtgctcctgcaggggctgaggccgatggacccaaggccagccctgaggcccggccgcagatccctaccaagccccgggttcctggcaaactacaggagctggccagcccccctgcgggccgccccacccctgcccccaggaaggcctctgagagcaccaccccagcaccccccacgccccggccccgctccagtctgcagcaggagaacctggtggagcaggctggcagcagcagcctggtgaacgggagactgcacgaactgcctgtccccaagccgagggggacaccgaagccgtccgaggggacaccagcccccaggaaggaccccccatggatcacgctggtgcaggcagaaccaaagaagaagccagccccacttcccccaagcagcagcccggggccaccaagccaggacagcaggcaggtggagaatggaggcaccgaggaggtggcccagccgagcccaacggcagcctggagtccaaaccctataacccctttgaggaggaggaggaggacaaggaggaagaggctccagctgcacccagcctggccaccagccctgccctgggccacccggagtccacacccaagtccctgcacccctggtacggcatcacccctaccagcagccccaagacaaagaagcgccctgccccgcgcgcacccagcgcgtccccactggctctccacgcctcccgcctctcgcactcggagccgccctcggccacaccatcgccagcgctcagcgtggagagcctgtcgtctgagagcgccagccagactgcaggtgcagagcttctggagccgccagctgtgcccaagagctcctcagagcctgctgtccatgcccctggtacccctggaaaccctgtcagcctctctaccaactcctccctggcctcctctggggaactagtggagcctagagtggaacaaatgcctcaagccagccctggccttgcccccaggaccaggggcagctcaggtccccagccagccaagccctgcagtggcgccaccccaacgcctctcttgttggttggagacaggagcccggtgccttcccctggaagctcgtccccacagctgcaggtaaagtcctcctgcaaggagaatccttttaaccggaagccatcacctgcagcgtccccagccacaaagaaggccaccaagggatccaagccagtgaggccacctgcccctggacacggctttccactcatcaaacgcaaggtccaggctgaccagtacatccctgaggaggacatccatggagagatggataccattgagcgccggctggatgccctggagcaccgtggggtgctgctggaggagaagctgcgtggcggcctgaatgagggccgtgaggatgacatgctggtggactggttcaagctcatccacgagaagcacctactggtgcggcgagagtccgagctcatctatgtcttcaagcagcagaacctggagcagcgccaggctgatgtcgagtatgagctccggtgcctcctcaataagccagaaaaggactggacggaggaggaccgggcccgggagaaggtgctgatgcaggagcttgtgaccctcattgagcagcgcaacgctatcatcaactgcctggatgaggaccggcagagggaggaagaggaagacaagatgttggaagccatgatcaagaagaaagagttccagagggaggctgaacctgagggcaagaagaaggggaagttcaagaccatgaagatgttgaaactgctaggaaacaaacgtgatgccaagagcaagtcccccagagacaagagctaacagcacgagaagccagttggggactgccccctcctggagcagctcctgggctgtgctctgtttgaagggggcgccctgctcccctcagatcagtcaggaggaagatgactaaggggagggatcctctgggtgatggcctcttcctcctcagggacctctgactgctctgggccaaagaatctcttgtttcttctccgagccccaggcagcggtgattcagccctgcccaacctgattctgatgactgcggatgctgtgacggacccaaggggcaaatagggtcccagggtccagggaggggcgcctgctgagcacttccgcccctcaccctgcccagcccctgccatgagctctgggctgggtctccgcctccagggttctgctcttccaggcaggccagcaagtggcgctgggccacactggcttcttcctgccccatccctggctctgagtctctgtcttcctgtcctgtgcaggcgcccttggatctcagtttccctcactcaggaactctgtttctgaagtcttcagttaagtttgagtttatgactgagtggcctgtactgtcagacgtgaatgggcctgacgggcaaatccatccctctctccctcacagttccaggagcggcttccctcgtctccccttactccacagggagcctcccttgccaggaccagggctgcgacggccatgctggggcaggtgagtgctctgttagctgctcccagtgctgtccccaggctgcagttctggtccctggttgtcaggtaggaagggtgcacttgaagcaggtgctcatctcggttccttaacgtttatagtctgacccctcacttaggctttcctctgccaccccggtccagggaagaggctcgctcccgcccatggtcatcactggtctgtctgctctgttgtctgttctttccctgactccctcccaccgaaggcctgatggctactcaccccgtgtctactaaaaatacaaaaattagccaggcatggtggcgggcgctggtaatcccagctactcaggtggctgaggcaggagggattgcttgaacctgggaagtggaggctgcagtgagcccagatcacgccactgcactctagcctgggcaataagagcaagactgtctcaaaataaataaataaataaataaatagtgtttctcacttgttggcccttggccctcagggatcccctgactgctccatccaattctgggccccctcctcacattacccccacccccagcatgactggtccgtcggagtcttacgctcttcaaatcggtctagctcaggggctggagccttctgtcgtgcaggaggggcctttcttttccgttcctccatgtccttccctgtggcaaagatattttggagtctttgtttctccttctccaaatcccctgtagggccaaaaagaaatggcctagttaggctgtaaagggtgcccttattcatggtctgtgttcccaagtgcacgtgcttgctgcagggtgcctggtcatgcagacagggcttccgtacacctgctgctaccctgggttctcctgagcaatactgtactgtcaagagaggcaggaagaggtggaaagaaccaagaaaagagtttgggtatggtctgtaattccaacactttgggaggctgaggtgggaggattgcttaggaccaggagttcaagaccagcctaatggatgtagtgagacccccatctctttttttcttcttttttattttttttgaaacagggtcggactctgtcgcccagactg

SEQ ID NO: 366502 - DNA, 3230 bp, Homo sapiens
  misc_feature (73)..(73): n is a, c, g, or t
  misc_feature (1847)..(1847): n is a, c, g, or t
ctgagcagacaacagcatacatccgactctcaatcttttccccacctttcccccttttctattctgctgctgntgtctgctgcagctgcagcagacacagcacgagaagccagttggggactgccccctcctggagcagctcctgggctgtgctctgtttgaagggggcgccctgctcccctcagatcagtcaggaggaagatgactaaggggagggatcctctgggtgatggcctcttcctcctcagggacctctgactgctctgggccaaagaatctcttgtttcttctccgagccccaggcagcggtgattcagccctgcccaacctgattctgatgactgcggatgctgtgacggacccaaggggcaaatagggtcccagggtccagggaggggcgcctgctgagcacttccgcccctcaccctgcccagcccctgccatgagctctgggctgggtctccgcctccagggttctgctcttccaggcaggccagcaagtggcgctgggccacactggcttcttcctgccccatccctggctctgagtctctgtcttcctgtcctgtgcaggcgcccttggatctcagtttccctcactcaggaactctgtttctgaagtcttcagttaagtttgagtttatgactgagtggcctgtactgtcagacgtgaatgggcctgacgggcaaatccatccctctctccctcacagttccaggagcggcttccctcgtctccccttactccacagggagcctcccttgccaggaccagggctgcgacggccatgctggggcaggtgagtgctctgttagctgctcccagtgctgtccccaggctgcagttctggtccctggttgtcaggtaggaagggtgcacttgaagcaggtgctcatctcggttccttaacgtttatagtctgacccctcacttaggctttcctctgccaccccggtccagggaagaggctcgctcccgcccatggtcatcactggtctgtctgctctgttgtctgttctttccctgactccctcccaccgaaggcctgatggctactcacccctctgggatggctatgggagaggaggagtgatggggaccgccaccttttctgcaggaaatgtgcccagcagctcttggtcaaagcactgttgctataagctatctctgggatgcctctaggcccccttccctctacacacctctgggaaaagattacactgtattaactctcgaggagtttcctcaccaataaacagacaacctcaactgccagtgccctgcagcctcgggccacagcggcagccttgtttgccttcccacctgcctctgccacacctggtggctgaacatctctggtcgcccagaggccatgttggggccatcctccaagagggatctctgccctcaccgcctgccactgggcaggatccctttcctctgcagggagaggtggctcctcggccatgcagcccctggcaggctccttctaaacatgcctgttgacctggagctggcgccaccaactccagggcctttccagggccagacaggtaacacgcatgaacccgagtgacagctctgacgggctgtttcggtgtcaggagacaaagctggcaggggcaggggtgaactggaggcaagtcaagtcacctgtggcctgtggggctgaatgtgggcccggtgttgccagatcctttgtcataagaagctagaaatccagattttatgtgtgtgtaatttgtaaatgctgaaagctagcctgaattttttttttttttttgagacagagtctcgctctgtcgcccaggctggagtgcagtggcgcgatctcagctcactgcangctccgcctcctgggttcacgccatcctcctgcctcggcctcctgagcagctgggactacaggcgcatgctacgacgcctggctaattttttgtatttttagtagagacggggtttcaccgtgttaaccaggatggtctcgatctcctgaccttgtgatccacccaccttggcctcccaaagtgctgggattacaggcgtgagccaccacgcccggccactagcctgaatttcaatcaagggttggctgatactgtgtgtccagggtggactggatttgtcctggggggttctctggtttgctgcctcctgaccacatgatggggccttcgaggtcgaggacaactgttcccattagattgcaccctctgccctcaggttcttgagggtgtgtggacacagaggctttccatgggatgtccctgagccggcccttgattggggcctcaccatttacagggccgttttattctgcaaaccgaaacttgggtcatgtgacctgatgggattatgggactccctccaggtgcccgagacaaggttgatatttccaaaatattttggtgatttagtgggacaagcaaatgacagaataccggagaaggcagggatcgtgggtgtcaggagccagaggggagggggacagatgtgctgtgtacaggacaaggtgtcaggtgactccttcccagcagggcctcgcagatgcacaagcacggagctggtgggttttgcccaagaaaggtcacgcggcacatgcagggattggaactcccaggccagggctctaggtcgctcccaccttttcatgtttctttctgtggccatgggtatagtggaaagacataaagctaaagccaacttttaatcctgaatgcactgcttgccaggtaaatgcccttggttgtggtatcttgttgagacttagttttcacagagggataatgaaccgttgcagaggtttattgagatcattaacagagtggaattcagcacccgccacagcagccagccatggggtgcccaagaggttggttcccgttgccacttgaaatatgcaaacaggtagctagaaaccatctgggcttgacaaagtctaatgccttgaacaaataagcttatccctctgaaaacaaaatggtgcttgtaatgacccacgttaaatatgttttattggccagttaatcattgtggttgaatacttgcctaaggcggtaagaaatcaaataagtaaatcctaaaacaggaagaaaggaatcatattcattcctgaattcagaaaactaaatgaacaggccacaggtcagaagtggtgggaagcaggcccagtggatacctttagacacatgtcctagtagggatgctcgggctttgcttctctgcggac

SEQ ID NO: 366503 - DNA, 2677 bp, Homo sapiens
  misc_feature (1294)..(1294): n is a, c, g, or t
ctgactgatgtgaggggagcagggccccccttccaacagagcacagcccaggagctgctccaggagggggcagtcccctactggcttctcgtgctgttagctcttgtctctgggggacttgctcttggcatcacgtttgtttcctagcagtttcgacatcttcatggtcttggacttccccttcctcttgccctcaggttcagcctcccttgccaggaccagggctgcgacggccatgctggggcaggtgagtgctctgttagctgctcccagtgctgtccccaggctgcagttctggtccctggttgtcaggtaggaagggtgcacttgaagcaggtgctcatctcggttccttaacgtttatagtctgacccctcacttaggctttcctctgccaccccggtccagggaagaggctcgctcccgcccatggtcatcactggtctgtctgctctgttgtctgttctttccctgactccctcccaccgaaggcctgatggctactcacccctctgggatggctatgggagaggaggagtgatggggaccgccaccttttctgcaggaaatgtgcccagcagctcttggtcaaagcactgttgctataagctatctctgggatgcctctaggcccccttccctctacacacctctgggaaaagattacactgtattaactctcgaggagtttcctcaccaataaacagacaacctcaactgccagtgccctgcagcctcgggccacagcggcagccttgtttgccttcccacctgcctctgccacacctggtggctgaacatctctggtcgcccagaggccatgttggggccatcctccaagagggatctctgccctcaccgcctgccactgggcaggatccctttcctctgcagggagaggtggctcctcggccatgcagcccctggcaggctccttctaaacatgcctgttgacctggagctggcgccaccaactccagggcctttccagggccagacaggtaacacgcatgaacccgagtgacagctctgacgggctgtttcggtgtcaggagacaaagctggcaggggcaggggtgaactggaggcaagtcaagtcacctgtggcctgtggggctgaatgtgggcccggtgttgccagatcctttgtcataagaagctagaaatccagattttatgtgtgtgtaatttgtaaatgctgaaagctagcctgaattttttttttttttttgagacagagtctcgctctgtcgcccaggctggagtgcagtggcgcgatctcagctcactgcangctccgcctcctgggttcacgccatcctcctgcctcggcctcctgagcagctgggactacaggcgcatgctacgacgcctggctaattttttgtatttttagtagagacggggtttcaccgtgttaaccaggatggtctcgatctcctgaccttgtgatccacccaccttggcctcccaaagtgctgggattacaggcgtgagccaccacgcccggccactagcctgaatttcaatcaagggttggctgatactgtgtgtccagggtggactggatttgtcctggggggttctctggtttgctgcctcctgaccacatgatggggccttcgaggtcgaggacaactgttcccattagattgcaccctctgccctcaggttcttgagggtgtgtggacacagaggctttccatgggatgtccctgagccggcccttgattggggcctcaccatttacagggccgttttattctgcaaaccgaaacttgggtcatgtgacctgatgggattatgggactccctccaggtgcccgagacaaggttgatatttccaaaatattttggtgatttagtgggacaagcaaatgacagaataccggagaaggcagggatcgtgggtgtcaggagccagaggggagggggacagatgtgctgtgtacaggacaaggtgtcaggtgactccttcccagcagggcctcgcagatgcacaagcacggagctggtgggttttgcccaagaaaggtcacgcggcacatgcagggattggaactcccaggccagggctctaggtcgctcccaccttttcatgtttctttctgtggccatgggtatagtggaaagacataaagctaaagccaacttttaatcctgaatgcactgcttgccaggtaaatgcccttggttgtggtatcttgttgagacttagttttcacagagggataatgaaccgttgcagaggtttattgagatcattaacagagtggaattcagcacccgccacagcagccagccatggggtgcccaagaggttggttcccgttgccacttgaaatatgcaaacaggtagctagaaaccatctgggcttgacaaagtctaatgccttgaacaaataagcttatccctctgaaaacaaaatggtgcttgtaatgacccacgttaaatatgttttattggccagttaatcattgtggttgaatacttgcctaaggcggtaagaaatcaaataagtaaatcctaaaacaggaagaaaggaatcatattcattcctgaattcagaaaactaaatgaacaggccacaggtcagaagtggtgggaagcaggcccagtggatacctttagacacatgtcctagtagggatgctcgggctttgcttctctgcggac

SEQ ID NO: 366504 - DNA, 6115 bp, Homo sapiens
  misc_feature (4265)..(4265): n is a, c, g, or t
gggtctccctgccaagctatgggggaggggatggtggacatgacaacttccagctcagcggtgctttaggagattttgattcgctttccaaggacaatgtcttcgagaataaccgtttggcctttgaagtggctgagaaggagctggggatccccgctctcctggaccccaatgacatggtctccatgagcgtccctgactgcctcagcatcatgacctatgtgtcccagtattacaaccacttctgcagtcctggccaagctggtgtctcgccacccagaaagggccttgcaccctgttccccgccgtctgtagcacccactccagtggaaccagaagatgtggctcagggcgaggagctctcctcaggcagcctgtcagagcagggcaccggccagacccccagcagcacgtgcgcagcctgccagcagcatgtgcacttggtgcagcgctacctggctgacggcaggctgtaccatcgccactgcttccggtgtcggcggtgctccagcaccctgctccctggggcttatgagaatgggcctgaggagggcacctttgtgtgtgcagaacactgtgccaggctgggcccggggacacggtcggggaccaggcctgggcccttctcacagccaaagcagcagcaccagcagcaactcgcagaagatgccaaggatgttccaggaggcggccccagctccagtgctcctgcaggggctgaggccgatggacccaaggccagccctgaggcccggccgcagatccctaccaagccccgggttcctggcaaactacaggagctggccagcccccctgcgggccgccccacccctgcccccaggaaggcctctgagagcaccaccccagcaccccccacgccccggccccgctccagtctgcagcaggagaacctggtggagcaggctggcagcagcagcctggtgaacgggagactgcacgaactgcctgtccccaagccgagggggacaccgaagccgtccgaggggacaccagcccccaggaaggaccccccatggatcacgctggtgcaggcagaaccaaagaagaagccagccccacttcccccaagcagcagcccggggccaccaagccaggacagcaggcaggtggagaatggaggcaccgaggaggtggcccagccgagcccaacggcagcctggagtccaaaccctataacccctttgaggaggaggaggaggacaaggaggaagaggctccagctgcacccagcctggccaccagccctgccctgggccacccggagtccacacccaagtccctgcacccctggtacggcatcacccctaccagcagccccaagacaaagaagcgccctgccccgcgcgcacccagcgcgtccccactggctctccacgcctcccgcctctcgcactcggagccgccctcggccacaccatcgccagcgctcagcgtggagagcctgtcgtctgagagcgccagccagactgcaggtgcagagcttctggagccgccagctgtgcccaagagctcctcagagcctgctgtccatgcccctggtacccctggaaaccctgtcagcctctctaccaactcctccctggcctcctctggggaactagtggagcctagagtggaacaaatgcctcaagccagccctggccttgcccccaggaccaggggcagctcaggtccccagccagccaagccctgcagtggcgccaccccaacgcctctcttgttggttggagacaggagcccggtgccttcccctggaagctcgtccccacagctgcaggtaaagtcctcctgcaaggagaatccttttaaccggaagccatcacctgcagcgtccccagccacaaagaaggccaccaagggatccaagccagtgaggccacctgcccctggacacggctttccactcatcaaacgcaaggtccaggctgaccagtacatccctgaggaggacatccatggagagatggataccattgagcgccggctggatgccctggagcaccgtggggtgctgctggaggagaagctgcgtggcggcctgaatgagggccgtgaggatgacatgctggtggactggttcaagctcatccacgagaagcacctactggtgcggcgagagtccgagctcatctatgtcttcaagcagcagaacctggagcagcgccaggctgatgtcgagtatgagctccggtgcctcctcaataagccagaaaaggactggacggaggaggaccgggcccgggagaaggtgctgatgcaggagcttgtgaccctcattgagcagcgcaacgctatcatcaactgcctggatgaggaccggcagagggaggaagaggaagacaagatgttggaagccatgatcaagaagaaagagttccagagggaggctgaacctgagggcaagaagaaggggaagttcaagaccatgaagatgttgaaactgctaggaaacaaacgtgatgccaagagcaagtcccccagagacaagagctaacagcacgagaagccagttggggactgccccctcctggagcagctcctgggctgtgctctgtttgaagggggcgccctgctcccctcagatcagtcaggaggaagatgactaaggggagggatcctctgggtgatggcctcttcctcctcagggacctctgactgctctgggccaaagaatctcttgtttcttctccgagccccaggcagcggtgattcagccctgcccaacctgattctgatgactgcggatgctgtgacggacccaaggggcaaatagggtcccagggtccagggaggggcgcctgctgagcacttccgcccctcaccctgcccagcccctgccatgagctctgggctgggtctccgcctccagggttctgctcttccaggcaggccagcaagtggcgctgggccacactggcttcttcctgccccatccctggctctgagtctctgtcttcctgtcctgtgcaggcgcccttggatctcagtttccctcactcaggaactctgtttctgaagtcttcagttaagtttgagtttatgactgagtggcctgtactgtcagacgtgaatgggcctgacgggcaaatccatccctctctccctcacagttccaggagcggcttccctcgtctccccttactccacagggagcctcccttgccaggaccagggctgcgacggccatgctggggcaggtgagtgctctgttagctgctcccagtgctgtccccaggctgcagttctggtccctggttgtcaggtaggaagggtgcacttgaagcaggtgctcatctcggttccttaacgtttatagtctgacccctcacttaggctttcctctgccaccccggtccagggaagaggctcgctcccgcccatggtcatcactggtctgtctgctctgttgtctgttctttccctgactccctcccaccgaaggcctgatggctactcacccctctgggatggctatgggagaggaggagtgatggggaccgccaccttttctgcaggaaatgtgcccagcagctcttggtcaaagcactgttgctataagctatctctgggatgcctctaggcccccttccctctacacacctctgggaaaagattacactgtattaactctcgaggagtttcctcaccaataaacagacaacctcaactgccagtgccctgcagcctcgggccacagcggcagccttgtttgccttcccacctgcctctgccacacctggtggctgaacatctctggtcgcccagaggccatgttggggccatcctccaagagggatctctgccctcaccgcctgccactgggcaggatccctttcctctgcagggagaggtggctcctcggccatgcagcccctggcaggctccttctaaacatgcctgttgacctggagctggcgccaccaactccagggcctttccagggccagacaggtaacacgcatgaacccgagtgacagctctgacgggctgtttcggtgtcaggagacaaagctggcaggggcaggggtgaactggaggcaagtcaagtcacctgtggcctgtggggctgaatgtgggcccggtgttgccagatcctttgtcataagaagctagaaatccagattttatgtgtgtgtaatttgtaaatgctgaaagctagcctgaattttttttttttttttgagacagagtctcgctctgtcgcccaggctggagtgcagtggcgcgatctcagctcactgcangctccgcctcctgggttcacgccatcctcctgcctcggcctcctgagcagctgggactacaggcgcatgctacgacgcctggctaattttttgtatttttagtagagacggggtttcaccgtgttaaccaggatggtctcgatctcctgaccttgtgatccacccaccttggcctcccaaagtgctgggattacaggcgtgagccaccacgcccggccactagcctgaatttcaatcaagggttggctgatactgtgtgtccagggtggactggatttgtcctggggggttctctggtttgctgcctcctgaccacatgatggggccttcgaggtcgaggacaactgttcccattagattgcaccctctgccctcaggttcttgagggtgtgtggacacagaggctttccatgggatgtccctgagccggcccttgattggggcctcaccatttacagggccgttttattctgcaaaccgaaacttgggtcatgtgacctgatgggattatgggactccctccaggtgcccgagacaaggttgatatttccaaaatattttggtgatttagtgggacaagcaaatgacagaataccggagaaggcagggatcgtgggtgtcaggagccagaggggagggggacagatgtgctgtgtacaggacaaggtgtcaggtgactccttcccagcagggcctcgcagatgcacaagcacggagctggtgggttttgcccaagaaaggtcacgcggcacatgcagggattggaactcccaggccagggctctaggtcgctcccaccttttcatgtttctttctgtggccatgggtatagtggaaagacataaagctaaagccaacttttaatcctgaatgcactgcttgccaggtaaatgcccttggttgtggtatcttgttgagacttagttttcacagagggataatgaaccgttgcagaggtttattgagatcattaacagagtggaattcagcacccgccactgcactccagcctgggcgacagagcaagactcagtctcaaaaaaaaaaaaaattagctgggcagggcatggtgatggtgcctgtaatcctagctacttgggaggctgaggcatgagaattgcctgaacccaggaggtggaggttgcagtgagccgagatcgtgccactgtactccagcctgggtgacagcgcgagactccgtctcaaaaaaagctgggtgtggggaacacctgtggtcccagctattctggagactgaggcaggaggattgcttgagctcaggagttctggctgcagtgagctatgatcatgccactgtattacagaatgggtgacagaatgagagcgacactgtctcaaaaaaaaaaaaaaaaaaaggccgggagcggtcgtttgtgcctgtaatcccaacactttgggaggccagggtgggcggatcacttgaggccaggagttcaagaccagcctggccaacatggtgaatccccatctctactaaaaaaattaactggacatggtggtggacacttgtaatcccagctactcaggaggctgacacatgagaattgcttgaacccgggaggcggaggttacagtgagccgagatagcaccactgcactccaacctgggcacagagtaaggctctgtctttaaaaaaaaaaaaaaaaaaaaagttttgtcaaaacttagcagagcaaggctaagaaagctcaggaacctggggcctcggcgatgcctgtagtggcaacttatgtataggggctgcagggagaggttaggctgtggcattgagccctgatagcccctatcatcaggaagtggtagatttcagttaatcctgagttctgga

SEQ ID NO: 366505 - DNA, 5791 bp, Homo sapiens
  misc_feature (4408)..(4408): n is a, c, g, or t
ggcggccgccgtcggggccaagccggggccccgaagccagagccggagccgggcgggccgcggggtcatggctgggccgcggggcgcgctgctggcctggtgccgccgccagtgcgagggctaccgcggcgtggagatccgcgacctgagcagctccttccgggacggcctggccttctgcgccatcctgcaccggcaccggcccgacctgctagattttgattcgctttccaaggacaatgtcttcgagaataaccgtttggcctttgaagtggctgagaaggagctggggatccccgctctcctggaccccaatgacatggtctccatgagcgtccctgactgcctcagcatcatgacctatgtgtcccagtattacaaccacttctgcagtcctggccaagctggtgtctcgccacccagaaagggccttgcaccctgttccccgccgtctgtagcacccactccagtggaaccagaagatgtggctcagggcgaggagctctcctcaggcagcctgtcagagcagggcaccggccagacccccagcagcacgtgcgcagcctgccagcagcatgtgcacttggtgcagcgctacctggctgacggcaggctgtaccatcgccactgcttccggtgtcggcggtgctccagcaccctgctccctggggcttatgagaatgggcctgaggagggcacctttgtgtgtgcagaacactgtgccaggctgggcccggggacacggtcggggaccaggcctgggcccttctcacagccaaagcagcagcaccagcagcaactcgcagaagatgccaaggatgttccaggaggcggccccagctccagtgctcctgcaggggctgaggccgatggacccaaggccagccctgaggcccggccgcagatccctaccaagccccgggttcctggcaaactacaggagctggccagcccccctgcgggccgccccacccctgcccccaggaaggcctctgagagcaccaccccagcaccccccacgccccggccccgctccagtctgcagcaggagaacctggtggagcaggctggcagcagcagcctggtgaacgggagactgcacgaactgcctgtccccaagccgagggggacaccgaagccgtccgaggggacaccagcccccaggaaggaccccccatggatcacgctggtgcaggcagaaccaaagaagaagccagccccacttcccccaagcagcagcccggggccaccaagccaggacagcaggcaggtggagaatggaggcaccgaggaggtggcccagccgagcccaacggcagcctggagtccaaaccctataacccctttgaggaggaggaggaggacaaggaggaagaggctccagctgcacccagcctggccaccagccctgccctgggccacccggagtccacacccaagtccctgcacccctggtacggcatcacccctaccagcagccccaagacaaagaagcgccctgccccgcgcgcacccagcgcgtccccactggctctccacgcctcccgcctctcgcactcggagccgccctcggccacaccatcgccagcgctcagcgtggagagcctgtcgtctgagagcgccagccagactgcaggtgcagagcttctggagccgccagctgtgcccaagagctcctcagagcctgctgtccatgcccctggtacccctggaaaccctgtcagcctctctaccaactcctccctggcctcctctggggaactagtggagcctagagtggaacaaatgcctcaagccagccctggccttgcccccaggaccaggggcagctcaggtccccagccagccaagccctgcagtggcgccaccccaacgcctctcttgttggttggagacaggagcccggtgccttcccctggaagctcgtccccacagctgcaggtaaagtcctcctgcaaggagaatccttttaaccggaagccatcacctgcagcgtccccagccacaaagaaggccaccaagggatccaagccagtgaggccacctgcccctggacacggctttccactcatcaaacgcaaggtccaggctgaccagtacatccctgaggaggacatccatggagagatggataccattgagcgccggctggatgccctggagcaccgtggggtgctgctggaggagaagctgcgtggcggcctgaatgagggccgtgaggatgacatgctggtggactggttcaagctcatccacgagaagcacctactggtgcggcgagagtccgagctcatctatgtcttcaagcagcagaacctggagcagcgccaggctgatgtcgagtatgagctccggtgcctcctcaataagccagaaaaggactggacggaggaggaccgggcccgggagaaggtgctgatgcaggagcttgtgaccctcattgagcagcgcaacgctatcatcaactgcctggatgaggaccggcagagggaggaagaggaagacaagatgttggaagccatgatcaagaagaaagagttccagagggaggctgaacctgagggcaagaagaaggggaagttcaagaccatgaagatgttgaaactgctaggaaacaaacgtgatgccaagagcaagtcccccagagacaagagctaacagcacgagaagccagttggggactgccccctcctggagcagctcctgggctgtgctctgtttgaagggggcgccctgctcccctcagatcagtcaggaggaagatgactaaggggagggatcctctgggtgatggcctcttcctcctcagggacctctgactgctctgggccaaagaatctcttgtttcttctccgagccccaggcagcggtgattcagccctgcccaacctgattctgatgactgcggatgctgtgacggacccaaggggcaaatagggtcccagggtccagggaggggcgcctgctgagcacttccgcccctcaccctgcccagcccctgccatgagctctgggctgggtctccgcctccagggttctgctcttccaggcaggccagcaagtggcgctgggccacactggcttcttcctgccccatccctggctctgagtctctgtcttcctgtcctgtgcaggcgcccttggatctcagtttccctcactcaggaactctgtttctgaagtcttcagttaagtttgagtttatgactgagtggcctgtactgtcagacgtgaatgggcctgacgggcaaatccatccctctctccctcacagttccaggagcggcttccctcgtctccccttactccacagggagcctcccttgccaggaccagggctgcgacggccatgctggggcaggtgagtgctctgttagctgctcccagtgctgtccccaggctgcagttctggtccctggttgtcaggtaggaagggtgcacttgaagcaggtgctcatctcggttccttaacgtttatagtctgacccctcacttaggctttcctctgccaccccggtccagggaagaggctcgctcccgcccatggtcatcactggtctgtctgctctgttgtctgttctttccctgactccctcccaccgaaggcctgatggctactcacccctctgggatggctatgggagaggaggagtgatggggaccgccaccttttctgcaggaaatgtgcccagcagctcttggtcaaagcactgttgctataagctatctctgggatgcctctaggcccccttccctctacacacctctgggaaaagattacactgtattaactctcgaggagtttcctcaccaataaacagacaacctcaactgccagtgccctgcagcctcgggccacagcggcagccttgtttgccttcccacctgcctctgccacacctggtggctgaacatctctggtcgcccagaggccatgttggggccatcctccaagagggatctctgccctcaccgcctgccactgggcaggatccctttcctctgcagggagaggtggctcctcggccatgcagcccctggcaggctccttctaaacatgcctgttgacctggagctggcgccaccaactccagggcctttccagggccagacaggtaacacgcatgaacccgagtgacagctctgacgggctgtttcggtgtcaggagacaaagctggcaggggcaggggtgaactggaggcaagtcaagtcacctgtggcctgtggggctgaatgtgggcccggtgttgccagatcctttgtcataagaagctagaaatccagattttatgtgtgtgtaatttgtaaatgctgaaagctagcctgaattttttttttttttttgagacagagtctcgctctgtcgcccaggctggagtgcagtggcgcgatctcagctcactgcangctccgcctcctgggttcacgccatcctcctgcctcggcctcctgagcagctgggactacaggcgcatgctacgacgcctggctaattttttgtatttttagtagagacggggtttcaccgtgttaaccaggatggtctcgatctcctgaccttgtgatccacccaccttggcctcccaaagtgctgggattacaggcgtgagccaccacgcccggccactagcctgaatttcaatcaagggttggctgatactgtgtgtccagggtggactggatttgtcctggggggttctctggtttgctgcctcctgaccacatgatggggccttcgaggtcgaggacaactgttcccattagattgcaccctctgccctcaggttcttgagggtgtgtggacacagaggctttccatgggatgtccctgagccggcccttgattggggcctcaccatttacagggccgttttattctgcaaaccgaaacttgggtcatgtgacctgatgggattatgggactccctccaggtgcccgagacaaggttgatatttccaaaatattttggtgatttagtgggacaagcaaatgacagaataccggagaaggcagggatcgtgggtgtcaggagccagaggggagggggacagatgtgctgtgtacaggacaaggtgtcaggtgactccttcccagcagggcctcgcagatgcacaagcacggagctggtgggttttgcccaagaaaggtcacgcggcacatgcagggattggaactcccaggccagggctctaggtcgctcccaccttttcatgtttctttctgtggccatgggtatagtggaaagacataaagctaaagccaacttttaatcctgaatgcactgcttgccaggtaaatgcccttggttgtggtatcttgttgagacttagttttcacagagggataatgaaccgttgcagaggtttattgagatcattaacagagtggaattcagcacccgccacagcagccagccatggggtgcccaagaggttggttcccgttgccacttgaaatatgcaaacaggtagctagaaaccatctgggcttgacaaagtctaatgccttgaacaaataagcttatccctctgaaaacaaaatggtgcttgtaatgacccacgttaaatatgttttattggccagttaatcattgtggttgaatacttgcctaaggcggtaagaaatcaaataagtaaatcctaaaacaggaagaaaggaatcatattcattcctgaattcagaaaactaaatgaacaggccacaggtcagaagtggtgggaagcaggcccagtggatacctttagacacatgtcctagtagggatgctcgggctttgcttctctgcggac

SEQ ID NO: 366506 - DNA, 5818 bp, Homo sapiens
  misc_feature (4435)..(4435): n is a, c, g, or t
ggcggccgccgtcggggccaagccggggccccgaagccagagccggagccgggcgggccgcggggtcatggctgggccgcggggcgcgctgctggcctggtgccgccgccagtgcgagggctaccgcggcgtggagatccgcgacctgagcagctccttccgggacggcctggccttctgcgccatcctgcaccggcaccggcccgacctgctagattttgattcgctttccaaggacaatgtcttcgagaataaccgtttggcctttgaagtggctgagaaggagctggggatccccgctctcctggaccccaatgacatggtctccatgagcgtccctgactgcctcagcatcatgacctatgtgtcccagtattacaaccacttctgcagtcctggccaagctggtgtctcgccacccagaaagggccttgcaccctgttccccgccgtctgtagcacccactccagtggaaccagaagatgtggctcagggcgaggagctctcctcaggcagcctgtcagagcagggcaccggccagacccccagcagcacgtgcgcagcctgccagcagcatgtgcacttggtgcagcgctacctggctgacggcaggctgtaccatcgccactgcttccggtgtcggcggtgctccagcaccctgctccctggggcttatgagaatgggcctgaggagggcacctttgtgtgtgcagaacactgtgccaggctgggcccggggacacggtcggggaccaggcctgggcccttctcacagccaaagcagcagcaccagcagcaactcgcagaagatgccaaggatgttccaggaggcggccccagctccagtgctcctgcaggggctgaggccgatggacccaaggccagccctgaggcccggccgcagatccctaccaagccccgggttcctggcaaactacaggagctggccagcccccctgcgggccgccccacccctgcccccaggaaggcctctgagagcaccaccccagcaccccccacgccccggccccgctccagtctgcagcaggagaacctggtggagcaggctggcagcagcagcctggtgaacgggagactgcacgaactgcctgtccccaagccgagggggacaccgaagccgtccgaggggacaccagcccccaggaaggaccccccatggatcacgctggtgcaggcagaaccaaagaagaagccagccccacttcccccaagcagcagcccggggccaccaagccaggacagcaggcaggtggagaatggaggcaccgaggaggtggcccagccgagcccaacggcagcctggagtccaaaccctataacccctttgaggaggaggaggaggacaaggaggaagaggctccagctgcacccagcctggccaccagccctgccctgggccacccggagtccacacccaagtccctgcacccctggtacggcatcacccctaccagcagccccaagacaaagaagcgccctgccccgcgcgcacccagcgcgtccccactggctctccacgcctcccgcctctcgcactcggagccgccctcggccacaccatcgccagcgctcagcgtggagagcctgtcgtctgagagcgccagccagactgcaggtgcagagcttctggagccgccagctgtgcccaagagctcctcagagcctgctgtccatgcccctggtacccctggaaaccctgtcagcctctctaccaactcctccctggcctcctctggggaactagtggagcctagagtggaacaaatgcctcaagccagccctggccttgcccccaggaccaggggcagctcaggtccccagccagccaagccctgcagtggcgccaccccaacgcctctcttgttggttggagacaggagcccggtgccttcccctggaagctcgtccccacagctgcaggtaaagtcctcctgcaaggagaatccttttaaccggaagccatcacctgcagcgtccccagccacaaagaaggccaccaagggatccaagccagtgaggccacctgcccctggacacggctttccactcatcaaacgcaaggtccaggctgaccagtacatccctgaggaggacatccatggagagatggataccattgagcgccggctggatgccctggagcaccgtggggtgctgctggaggagaagctgcgtggcggcctgaatgagggccgtgaggatgacatgctggtggactggttcaagctcatccacgagaagcacctactggtgcggcgagagtccgagctcatctatgtcttcaagcagcagaacctggagcagcgccaggctgatgtcgagtatgagctccggtgcctcctcaataagccagaaaaggactggacggaggaggaccgggcccgggagaaggtgctgatgcaggagcttgtgaccctcattgagcagcgcaacgctatcatcaactgcctggatgaggaccggcagagggaggaagaggaagacaagatgttggaagccatgatcaagaagaaaggtgaggcccttgctggggatgaggctgagttccagagggaggctgaacctgagggcaagaagaaggggaagttcaagaccatgaagatgttgaaactgctaggaaacaaacgtgatgccaagagcaagtcccccagagacaagagctaacagcacgagaagccagttggggactgccccctcctggagcagctcctgggctgtgctctgtttgaagggggcgccctgctcccctcagatcagtcaggaggaagatgactaaggggagggatcctctgggtgatggcctcttcctcctcagggacctctgactgctctgggccaaagaatctcttgtttcttctccgagccccaggcagcggtgattcagccctgcccaacctgattctgatgactgcggatgctgtgacggacccaaggggcaaatagggtcccagggtccagggaggggcgcctgctgagcacttccgcccctcaccctgcccagcccctgccatgagctctgggctgggtctccgcctccagggttctgctcttccaggcaggccagcaagtggcgctgggccacactggcttcttcctgccccatccctggctctgagtctctgtcttcctgtcctgtgcaggcgcccttggatctcagtttccctcactcaggaactctgtttctgaagtcttcagttaagtttgagtttatgactgagtggcctgtactgtcagacgtgaatgggcctgacgggcaaatccatccctctctccctcacagttccaggagcggcttccctcgtctccccttactccacagggagcctcccttgccaggaccagggctgcgacggccatgctggggcaggtgagtgctctgttagctgctcccagtgctgtccccaggctgcagttctggtccctggttgtcaggtaggaagggtgcacttgaagcaggtgctcatctcggttccttaacgtttatagtctgacccctcacttaggctttcctctgccaccccggtccagggaagaggctcgctcccgcccatggtcatcactggtctgtctgctctgttgtctgttctttccctgactccctcccaccgaaggcctgatggctactcacccctctgggatggctatgggagaggaggagtgatggggaccgccaccttttctgcaggaaatgtgcccagcagctcttggtcaaagcactgttgctataagctatctctgggatgcctctaggcccccttccctctacacacctctgggaaaagattacactgtattaactctcgaggagtttcctcaccaataaacagacaacctcaactgccagtgccctgcagcctcgggccacagcggcagccttgtttgccttcccacctgcctctgccacacctggtggctgaacatctctggtcgcccagaggccatgttggggccatcctccaagagggatctctgccctcaccgcctgccactgggcaggatccctttcctctgcagggagaggtggctcctcggccatgcagcccctggcaggctccttctaaacatgcctgttgacctggagctggcgccaccaactccagggcctttccagggccagacaggtaacacgcatgaacccgagtgacagctctgacgggctgtttcggtgtcaggagacaaagctggcaggggcaggggtgaactggaggcaagtcaagtcacctgtggcctgtggggctgaatgtgggcccggtgttgccagatcctttgtcataagaagctagaaatccagattttatgtgtgtgtaatttgtaaatgctgaaagctagcctgaattttttttttttttttgagacagagtctcgctctgtcgcccaggctggagtgcagtggcgcgatctcagctcactgcangctccgcctcctgggttcacgccatcctcctgcctcggcctcctgagcagctgggactacaggcgcatgctacgacgcctggctaattttttgtatttttagtagagacggggtttcaccgtgttaaccaggatggtctcgatctcctgaccttgtgatccacccaccttggcctcccaaagtgctgggattacaggcgtgagccaccacgcccggccactagcctgaatttcaatcaagggttggctgatactgtgtgtccagggtggactggatttgtcctggggggttctctggtttgctgcctcctgaccacatgatggggccttcgaggtcgaggacaactgttcccattagattgcaccctctgccctcaggttcttgagggtgtgtggacacagaggctttccatgggatgtccctgagccggcccttgattggggcctcaccatttacagggccgttttattctgcaaaccgaaacttgggtcatgtgacctgatgggattatgggactccctccaggtgcccgagacaaggttgatatttccaaaatattttggtgatttagtgggacaagcaaatgacagaataccggagaaggcagggatcgtgggtgtcaggagccagaggggagggggacagatgtgctgtgtacaggacaaggtgtcaggtgactccttcccagcagggcctcgcagatgcacaagcacggagctggtgggttttgcccaagaaaggtcacgcggcacatgcagggattggaactcccaggccagggctctaggtcgctcccaccttttcatgtttctttctgtggccatgggtatagtggaaagacataaagctaaagccaacttttaatcctgaatgcactgcttgccaggtaaatgcccttggttgtggtatcttgttgagacttagttttcacagagggataatgaaccgttgcagaggtttattgagatcattaacagagtggaattcagcacccgccacagcagccagccatggggtgcccaagaggttggttcccgttgccacttgaaatatgcaaacaggtagctagaaaccatctgggcttgacaaagtctaatgccttgaacaaataagcttatccctctgaaaacaaaatggtgcttgtaatgacccacgttaaatatgttttattggccagttaatcattgtggttgaatacttgcctaaggcggtaagaaatcaaataagtaaatcctaaaacaggaagaaaggaatcatattcattcctgaattcagaaaactaaatgaacaggccacaggtcagaagtggtgggaagcaggcccagtggatacctttagacacatgtcctagtagggatgctcgggctttgcttctctgcggac

SEQ ID NO: 366507 - DNA, 4068 bp, Homo sapiens
ggcggccgccgtcggggccaagccggggccccgaagccagagccggagccgggcgggccgcggggtcatggctgggccgcggggcgcgctgctggcctggtgccgccgccagtgcgagggctaccgcggcgtggagatccgcgacctgagcagctccttccgggacggcctggccttctgcgccatcctgcaccggcaccggcccgacctgctagattttgattcgctttccaaggacaatgtcttcgagaataaccgtttggcctttgaagtggctgagaaggagctggggatccccgctctcctggaccccaatgacatggtctccatgagcgtccctgactgcctcagcatcatgacctatgtgtcccagtattacaaccacttctgcagtcctggccaagctggtgtctcgccacccagaaagggccttgcaccctgttccccgccgtctgtagcacccactccagtggaaccagaagatgtggctcagggcgaggagctctcctcaggcagcctgtcagagcagggcaccggccagacccccagcagcacgtgcgcagcctgccagcagcatgtgcacttggtgcagcgctacctggctgacggcaggctgtaccatcgccactgcttccggtgtcggcggtgctccagcaccctgctccctggggcttatgagaatgggcctgaggagggcacctttgtgtgtgcagaacactgtgccaggctgggcccggggacacggtcggggaccaggcctgggcccttctcacagccaaagcagcagcaccagcagcaactcgcagaagatgccaaggatgttccaggaggcggccccagctccagtgctcctgcaggggctgaggccgatggacccaaggccagccctgaggcccggccgcagatccctaccaagccccgggttcctggcaaactacaggagctggccagcccccctgcgggccgccccacccctgcccccaggaaggcctctgagagcaccaccccagcaccccccacgccccggccccgctccagtctgcagcaggagaacctggtggagcaggctggcagcagcagcctggtgaacgggagactgcacgaactgcctgtccccaagccgagggggacaccgaagccgtccgaggggacaccagcccccaggaaggaccccccatggatcacgctggtgcaggcagaaccaaagaagaagccagccccacttcccccaagcagcagcccggggccaccaagccaggacagcaggcaggtggagaatggaggcaccgaggaggtggcccagccgagcccaacggcagcctggagtccaaaccctataacccctttgaggaggaggaggaggacaaggaggaagaggctccagctgcacccagcctggccaccagccctgccctgggccacccggagtccacacccaagtccctgcacccctggtacggcatcacccctaccagcagccccaagacaaagaagcgccctgccccgcgcgcacccagcgcgtccccactggctctccacgcctcccgcctctcgcactcggagccgccctcggccacaccatcgccagcgctcagcgtggagagcctgtcgtctgagagcgccagccagactgcaggtgcagagcttctggagccgccagctgtgcccaagagctcctcagagcctgctgtccatgcccctggtacccctggaaaccctgtcagcctctctaccaactcctccctggcctcctctggggaactagtggagcctagagtggaacaaatgcctcaagccagccctggccttgcccccaggaccaggggcagctcaggtccccagccagccaagccctgcagtggcgccaccccaacgcctctcttgttggttggagacaggagcccggtgccttcccctggaagctcgtccccacagctgcaggtaaagtcctcctgcaaggagaatccttttaaccggaagccatcacctgcagcgtccccagccacaaagaaggccaccaagggatccaagccagtgaggccacctgcccctggacacggctttccactcatcaaacgcaaggtccaggctgaccagtacatccctgaggaggacatccatggagagatggataccattgagcgccggctggatgccctggagcaccgtggggtgctgctggaggagaagctgcgtggcggcctgaatgagggccgtgaggatgacatgctggtggactggttcaagctcatccacgagaagcacctactggtgcggcgagagtccgagctcatctatgtcttcaagcagcagaacctggagcagcgccaggctgatgtcgagtatgagctccggtgcctcctcaataagccagaaaaggactggacggaggaggaccgggcccgggagaaggtgctgatgcaggagcttgtgaccctcattgagcagcgcaacgctatcatcaactgcctggatgaggaccggcagagggaggaagaggaagacaagatgttggaagccatgatcaagaagaaagagttccagagggaggctgaacctgagggcaagaagaaggggaagttcaagaccatgaagatgttgaaactgctaggaaacaaacgtgatgccaagagcaagtcccccagagacaagagctaacagcacgagaagccagttggggactgccccctcctggagcagctcctgggctgtgctctgtttgaagggggcgccctgctcccctcagatcagtcaggaggaagatgactaaggggagggatcctctgggtgatggcctcttcctcctcagggacctctgactgctctgggccaaagaatctcttgtttcttctccgagccccaggcagcggtgattcagccctgcccaacctgattctgatgactgcggatgctgtgacggacccaaggggcaaatagggtcccagggtccagggaggggcgcctgctgagcacttccgcccctcaccctgcccagcccctgccatgagctctgggctgggtctccgcctccagggttctgctcttccaggcaggccagcaagtggcgctgggccacactggcttcttcctgccccatccctggctctgagtctctgtcttcctgtcctgtgcaggcgcccttggatctcagtttccctcactcaggaactctgtttctgaagtcttcagttaagtttgagtttatgactgagtggcctgtactgtcagacgtgaatgggcctgacgggcaaatccatccctctctccctcacagttccaggagcggcttccctcgtctccccttactccacagggagcctcccttgccaggaccagggctgcgacggccatgctggggcaggtgagtgctctgttagctgctcccagtgctgtccccaggctgcagttctggtccctggttgtcaggtaggaagggtgcacttgaagcaggtgctcatctcggttccttaacgtttatagtctgacccctcacttaggctttcctctgccaccccggtccagggaagaggctcgctcccgcccatggtcatcactggtctgtctgctctgttgtctgttctttccctgactccctcccaccgaaggcctgatggctactcaccccgtgtctactaaaaatacaaaaattagccaggcatggtggcgggcgctggtaatcccagctactcaggtggctgaggcaggagggattgcttgaacctgggaagtggaggctgcagtgagcccagatcacgccactgcactctagcctgggcaataagagcaagactgtctcaaaataaataaataaataaataaatagtgtttctcacttgttggcccttggccctcagggatcccctgactgctccatccaattctgggccccctcctcacattacccccacccccagcatgactggtccgtcggagtcttacgctcttcaaatcggtctagctcaggggctggagccttctgtcgtgcaggaggggcctttcttttccgttcctcccaaagtgctggaattacaggcatgagccatcacgcctgaccgatatcctatctct

SEQ ID NO: 366508 - DNA, 689 bp, Homo sapiens
tccagcctggacaacaagagtgagactccatctcaaaaaaacaaaacaaaacaaaatgaaaacaaaacacaaaacaacacctgattgggtaaaaaccactgctttattttcctgagccactactggatgcagccactcactggatgccacctctcagggggacctttgcttcttcctcttgcagcataaactgaaggcatttttcacaatttctgttgctgagttcgtgtgatttggtgattttattgttccactatgcttctgacagttactgttttctttatcctctgggaagtctagggtatggagtcgagcttggctggcagttgggaggagggaagggaggagacagccctgggtgcggctggaggggtagccagtgcctgggcccagctgcctggctaagtgaacccctgtcctgtcccctgccaggtgtcggcggtgctccagcaccctgctccctggggcttatgagaatgggcctgaggagggcacctttgtgtgtgcagaacactgtgccaggctgggcccggggacacggtcggggaccaggcctgggcccttctcacagccaaagcagcagcaccagcagcaactcgcagaagatgccaaggatgttccaggaggcggccccagctccagtgctcctgcaggggctgaggccgatggacccaaggccagccctgagg

SEQ ID NO: 366509 - DNA, 1277 bp, Homo sapiens
  misc_feature (19)..(20): n is a, c, g, or t
  misc_feature (22)..(22): n is a, c, g, or t
  misc_feature (28)..(28): n is a, c, g, or t
ctactactactaaattcgnngncgcgtngacagagcagcttatgggaactacataggctggaaatgaccctcctgagaatgtagctggctacaaagcatttcatttcacatacttgattgactgtcacctcctctcactgactcttgattatgttacaggaattatttcacaagctgattgttttttcccgtggattgttttcatagctttcacccaggctgctagagcgtggtctacatttcttttctttctttcttttttttcctttgggacaaggtcattctgttgcccaggctggagtgcagtggtgcgatcgcggctcactgcaggcttgacctccctgggctcaggtgatcctcccaccccagcctttctcgtagctaaaactgcaggcacgtgccaccatgcccagctaatttttttcaatttttggtagagacgggattttgctatgttacccaggctggtctcaaactcctgggcctaagggatccgcccacttctgcctcccagagtgctgggattacaggcgtgagccactgcacccagcctgagtatggtctatatttctgttggttaagatgttaaattcagtgatgttaaaacttattacatctactttaactttgataataggcataatgggaattaaataatcaggagaagacagtcttgtctttaggtcagaagtacttagaaataaaacttggaggattggtggaacaaaaaaaaaaagttaattcattctttatgcccctcagctaactgatattatttagtttattaagcaagatgactttgtttacttcatgctatgtggggtgattggttccccagggcatagttgcctttgtagttttgctaggcacattggagaaaatgataaggatttttctatttgcctagagcaggtggtctcttaatctttgttgtttagaacaagaacatgtttcttggttgtcaaagtggtggcagggtatttgaaaccagaaaaaccagcatttaagaaaaaaatcgggccaggcgtggtggctcacgcctgtaatcccagcactttgggaggcggagatgtgcggatcacgaggtcaggagattgagaccatcctggctaacacggtgaaaccccgtctctactaaaaatacaaaaaaattagctgggtgtggtggcgggtgcctgtagtctcagctactcaggaggctgaggcaggagaatggcatgaacctgggagggggagcttgcagtgagctgagattgcaccactgcactccagcctgg

SEQ ID NO: 366510 - DNA, 666 bp, Homo sapiens
acagaaaacagaatatgtttacaaatacacaagaaatagaacggagaacagaaaaaaaaacaaaaacaaaaaaaaacaaaaaaaaaaaaagaaaaaaaaaaaaaaaaaaaaaaaaaaaaaaaaaagttaattcattctttatgcccctcagctaactgatattatttagtttattaagcaagatgactttgtttacttcatgctatgtggggtgattggttccccagggcatagttgcctttgtagttttgctaggcacattggagaaaatgataaggatttttctatttgcctagagcaggtggtctcttaatctttgttgtttagaacaagaacatgtttcttggttgtcaaagtggtggcagggtatttgaaaccagaaaaaccagcatttaagaaaaaaatcgggccaggcgtggtggctcacgcctgtaatcccagcactttgggaggcggagatgtgcggatcacgaggtcaggagattgagaccatcctggctaacacggtgaaaccccgtctctactaaaaatacaaaaaaattagctgggtgtggtggcgggtgcctgtagtctcagctactcaggaggctgaggcaggagaatggcatgaacctgggagggggagcttgcagtgagctgagattgcaccactgcactccagcctgg

SEQ ID NO: 366511 - DNA, 564 bp, Homo sapiens
agtagaggggcaccacaaactgtgcccgtataagacaagaacttaataagtatagtgtgtgtaatgactactctaccatccagacattccagaggctctttggtctctctcttggctgagggaatttgggcataagcaggctgcaccctctggctaaataactcagcatcatgagggtggacctgagggtttaaagtagctctcattatatagatcctggatgttgagggttctctctcccacccccgcatccccagctcttaaaccctaacctcttactatttccatgacaactggcttcaattcaagccatttggctcagaaaaggttgagttagggtgatgatgggttagaaactaaacttcatgtgtccgccctcttgccctttactcccattcccaaccctggaggctttatacaagtgcttaagtgagtaggtgttggggagagcagggtttggggaataagggataaacggggcacagtgggcaggggccctcctattccagtaaagccaaataccaaaaaaatgaaaagtcacaataaataaataaataaaaattc

SEQ ID NO: 366512 - DNA, 1240 bp, Homo sapiens
agctcctggaggcggaggccgcgggtgggggcctagtggagtgaggggtaacaagatggcgaccgagacggtggagctccataagctaaagcttgccgaactaaagcaagaatgtcttgctcgtggtttggagaccaagggaataaagcaagatcttatccacagactccaggcatatcttgaagaacatgctgaagaggaggcaaatgaagaagatgtactgggagatgaaacagaggaagaagaaacaaagcccattgagctccctgtcaaagaggaagaaccccctgaaaaaactgttgatgtggcagcagagaagaaagtggtgaaaattacatctgaaataccacagactgagagaatgcagaagagggctgaacgattcaatgtacctgtgagcttggagagtaagaaagctgctcgggcagctaggtttgggatttcttcagttccaacaaaaggtctgtcatctgataacaaacctatggttaacttggataagctgaaggaaagagctcaaagatttggtttgaatgtctcttcaatctccagaaagtctgaagatgatgagaaactgaaaaagaggaaggagcgatttgggattgtcacaagttcagctggaactggaaccacagaggatacagaggcaaagaagaggaaaagagcagagcgctttgggattgcctgatgaaaagttcctgatactttctgttctccagtgttttccatttctctccttcttcttggtcacatatatgcctaaatgcacagtcatgtgcctacgtcctgcctcgcaatgagggagcatgtaccccaggtacatccatgaactgcggcagcagtttgacttattgctgtttcagctttaaggttgttgtgtttttgtttttgattatgttgcttgttaataaaaaaaaatagaaaagagaaaaaaaaactcttcgcaaaggctattcttatttggcgttgcggaagaaaaagaggtctttgaattgccacctggttcttagtctgtttcctgacccaatttttttgtttcaagcggtaggatttgccgggtcccctatagggagagcgtattaatttgcaataagccggttaactttatattggttggccagagagaccgccgggataacgccataaagcgcgtttgtgcggccacaaccctatctacactcgttactcgagacactggtctgcacagaacacgcttactctgcgtttgttgtctcatcac

SEQ ID NO: 366513 - DNA, 1334 bp, Homo sapiens
taagcatctggcttttattggttgcctttcttaaacccagcattttttaaaaagtcacctgaggtggtagtttagtcagggctggagaaaggggtaggccagtggtcagtcgggaggagggtacgcggggaggagtgaggggtaacaagatggcgaccgagacggtggagctccataagctaaagcttgccgaactaaagcaagaatgtcttgctcgtggtttggagaccaagggaataaagcaagatcttatccacagactccaggcatatcttgaagaacatgctgaagaggaggcaaatgaagaagatgtactgggagatgaaacagaggaagaagaaacaaagcccattgagctccctgtcaaagaggaagaaccccctgaaaaaactgttgatgtggcagcagagaagaaagtggtgaaaattacatctgaaataccacagactgagagaatgcagaagagggctgaacgattcaatgtacctgtgagcttggagagtaagaaagctgctcgggcagctaggtttgggatttcttcagttccaacaaaaggtctgtcatctgataacaaacctatggttaacttggataagctgaaggaaagagctcaaagatttggtttgaatgtctcttcaatctccagaaagtctgaagatgatgagaaactgaaaaagaggaaggagcgatttgggattgtcacaagttcagctggaactggaaccacagaggatacagaggcaaagaagaggaaaagagcagagcgctttgggattgcctgatgaaaagttcctgatactttctgttctccagtgttttccatttctctccttcttcttggtcacatatatgcctaaatgcacagtcatgtgcctacgtcctgcctcgcaatgagggagcatgtaccccaggtacatccatgaactgcggcagcagtttgacttattgctgtttcagctttaaggttgttgtgtttttgtttttgattatgttgcttgttaataaaaaaaaatagaaaagagaaaaaaaaactcttcgcaaaggctattcttatttggcgttgcggaagaaaaagaggtctttgaattgccacctggttcttagtctgtttcctgacccaatttttttgtttcaagcggtaggatttgccgggtcccctatagggagagcgtattaatttgcaataagccggttaactttatattggttggccagagagaccgccgggataacgccataaagcgcgtttgtgcggccacaaccctatctacactcgttactcgagacactggtctgcacagaacacgcttactctgcgtttgttgtctcatcac

SEQ ID NO: 366514 - DNA, 3210 bp, Homo sapiens
agctcctggaggcggaggccgcgggtgggggcctagtggagtgaggggtaacaagatggcgaccgagacggtggagctccataagctaaagcttgccgaactaaagcaagaatgtcttgctcgtggtttggagaccaagggaataaagcaagatcttatccacagactccaggcatatcttgaagaacatgctgaagaggaggcaaatgaagaagatgtactgggagatgaaacagaggaagaagaaacaaagcccattgagctccctgtcaaagaggaagaaccccctgaaaaaactgttgatgtggcagcagagaagaaagtggtgaaaattacatctgaaataccacagactgagagaatgcagaagagggctgaacgattcaatgtacctgtgagcttggagagtaagaaagctgctcgggcagctaggtttgggatttcttcagttccaacaaaaggtctgtcatctgataacaaacctatggttaacttggataagctgaaggaaagagctcaaagatttggtttgaatgtctcttcaatctccagaaagtctgaagatgatgagaaactgaaaaagaggaaggagcgatttgggattgtcacaagttcagctggaactggaaccacagaggatacagaggcaaagaagaggaaaagagcagagcgctttgggattgcctgatgaaaagttcctgatactttctgttctccagtgttttccatttctctccttcttcttggtcacatatatgcctaaatgcacagtcatgtgcctacgtcctgcctcgcaatgagggagcatgtaccccaggttcaagtgctggattgtgtcatgtgaccatcccaaaactcagagcaccctatggccgtctttgccctctgtcacataacttgaaaactgcctgatggcctttttgcagtggttccctccaggaagccttgatctcagttgaagaagttctttcctggcattccaatgcccctgtcagctccatactcctcagacacccttaacaaaggctgtcatgcacacaatgtgacaaatacacaaaataaatgataattacactaataatgatatgttcagaggggcactggccaggtccacacacatcataaggtgggagggggtgctaactcccactgggttgctgagctgtgccccccaagtcccttcactctgtgcctctttgggggtagggaggaacaggggaatgagacttcagctcacagatttatgttcataagagaaagacccctgccccccccccacccaccacacacacacaaaggtctttatttggtggtatttaaggagctgtattctaagtgtcccccatatttaatgccccagctctctagaatctgtagagggaagatacctgatgcttattgcccaatccctactctgccaagatcacgaggcatttgaccttggagggaggtatctgttcttcacttctctgttcctttccttccaccaaggaaatgtgagtggtgttgatggccgggtgtgtcttgtccttcaggattggggcagaaggaaggatgaagaacagggccagagaggcttggggttagcatagctgctatatgggtgaaggcaagctgaagagcctaacagccctgcccattcctctactgaaagatcttgtttcactttctcactataagaataggaataagatgttaaagctcaccaacatcaccttctcaagggtggtcacatacctttgccccttccaccaactggccaagggggagagtcatgctcttgggaagaatgagccatccagttttgctcaccagcttgggctttactttagttcagtactgtttttatcagacccgtaactgctggctctacttagagtgacagttttgctgaagattcttacccccacctctcctgacatcctctaagctcttgcctggagccaagaggcctggtggtgaagtaaggatagggtgtggatcaggagattctcaactccttggcttctaggcactgtccagctgggaggcagaggggaacttgtactctgaagcctgtgactcctcttaagcctcacatctcttcaccactactctggtgccctggttatctgtcccacagcgagaggtattttatgtccataaagtgcccgtggtaagtgctcagaattcatctcttggctgtggcgggtgctgtcatttctcattccattgaggggaagaaactgaggcacagtgagtccagaggagaatgggtcagggttgtgggaggaatgaatgggcctagctagtgacttgaaatggcaaccagtctctgcctgcttcctagccttccaagcccgggagtctccatccttcccatcctctgttctaactggccttgtcagatgcttttccccactgtactttcccctccctgctgccaggtactgttagattccaaaaataaaaggaaaaaataattatacactctgcttccttgttctcccctcttccaccctgagctttggggttaggagactaaaatgtcccccttccagaatccttcccaccttggtctgctggctctattccctagcccagagcagtgatttggattcaaatgccctgtaaccttcagcctccttactgctcctttcttgacctctcctaacgctttccagacccaggggactctggggtctctatactctctctaattgacctgaagatagaggctgggagcagggccattccagaggctctttggtctctctcttggctgagggaatttgggcataagcaggctgcaccctctggctaaataactcagcatcatgagggtggacctgagggtttaaagtagctctcattatatagatcctggatgttgagggttctctctcccacccccgcatccccagctcttaaaccctaacctcttactatttccatgacaactggcttcaattcaagccatttggctcagaaaaggttgagttagggtgatgatgggttagaaactaaacttcatgtgtccgccctcttgccctttactcccattcccaaccctggaggctttatacaagtgcttaagtgagtaggtgttggggagagcagggtttggggaataagggataaacggggcacagtgggcaggggccctcctattccagtaaagccaaataccaaaaaaatgaaaagtcacaataaataaataaataaaaattc

SEQ ID NO: 366515 - DNA, 1918 bp, Homo sapiens
gaagggctgagttggacttttctaggaactgaattctacagggtagcttgcgcctttcctacgtcttctccgtgcagccttttccacttcgtttctcggctcccgccgtagctcttttgtgccacccttccacactacgccttccctaatttcccatttctcctcacggctttactgctatatttatttgttatttctgcttccttcatcattgtatcgtccgtcacccttccccactgggttgtgtaagtgccttctacctgttatactcttcgttgcttttcagggctgcattacgtcagttggtccctcctttttgccccatgtcggagccaggatccgtttttcttccctgggatgatgtttccagtctgtcgtccgaagctgagatttccctgttagcaaatggtggcatttttgtgtatttctgtctaaataggtaccagacactcagaaaatacttccactccccttttctaggtgggattacgccccaagccgaattttgaaacagggagaggcctctcagaagatcggtctcgccttagaagcctggggttgaggaggtcttgagaatagtagaagtacagacacctcagatttaaaagttttcgagttctgtcacgcggctctcggcccgccagccttcctcacacaccatctccaaccaccagagagaactcacacctgcaatatttgggaaaaacaattccaagagcacttcttaaccttttggaggtcacagatatctttgaaactctgatgaaagcttgccgaactaaagcaagaatgtcttgctcgtggtttggagaccaagggaataaagcaagatcttatccacagactccaggcatatcttgaagaacatgctgaagaggaggcaaatgaagaagatgtactgggagatgaaacagaggaagaagaaacaaagcccattgagctccctgtcaaagaggaagaaccccctgaaaaaactgttgatgtggcagcagagaagaaagtggtgaaaattacatctgaaataccacagactgagagaatgcagaagagggctgaacgattcaatgtacctgtgagcttggagagtaagaaagctgctcgggcagctaggtttgggatttcttcagttccaacaaaaggtctgtcatctgataacaaacctatggttaacttggataagctgaaggaaagagctcaaagatttggtttgaatgtctcttcaatctccagaaagtctgaagatgatgagaaactgaaaaagaggaaggagcgatttgggattgtcacaagttcagctggaactggaaccacagaggatacagaggcaaagaagaggaaaagagcagagcgctttgggattgcctgatgaaaagttcctgatactttctgttctccagtgttttccatttctctccttcttcttggtcacatatatgcctaaatgcacagtcatgtgcctacgtcctgcctcgcaatgagggagcatgtaccccaggtacatccatgaactgcggcagcagtttgacttattgctgtttcagctttaaggttgttgtgtttttgtttttgattatgttgcttgttaataaaaaaaaatagaaaagagaaaaaaaaactcttcgcaaaggctattcttatttggcgttgcggaagaaaaagaggtctttgaattgccacctggttcttagtctgtttcctgacccaatttttttgtttcaagcggtaggatttgccgggtcccctatagggagagcgtattaatttgcaataagccggttaactttatattggttggccagagagaccgccgggataacgccataaagcgcgtttgtgcggccacaaccctatctacactcgttactcgagacactggtctgcacagaacacgcttactctgcgtttgttgtctcatcac

SEQ ID NO: 366516 - DNA, 1106 bp, Homo sapiens
ctagagttccatatcttcgctcatatactctccttcaggcatatcttgaagaacatgctgaagaggaggcaaatgaagaagatgtactgggagatgaaacagaggaagaagaaacaaagcccattgagctccctgtcaaagaggaagaaccccctgaaaaaactgttgatgtggcagcagagaagaaagtggtgaaaattacatctgaaataccacagactgagagaatgcagaagagggctgaacgattcaatgtacctgtgagcttggagagtaagaaagctgctcgggcagctaggtttgggatttcttcagttccaacaaaaggtctgtcatctgataacaaacctatggttaacttggataagctgaaggaaagagctcaaagatttggtttgaatgtctcttcaatctccagaaagtctgaagatgatgagaaactgaaaaagaggaaggagcgatttgggattgtcacaagttcagctggaactggaaccacagaggatacagaggcaaagaagaggaaaagagcagagcgctttgggattgcctgatgaaaagttcctgatactttctgttctccagtgttttccatttctctccttcttcttggtcacatatatgcctaaatgcacagtcatgtgcctacgtcctgcctcgcaatgagggagcatgtaccccaggtacatccatgaactgcggcagcagtttgacttattgctgtttcagctttaaggttgttgtgtttttgtttttgattatgttgcttgttaataaaaaaaaatagaaaagagaaaaaaaaactcttcgcaaaggctattcttatttggcgttgcggaagaaaaagaggtctttgaattgccacctggttcttagtctgtttcctgacccaatttttttgtttcaagcggtaggatttgccgggtcccctatagggagagcgtattaatttgcaataagccggttaactttatattggttggccagagagaccgccgggataacgccataaagcgcgtttgtgcggccacaaccctatctacactcgttactcgagacactggtctgcacagaacacgcttactctgcgtttgttgtctcatcac

SEQ ID NO: 366517 - DNA, 1062 bp, Homo sapiens
ggtctgtggataagatcttgctttattcccttggtctccaggcatatcttgaagaacatggaagaagaaacaaagcccattgagctccctgtcaaagaggaagaaccccctgaaaaaactgttgatgtggcagcagagaagaaagtggtgaaaattacatctgaaataccacagactgagagaatgcagaagagggctgaacgattcaatgtacctgtgagcttggagagtaagaaagctgctcgggcagctaggtttgggatttcttcagttccaacaaaaggtctgtcatctgataacaaacctatggttaacttggataagctgaaggaaagagctcaaagatttggtttgaatgtctcttcaatctccagaaagtctgaagatgatgagaaactgaaaaagaggaaggagcgatttgggattgtcacaagttcagctggaactggaaccacagaggatacagaggcaaagaagaggaaaagagcagagcgctttgggattgcctgatgaaaagttcctgatactttctgttctccagtgttttccatttctctccttcttcttggtcacatatatgcctaaatgcacagtcatgtgcctacgtcctgcctcgcaatgagggagcatgtaccccaggtacatccatgaactgcggcagcagtttgacttattgctgtttcagctttaaggttgttgtgtttttgtttttgattatgttgcttgttaataaaaaaaaatagaaaagagaaaaaaaaactcttcgcaaaggctattcttatttggcgttgcggaagaaaaagaggtctttgaattgccacctggttcttagtctgtttcctgacccaatttttttgtttcaagcggtaggatttgccgggtcccctatagggagagcgtattaatttgcaataagccggttaactttatattggttggccagagagaccgccgggataacgccataaagcgcgtttgtgcggccacaaccctatctacactcgttactcgagacactggtctgcacagaacacgcttactctgcgtttgttgtctcatcac

SEQ ID NO: 366518 - DNA, 910 bp, Homo sapiens
agctcctggaggcggaggccgcgggtgggggcctagtggagtgaggggtaacaagatggcgaccgagacggtggagctccataagctaaagcttgccgaactaaagcaagaatgtcttgctcgtggtttggagaccaagggaataaagcaagatcttatccacagactccaggcatatcttgaagaacatgctgaagaggaggcaaatgaagaagatgtactgggagatgaaacagaggaagaagaaacaaagcccattgagctccctgtcaaagaggaagaaccccctgaaaaaactgttgatgtggcagcagagaagaaagtggtgaaaattacatctgaaataccacagactgagagaatgcagaagagggctgaacgattcaatgtacctgtgagcttggagagtaagaaagctgctcgggcagctaggtttgggatttcttcagttccaacaaaaggtctgtcatctgataacaaacctatggttaacttggataagctgaaggaaagagctcaaagatttggtttgaatgtctcttcaatctccagaaagtctgaagatgatgagaaactgaaaaagaggaaggagcgatttgggattgtcacaagttcagctggaactggaaccacagaggatacagaggcaaagaagaggaaaagagcagagcgctttgggattgcctgatgaaaagttcctgatactttctgttctccagtgttttccatttctctccttcttcttggtcacatatatgcctaaatgcacagtcatgtgcctacgtcctgccctcccattaaggagccaggacccccgggtcaacccttaacttcggccaccggtttgcttaatgctggttcaaccttaagggtggtggggttttggttttgaatatggtgcctggttata

SEQ ID NO: 366519 - DNA, 3675 bp, Homo sapiens
ggttgcgtgtgttttgattctgtgttttcttgtttttcctctgcctgcgctgtttctcttcactttttctttctctcgtgtattatcacctggcattacgcggattcggttggtaccttccctaatgtattgtgctggctaattgtggtgttgtccatttggccagcccggagtaggtcttccaagatgccagctggccgtcttcccatcgggcggtggtaaaccgcgccctgtctctgctttttattcgtcccccaatggggccacctggaccaagaaagcggatggcttaaattggggcccccggggatattttttacccccccccttttttttttttttttttttttttggagatgggagtctcactctgtcaccatgctagagtgcagtggtgcgatctcagctcactgcaacctccgccacctgggttcaagcgattcttctgcctcagccttccatgtagctgggattacaggcgcacgccaccacgcccggctaattttgggtattttagtagagatgaggtttcacaatgttggccagcatggtctcgaactccggaccttgcatgatccgcccgcctcggccccccaaagtgctgggattacagatgtaagccactgcgcccagccagctttccttatttttgaaaaatgtgagtcaggcaatattcttttgccattcccaactcatattcctggggaattgtgctctaggtacatgggaaaaatttttacagtgaactgaaagaatatttgagatgctattttagccactcttgtgtaacaaggcaagttcgttggctatgttggtttagatttttgtcaaacttcgttgaggaaacctaggaacagggactgcaggagaataggacactagctggatcatctcaagagaacctttagatcttccatactagctggatcatctcaagagaacctttagatcttccattctgtggaggctgggagaggggtcttgttgtctttgggactgttttggctcaagcttttcagagaggggttgttctaggtacccccagtttcctgtcctctttccatccttccttggcctgcatgtcccaaaccttataccaccatgcccttagtgttttctgtcttgctccaggaccccatcttcttagtcattgaacacgaggtttcctgtctcagatcctcttcacctccggttctccaaggtgtaaatgtggcacttgattagggagaagagctcagcactgaattctaaactctttgaccgcttttattttttttttcaggttcaagtgctggattgtgtcatgtgaccatcccaaaactcagagcaccctatggccgtctttgccctctgtcacataacttgaaaactgcctgatggcctttttgcagtggttccctccaggaagccttgatctcagttgaagaagttctttcctggcattccaatgcccctgtcagctccatactcctcagacacccttaacaaaggctgtcatgcacacaatgtgacaaatacacaaaataaatgataattacactaataatgatatgttcagaggggcactggccaggtccacacacatcataaggtgggagggggtgctaactcccactgggttgctgagctgtgccccccaagtcccttcactctgtgcctctttgggggtagggaggaacaggggaatgagacttcagctcacagatttatgttcataagagaaagacccctgccccccccccacccaccacacacacacaaaggtctttatttggtggtatttaaggagctgtattctaagtgtcccccatatttaatgccccagctctctagaatctgtagagggaagatacctgatgcttattgcccaatccctactctgccaagatcacgaggcatttgaccttggagggaggtatctgttcttcacttctctgttcctttccttccaccaaggaaatgtgagtggtgttgatggccgggtgtgtcttgtccttcaggattggggcagaaggaaggatgaagaacagggccagagaggcttggggttagcatagctgctatatgggtgaaggcaagctgaagagcctaacagccctgcccattcctctactgaaagatcttgtttcactttctcactataagaataggaataagatgttaaagctcaccaacatcaccttctcaagggtggtcacatacctttgccccttccaccaactggccaagggggagagtcatgctcttgggaagaatgagccatccagttttgctcaccagcttgggctttactttagttcagtactgtttttatcagacccgtaactgctggctctacttagagtgacagttttgctgaagattcttacccccacctctcctgacatcctctaagctcttgcctggagccaagaggcctggtggtgaagtaaggatagggtgtggatcaggagattctcaactccttggcttctaggcactgtccagctgggaggcagaggggaacttgtactctgaagcctgtgactcctcttaagcctcacatctcttcaccactactctggtgccctggttatctgtcccacagcgagaggtattttatgtccataaagtgcccgtggtaagtgctcagaattcatctcttggctgtggcgggtgctgtcatttctcattccattgaggggaagaaactgaggcacagtgagtccagaggagaatgggtcagggttgtgggaggaatgaatgggcctagctagtgacttgaaatggcaaccagtctctgcctgcttcctagccttccaagcccgggagtctccatccttcccatcctctgttctaactggccttgtcagatgcttttccccactgtactttcccctccctgctgccaggtactgttagattccaaaaataaaaggaaaaaataattatacactctgcttccttgttctcccctcttccaccctgagctttggggttaggagactaaaatgtcccccttccagaatccttcccaccttggtctgctggctctattccctagcccagagcagtgatttggattcaaatgccctgtaaccttcagcctccttactgctcctttcttgacctctcctaacgctttccagacccaggggactctggggtctctatactctctctaattgacctgaagatagaggctgggagcagggccattccagaggctctttggtctctctcttggctgagggaatttgggcataagcaggctgcaccctctggctaaataactcagcatcatgagggtggacctgagggtttaaagtagctctcattatatagatcctggatgttgagggttctctctcccacccccgcatccccagctcttaaaccctaacctcttactatttccatgacaactggcttcaattcaagccatttggctcagaaaaggttgagttagggtgatgatgggttagaaactaaacttcatgtgtccgccctcttgccctttactcccattcccaaccctggaggctttatacaagtgcttaagtgagtaggtgttggggagagcagggtttggggaataagggataaacggggcacagtgggcaggggccctcctattccagtaaagccaaataccaaaaaaatgaaaagtcacaataaataaataaataaaaattc

SEQ ID NO: 366520 - DNA, 839 bp, Homo sapiens
  misc_feature (16)..(16): n is a, c, g, or t
  misc_feature (68)..(68): n is a, c, g, or t
ggagagtaagaaagcngctcgggcagctagggttgggatttcttcagttccaacaaaaggtctgtcantctgataacaaacctatggttaacttggataagctgaaggaaagagctcaaagatttggtttgaatgtctcttcaatctccagaaagtctgaagatgatgagaaactgaaaaagaggaaggagcgatttgggattgtcacaagttcagctggaactggaaccacagaggatacagaggcaaagaagaggaaaagagcagagcgctttgggattgcctgatgaaaagttcctgatactttctgttctccagtgttttccatttctctccttcttcttggtcacatatatgcctaaatgcacagtcatgtgcctacgtcctgcctcgcaatgagggagcatgtaccccaggtacatccatgaactgcggcagcagtttgacttattgctgtttcagctttaaggttgttgtgtttttgtttttgattatgttgcttgttaataaaaaaaaatagaaaagagaaaaaaaaactcttcgcaaaggctattcttatttggcgttgcggaagaaaaagaggtctttgaattgccacctggttcttagtctgtttcctgacccaatttttttgtttcaagcggtaggatttgccgggtcccctatagggagagcgtattaatttgcaataagccggttaactttatattggttggccagagagaccgccgggataacgccataaagcgcgtttgtgcggccacaaccctatctacactcgttactcgagacactggtctgcacagaacacgcttactctgcgtttgttgtctcatcac

SEQ ID NO: 366521 - DNA, 3000 bp, Homo sapiens
catctccttcacctctatgaatagcattggttaatcctttatcctctgaaatcttccgtctccccattgactggaagacttttcccagcctgttaagagcccattgtttccaggctagcttgatctcaggctgagtggctctctttgcttcaggaatcttcccattttctaccactgttcttctctctgtccctcacccccagtaatcttctttactcctcaccctccttacccattaaactttccagctcctactggataactggaaggattggagagattcaggaatgaaatctctagctaccaagctcaagtctgggccatccttccttctcgggccttgtgacagttcatgtgagtttggattaaagcagccaggaacccaggcaactattgtcttcagtctaatttttttcttcttgcttcttctttacaggcaaagaagaggaaaagagcagagcgctttgggattgcctgatgaaaagttcctgatactttctgttctccagtgttttccatttctctccttcttcttggtcacatatatgcctaaatgcacagtcatgtgcctacgtcctgcctcgcaatgagggagcatgtaccccaggttcaagtgctggattgtgtcatgtgaccatcccaaaactcagagcaccctatggccgtctttgccctctgtcacataacttgaaaactgcctgatggcctttttgcagtggttccctccaggaagccttgatctcagttgaagaagttctttcctggcattccaatgcccctgtcagctccatactcctcagacacccttaacaaaggctgtcatgcacacaatgtgacaaatacacaaaataaatgataattacactaataatgatatgttcagaggggcactggccaggtccacacacatcataaggtgggagggggtgctaactcccactgggttgctgagctgtgccccccaagtcccttcactctgtgcctctttgggggtagggaggaacaggggaatgagacttcagctcacagatttatgttcataagagaaagacccctgccccccccccacccaccacacacacacaaaggtctttatttggtggtatttaaggagctgtattctaagtgtcccccatatttaatgccccagctctctagaatctgtagagggaagatacctgatgcttattgcccaatccctactctgccaagatcacgaggcatttgaccttggagggaggtatctgttcttcacttctctgttcctttccttccaccaaggaaatgtgagtggtgttgatggccgggtgtgtcttgtccttcaggattggggcagaaggaaggatgaagaacagggccagagaggcttggggttagcatagctgctatatgggtgaaggcaagctgaagagcctaacagccctgcccattcctctactgaaagatcttgtttcactttctcactataagaataggaataagatgttaaagctcaccaacatcaccttctcaagggtggtcacatacctttgccccttccaccaactggccaagggggagagtcatgctcttgggaagaatgagccatccagttttgctcaccagcttgggctttactttagttcagtactgtttttatcagacccgtaactgctggctctacttagagtgacagttttgctgaagattcttacccccacctctcctgacatcctctaagctcttgcctggagccaagaggcctggtggtgaagtaaggatagggtgtggatcaggagattctcaactccttggcttctaggcactgtccagctgggaggcagaggggaacttgtactctgaagcctgtgactcctcttaagcctcacatctcttcaccactactctggtgccctggttatctgtcccacagcgagaggtattttatgtccataaagtgcccgtggtaagtgctcagaattcatctcttggctgtggcgggtgctgtcatttctcattccattgaggggaagaaactgaggcacagtgagtccagaggagaatgggtcagggttgtgggaggaatgaatgggcctagctagtgacttgaaatggcaaccagtctctgcctgcttcctagccttccaagcccgggagtctccatccttcccatcctctgttctaactggccttgtcagatgcttttccccactgtactttcccctccctgctgccaggtactgttagattccaaaaataaaaggaaaaaataattatacactctgcttccttgttctcccctcttccaccctgagctttggggttaggagactaaaatgtcccccttccagaatccttcccaccttggtctgctggctctattccctagcccagagcagtgatttggattcaaatgccctgtaaccttcagcctccttactgctcctttcttgacctctcctaacgctttccagacccaggggactctggggtctctatactctctctaattgacctgaagatagaggctgggagcagggccattccagaggctctttggtctctctcttggctgagggaatttgggcataagcaggctgcaccctctggctaaataactcagcatcatgagggtggacctgagggtttaaagtagctctcattatatagatcctggatgttgagggttctctctcccacccccgcatccccagctcttaaaccctaacctcttactatttccatgacaactggcttcaattcaagccatttggctcagaaaaggttgagttagggtgatgatgggttagaaactaaacttcatgtgtccgccctcttgccctttactcccattcccaaccctggaggctttatacaagtgcttaagtgagtaggtgttggggagagcagggtttggggaataagggataaacggggcacagtgggcaggggccctcctattccagtaaagccaaataccaaaaaaatgaaaagtcacaataaataaataaataaaaattc

SEQ ID NO: 366522 - DNA, 1841 bp, Homo sapiens
agctcctggaggcggaggccgcgggtgggggcctagtggagtgaggggtaacaagatggcgaccgagacggtggagctccataagctaaagcttgccgaactaaagcaagaatgtcttgctcgtggtttggagaccaagggaataaagcaagatcttatccacagactccaggcatatcttgaagaacatgctgaagaggaggcaaatgaagaagatgtactgggagatgaaacagaggaagaagaaacaaagcccattgagctccctgtcaaagaggaagaaccccctgaaaaaactgttgatgtggcagcagagaagaaagtggtgaaaattacatctgaaataccacagactgagagaatgcagaagagggctgaacgattcaatgtacctgtgagcttggagagtaagaaagctgctcgggcagctaggtttgggatttcttcagttccaacaaaaggtctgtcatctgataacaaacctatggttaacttggataagctgaaggaaagagctcaaagatttggtttgaatgtctcttcaatctccagaaaggtaatgtaggctcgatggaagtaatgtttttgtgacattagagcagcttatgggaactacataggctggaaatgaccctcctgagaatgtagctggctacaaagcatttcatttcacatacttgattgactgtcacctcctctcactgactcttgattatgttacaggaattatttcacaagctgattgttttttcccgtggattgttttcatagctttcacccaggctgctagagcgtggtctacatttcttttctttctttcttttttttcctttgggacaaggtcattctgttgcccaggctggagtgcagtggtgcgatcgcggctcactgcaggcttgacctccctgggctcaggtgatcctcccaccccagcctttctcgtagctaaaactgcaggcacgtgccaccatgcccagctaatttttttcaatttttggtagagacgggattttgctatgttacccaggctggtctcaaactcctgggcctaagggatccgcccacttctgcctcccagagtgctgggattacaggcgtgagccactgcacccagcctgagtatggtctatatttctgttggttaagatgttaaattcagtgatgttaaaacttattacatctactttaactttgataataggcataatgggaattaaataatcaggagaagacagtcttgtctttaggtcagaagtacttagaaataaaacttggaggattggtggaacaaaaaaaaaaagttaattcattctttatgcccctcagctaactgatattatttagtttattaagcaagatgactttgtttacttcatgctatgtggggtgattggttccccagggcatagttgcctttgtagttttgctaggcacattggagaaaatgataaggatttttctatttgcctagagcaggtggtctcttaatctttgttgtttagaacaagaacatgtttcttggttgtcaaagtggtggcagggtatttgaaaccagaaaaaccagcatttaagaaaaaaatcgggccaggcgtggtggctcacgcctgtaatcccagcactttgggaggcggagatgtgcggatcacgaggtcaggagattgagaccatcctggctaacacggtgaaaccccgtctctactaaaaatacaaaaaaattagctgggtgtggtggcgggtgcctgtagtctcagctactcaggaggctgaggcaggagaatggcatgaacctgggagggggagcttgcagtgagctgagattgcaccactgcactccagcctgg

SEQ ID NO: 366523 - DNA, 1150 bp, Homo sapiens
agctcctggaggcggaggccgcgggtgggggcctagtggagtgaggggtaacaagatggcgaccgagacggtggagctccataagctaaagcttgccgaactaaagcaagaatgtcttgctcgtggtttggagaccaagggaataaagcaagatcttatccacagactccaggcatatcttgaagaacatgctgaagaggaggcaaatgaagaagatgtactgggagatgaaacagaggaagaagaaacaaagcccattgagctccctgtcaaagaggaagaaccccctgaaaaaactgttgatgtggcagcagagaagaaagtggtgaaaattacatctgaaataccacagactgagagaatgcagaagagggctgaacgattcaatgtacctgtgagcttggagagtaagaaagctgctcgggcagctaggtttgggatttcttcagttccaacaaaaggtctgtcatctgataacaaacctatggttaacttggataagctgaaggaaagagctcaaagatttggtttgaatgtctcttcaatctccagaaaggcaaagaagaggaaaagagcagagcgctttgggattgcctgatgaaaagttcctgatactttctgttctccagtgttttccatttctctccttcttcttggtcacatatatgcctaaatgcacagtcatgtgcctacgtcctgcctcgcaatgagggagcatgtaccccaggtacatccatgaactgcggcagcagtttgacttattgctgtttcagctttaaggttgttgtgtttttgtttttgattatgttgcttgttaataaaaaaaaatagaaaagagaaaaaaaaactcttcgcaaaggctattcttatttggcgttgcggaagaaaaagaggtctttgaattgccacctggttcttagtctgtttcctgacccaatttttttgtttcaagcggtaggatttgccgggtcccctatagggagagcgtattaatttgcaataagccggttaactttatattggttggccagagagaccgccgggataacgccataaagcgcgtttgtgcggccacaaccctatctacactcgttactcgagacactggtctgcacagaacacgcttactctgcgtttgttgtctcatcac

SEQ ID NO: 366524 - DNA, 828 bp, Homo sapiens
ttatgtatcttatctctttatgtgatccttagttcttggcacagggttggttagcaccttgtgaccaataagttatcatttcattcccatttacttggtgaatggaggctagtttgtttcaactctttcctttgtccttgaacatctgaagatgatgagaaactgaaaaagaggaaggagcgatttgggattgtcacaagttcagctggaactggaaccacagaggatacagaggcaaagaagaggaaaagagcagagcgctttgggattgcctgatgaaaagttcctgatactttctgttctccagtgttttccatttctctccttcttcttggtcacatatatgcctaaatgcacagtcatgtgcctacgtcctgcctcgcaatgagggagcatgtaccccaggtacatccatgaactgcggcagcagtttgacttattgctgtttcagctttaaggttgttgtgtttttgtttttgattatgttgcttgttaataaaaaaaaatagaaaagagaaaaaaaaactcttcgcaaaggctattcttatttggcgttgcggaagaaaaagaggtctttgaattgccacctggttcttagtctgtttcctgacccaatttttttgtttcaagcggtaggatttgccgggtcccctatagggagagcgtattaatttgcaataagccggttaactttatattggttggccagagagaccgccgggataacgccataaagcgcgtttgtgcggccacaaccctatctacactcgttactcgagacactggtctgcacagaacacgcttactctgcgtttgttgtctcatcac

SEQ ID NO: 366525 - DNA, 670 bp, Homo sapiens
  misc_feature (570)..(570): n is a, c, g, or t
agctcctggaggcggaggccgcgggtgggggcctagtggagtgaggggtaacaagatggcgaccgagacggtggagctccataagctaaagcttgccgaactaaagcaagaatgtcttgctcgtggtttggagaccaagggaataaagcaagatcttatccacagactccaggcatatcttgaagaacatgctgaagaggaggcaaatgaagaagatgtactgggagatgaaacagaggaagaagaaacaaagcccattgagctccctgtcaaagaggaagaaccccctgaaaaaactgttgatgtggcagcagagaagaaagtggtgaaaattacatctgaaataccacagactgagagaatgcagaagagggctgaacgattcaatgtacctgtgagcttggagagtaagaaagctgctcgggcagctaggtttgggatttcttcagttccaacaaaagtctgaagatgatgagaaactgaaaaagaggaaggagcgatttgggattgtcacaagttcagctggaactggaaccacagaggatacagaggaggccaaagaggaggaanagagccggagcgccttttgggattggccttggaaggaaagagtcccctggaacccccttttctggtttccttcccagggttttccccaatttccttcctc

SEQ ID NO: 366526 - DNA, 1030 bp, Homo sapiens
catctccttcacctctatgaatagcattggttaatcctttatcctctgaaatcttccgtctccccattgactggaagacttttcccagcctgttaagagcccattgtttccaggctagcttgatctcaggctgagtggctctctttgcttcaggaatcttcccattttctaccactgttcttctctctgtccctcacccccagtaatcttctttactcctcaccctccttacccattaaactttccagctcctactggataactggaaggattggagagattcaggaatgaaatctctagctaccaagctcaagtctgggccatccttccttctcgggccttgtgacagttcatgtgagtttggattaaagcagccaggaacccaggcaactattgtcttcagtctaatttttttcttcttgcttcttctttacaggcaaagaagaggaaaagagcagagcgctttgggattgcctgatgaaaagttcctgatactttctgttctccagtgttttccatttctctccttcttcttggtcacatatatgcctaaatgcacagtcatgtgcctacgtcctgcctcgcaatgagggagcatgtaccccaggtacatccatgaactgcggcagcagtttgacttattgctgtttcagctttaaggttgttgtgtttttgtttttgattatgttgcttgttaataaaaaaaaatagaaaagagaaaaaaaaactcttcgcaaaggctattcttatttggcgttgcggaagaaaaagaggtctttgaattgccacctggttcttagtctgtttcctgacccaatttttttgtttcaagcggtaggatttgccgggtcccctatagggagagcgtattaatttgcaataagccggttaactttatattggttggccagagagaccgccgggataacgccataaagcgcgtttgtgcggccacaaccctatctacactcgttactcgagacactggtctgcacagaacacgcttactctgcgtttgttgtctcatcac

SEQ ID NO: 366527 - DNA, 1440 bp, Homo sapiens
  misc_feature (16)..(16): n is a, c, g, or t
  misc_feature (68)..(68): n is a, c, g, or t
ggagagtaagaaagcngctcgggcagctagggttgggatttcttcagttccaacaaaaggtctgtcantctgataacaaacctatggttaacttggataagctgaaggaaagagctcaaagatttggtttgaatgtctcttcaatctccagaaaggtaatgtaggctcgatggaagtaatgtttttgtgacattagagcagcttatgggaactacataggctggaaatgaccctcctgagaatgtagctggctacaaagcatttcatttcacatacttgattgactgtcacctcctctcactgactcttgattatgttacaggaattatttcacaagctgattgttttttcccgtggattgttttcatagctttcacccaggctgctagagcgtggtctacatttcttttctttctttcttttttttcctttgggacaaggtcattctgttgcccaggctggagtgcagtggtgcgatcgcggctcactgcaggcttgacctccctgggctcaggtgatcctcccaccccagcctttctcgtagctaaaactgcaggcacgtgccaccatgcccagctaatttttttcaatttttggtagagacgggattttgctatgttacccaggctggtctcaaactcctgggcctaagggatccgcccacttctgcctcccagagtgctgggattacaggcgtgagccactgcacccagcctgagtatggtctatatttctgttggttaagatgttaaattcagtgatgttaaaacttattacatctactttaactttgataataggcataatgggaattaaataatcaggagaagacagtcttgtctttaggtcagaagtacttagaaataaaacttggaggattggtggaacaaaaaaaaaaagttaattcattctttatgcccctcagctaactgatattatttagtttattaagcaagatgactttgtttacttcatgctatgtggggtgattggttccccagggcatagttgcctttgtagttttgctaggcacattggagaaaatgataaggatttttctatttgcctagagcaggtggtctcttaatctttgttgtttagaacaagaacatgtttcttggttgtcaaagtggtggcagggtatttgaaaccagaaaaaccagcatttaagaaaaaaatcgggccaggcgtggtggctcacgcctgtaatcccagcactttgggaggcggagatgtgcggatcacgaggtcaggagattgagaccatcctggctaacacggtgaaaccccgtctctactaaaaatacaaaaaaattagctgggtgtggtggcgggtgcctgtagtctcagctactcaggaggctgaggcaggagaatggcatgaacctgggagggggagcttgcagtgagctgagattgcaccactgcactccagcctgg

SEQ ID NO: 366528 - DNA, 1546 bp, Homo sapiens
ggttgcgtgtgttttgattctgtgttttcttgtttttcctctgcctgcgctgtttctcttcactttttctttctctcgtgtattatcacctggcattacgcggattcggttggtaccttccctaatgtattgtgctggctaattgtggtgttgtccatttggccagcccggagtaggtcttccaagatgccagctggccgtcttcccatcgggcggtggtaaaccgcgccctgtctctgctttttattcgtcccccaatggggccacctggaccaagaaagcggatggcttaaattggggcccccggggatattttttacccccccccttttttttttttttttttttttttggagatgggagtctcactctgtcaccatgctagagtgcagtggtgcgatctcagctcactgcaacctccgccacctgggttcaagcgattcttctgcctcagccttccatgtagctgggattacaggcgcacgccaccacgcccggctaattttgggtattttagtagagatgaggtttcacaatgttggccagcatggtctcgaactccggaccttgcatgatccgcccgcctcggccccccaaagtgctgggattacagatgtaagccactgcgcccagccagctttccttatttttgaaaaatgtgagtcaggcaatattcttttgccattcccaactcatattcctggggaattgtgctctaggtacatgggaaaaatttttacagtgaactgaaagaatatttgagatgctattttagccactcttgtgtaacaaggcaagttcgttggctatgttggtttagatttttgtcaaacttcgttgaggaaacctaggaacagggactgcaggagaataggacactagctggatcatctcaagagaacctttagatcttccatactagctggatcatctcaagagaacctttagatcttccattctgtggaggctgggagaggggtcttgttgtctttgggactgttttggctcaagcttttcagagaggggttgttctaggtacccccagtttcctgtcctctttccatccttccttggcctgcatgtcccaaaccttataccaccatgcccttagtgttttctgtcttgctccaggaccccatcttcttagtcattgaacacgaggtttcctgtctcagatcctcttcacctccggttctccaaggtgtaaatgtggcacttgattagggagaagagctcagcactgaattctaaactctttgaccgcttttattttttttttcaggttcaagtgctggattgtgtcatgtgaccatcccaaaactcagagcaccctatggccgtctttgccctctgtcacataacttgaaaactgcctgatggcctttttgcagtggttccctccaggaagccttgatctcagttgaagaagttctttcctggcattccaatgcccctgtcagctccatactcctcagacacccttaacaaaggctgtcatgcacacaatgtgacaaatacacaaaataaatgataattacactaataa

SEQ ID NO: 366529 - DNA, 898 bp, Homo sapiens
  misc_feature (5)..(5): n is a, c, g, or t
  misc_feature (9)..(9): n is a, c, g, or t
  misc_feature (35)..(35): n is a, c, g, or t
  misc_feature (48)..(48): n is a, c, g, or t
  misc_feature (53)..(53): n is a, c, g, or t
  misc_feature (63)..(63): n is a, c, g, or t
  misc_feature (66)..(66): n is a, c, g, or t
tacgntctntgcctcgtctgtctcttctgcctctntctttgccttctnactgntgctcttttngtncctctgtcactatcactgtctctacatctctctgtctttttgtcaaaccttctcatctgcaaacttcaaacactccccaccctgactatgcctctgcttccttgttctcccctcttccaccctgagctttggggttaggagactaaaatgtcccccttccagaatccttcccaccttggtctgctggctctattccctagcccagagcagtgatttggattcaaatgccctgtaaccttcagcctccttactgctcctttcttgacctctcctaacgctttccagacccaggggactctggggtctctatactctctctaattgacctgaagatagaggctgggagcagggccattccagaggctctttggtctctctcttggctgagggaatttgggcataagcaggctgcaccctctggctaaataactcagcatcatgagggtggacctgagggtttaaagtagctctcattatatagatcctggatgttgagggttctctctcccacccccgcatccccagctcttaaaccctaacctcttactatttccatgacaactggcttcaattcaagccatttggctcagaaaaggttgagttagggtgatgatgggttagaaactaaacttcatgtgtccgccctcttgccctttactcccattcccaaccctggaggctttatacaagtgcttaagtgagtaggtgttggggagagcagggtttggggaataagggataaacggggcacagtgggcaggggccctcctattccagtaaagccaaataccaaaaaaatgaaaagtcacaataaataaataaataaaaattc

SEQ ID NO: 366530 - DNA, 716 bp, Homo sapiens
gcctttgagttcagttgttataaaccattgtgactattgttggtcaaagtattggtacttatattgttagtaattgcatcataattacattaccagtgttggaaaactaatgaagaaaacactgtaattgctactcagcaaatgtgaataaaaggtgtttgcgttattaaaaaaaaaaaaaaaaaaaaaaattgcggccgccaatttttttttttttttttggtcacatatatgcctaaatgcacagtcatgtgcctacgtcctgcctcgcaatgagggagcatgtaccccaggtacatccatgaactgcggcagcagtttgacttattgctgtttcagctttaaggttgttgtgtttttgtttttgattatgttgcttgttaataaaaaaaaatagaaaagagaaaaaaaaactcttcgcaaaggctattcttatttggcgttgcggaagaaaaagaggtctttgaattgccacctggttcttagtctgtttcctgacccaatttttttgtttcaagcggtaggatttgccgggtcccctatagggagagcgtattaatttgcaataagccggttaactttatattggttggccagagagaccgccgggataacgccataaagcgcgtttgtgcggccacaaccctatctacactcgttactcgagacactggtctgcacagaacacgcttactctgcgtttgttgtctcatcac

SEQ ID NO: 366531 - DNA, 497 bp, Homo sapiens
aatcacatttgcttgtctttgctttttctctagagcacttcttaaccttttggaggtcacagatatctttgaaactctgatgaaaggtatggaccctctccccagaaaaaggcatgtacacatattttgcatgcagtttgaggggcttcataaaactaccttgtagccccgaggagtccatggacctctggttaagaactcatgcctttagctgggcgtggtggctcacgtctgtaatcctagcactttgggaggcctaggcgggcggattgcttgaggccaggagttcgagaccagcctgggcaacatggcgaaaccccgcctctaccaaaaatgcaaaaattagccaggtgtggtggcaagtgcctgtagtcccagctattgaggaggctgtgaggaggctgaggcacaagaatcgcttgagcccgggttggaggttgcagtgagccgagatggtgtactgcactccagcctgggggacagtgagactccgtctc

SEQ ID NO: 366532 - DNA, 344 bp, Homo sapiens
ggcagtaatttgggatggaacttcatttcctttttttcttttccttgtgggaactaccattttattcactggtgttcatcctgttaactaaggaaaagttttatttttttcccctcagcttgccgaactaaagcaagaatgtcttgctcgtggtttggagaccaagggaataaagcaagatcttatccacagactccaggcatatcttgaagaacatgctgagtactttgtggaggcggagtgatgtgagtgaggggattttcaggctttgacactgaaaagatttcttttttttttttcaggtcattagcaatgtaagctcttaattaacggcatcaagaaaa

SEQ ID NO: 366533 - DNA, 1246 bp, Homo sapiens
cccccccccgaaccaattacggtcgtagcgaggctgggtggcgggagtgaggggtaacaagatggcgaccgagacggtggagctccataagctaaagcttgccgaactaaagcaagaatgtcttgctcgtggtttggagaccaagggaataaagcaagatcttatccacagactccaggcatatcttgaagaacatgctgaagaggaggcaaatgaagaagatgtactgggagatgaaacagaggaagaagaaacaaagcccattgagctccctgtcaaagaggaagaaccccctgaaaaaactgttgatgtggcagcagagaagaaagtggtgaaaattacatctgaaataccacagactgagagaatgcagaagagggctgaacgattcaatgtacctgtgagcttggagagtaagaaagctgctcgggcagctaggtttgggatttcttcagttccaacaaaaggtctgtcatctgataacaaacctatggttaacttggataagctgaaggaaagagctcaaagatttggtttgaatgtctcttcaatctccagaaagtctgaagatgatgagaaactgaaaaagaggaaggagcgatttgggattgtcacaagttcagctggaactggaaccacagaggatacagaggcaaagaagaggaaaagagcagagcgctttgggattgcctgatgaaaagttcctgatactttctgttctccagtgttttccatttctctccttcttcttggtcacatatatgcctaaatgcacagtcatgtgcctacgtcctgcctcgcaatgagggagcatgtaccccaggtacatccatgaactgcggcagcagtttgacttattgctgtttcagctttaaggttgttgtgtttttgtttttgattatgttgcttgttaataaaaaaaaatagaaaagagaaaaaaaaactcttcgcaaaggctattcttatttggcgttgcggaagaaaaagaggtctttgaattgccacctggttcttagtctgtttcctgacccaatttttttgtttcaagcggtaggatttgccgggtcccctatagggagagcgtattaatttgcaataagccggttaactttatattggttggccagagagaccgccgggataacgccataaagcgcgtttgtgcggccacaaccctatctacactcgttactcgagacactggtctgcacagaacacgcttactctgcgtttgttgtctcatcac

SEQ ID NO: 366534 - DNA, 1081 bp, Homo sapiens
agctcctggaggcggaggccgcgggtgggggcctagtggagtgaggggtaacaagatggcgaccgagacggtggagctccataagctaaagcttgccgaactaaagcaagaatgtcttgctcgtggtttggagaccaagggaataaagcaagatcttatccacagactccaggcatatcttgaagaacatgctgaagaggaggcaaatgaagaagatgtactgggagatgaaacagaggaagaagaaacaaagcccattgagctccctgtcaaagaggaagaaccccctgaaaaaactgttgatgtggcagcagagaagaaagtggtgaaaattacatctgaaataccacagactgagagaatgcagaagagggctgaacgattcaatgtacctgtgagcttggagagtaagaaagctgctcgggcagctaggtttgggatttcttcagttccaacaaaaggtctgtcatctgataacaaacctatggttaacttggataagctgaaggaaagagctcaaagatttggtttgaatgtctcttcaatctccagaaagtctgaagatgatgagaaactgaaaaagaggaaggagcgatttgggattgtcacaagttcagctggaactggaaccacagaggatacagaggcaaagaagaggaaaagagcagagcgctttgggattgcctgatgaaaagttcctgatactttctgttctccagtgttttccatttctctccttcttcttggtcacatatatgcctaaatgcacagtcatgtgcctacgtcctgcctcgcaatgagggagcatgtaccccaggttcaagtgctggattgtgtcatgtgaccatcccaaaactcagagcaccctatggccgtctttgccctctgtcacataacttgaaaactgcctgatggcctttttgcagtggttccctccaggaagccttgatctcagttgaagaagttctttcctggcattccaatgcccctgtcagctccatactcctcagacacccttaacaaaggctgtcatgcacacaatgtgacaaatacacaaaataaatgataattacactaataa

SEQ ID NO: 366535 - DNA, 1461 bp, Homo sapiens
cctttttcccccctcagaatatttagaaataactagagatttgtgacagttagtaggtatacaaatagatgaggttttttattaaagtgtgatgtttattcttcagcatctgttaggcagttcctcttgtatattgaatatcgttagaggaaaatggatcatctttgtggacctagagccttggtagaattaagggcagtaatttgggatggaacttcatttcctttttttcttttccttgtgggaactaccattttattcactggtgttcatcctgttaactaaggaaaagttttatttttttcccctcagcttgccgaactaaagcaagaatgtcttgctcgtggtttggagaccaagggaataaagcaagatcttatccacagactccaggcatatcttgaagaacatgctgaagaggaggcaaatgaagaagatgtactgggagatgaaacagaggaagaagaaacaaagcccattgagctccctgtcaaagaggaagaaccccctgaaaaaactgttgatgtggcagcagagaagaaagtggtgaaaattacatctgaaataccacagactgagagaatgcagaagagggctgaacgattcaatgtacctgtgagcttggagagtaagaaagctgctcgggcagctaggtttgggatttcttcagttccaacaaaaggtctgtcatctgataacaaacctatggttaacttggataagctgaaggaaagagctcaaagatttggtttgaatgtctcttcaatctccagaaagtctgaagatgatgagaaactgaaaaagaggaaggagcgatttgggattgtcacaagttcagctggaactggaaccacagaggatacagaggcaaagaagaggaaaagagcagagcgctttgggattgcctgatgaaaagttcctgatactttctgttctccagtgttttccatttctctccttcttcttggtcacatatatgcctaaatgcacagtcatgtgcctacgtcctgcctcgcaatgagggagcatgtaccccaggtacatccatgaactgcggcagcagtttgacttattgctgtttcagctttaaggttgttgtgtttttgtttttgattatgttgcttgttaataaaaaaaaatagaaaagagaaaaaaaaactcttcgcaaaggctattcttatttggcgttgcggaagaaaaagaggtctttgaattgccacctggttcttagtctgtttcctgacccaatttttttgtttcaagcggtaggatttgccgggtcccctatagggagagcgtattaatttgcaataagccggttaactttatattggttggccagagagaccgccgggataacgccataaagcgcgtttgtgcggccacaaccctatctacactcgttactcgagacactggtctgcacagaacacgcttactctgcgtttgttgtctcatcac

SEQ ID NO: 366536 - DNA, 1162 bp, Homo sapiens
  misc_feature (1149)..(1149): n is a, c, g, or t
  misc_feature (1154)..(1154): n is a, c, g, or t
agctcctggaggcggaggccgcgggtgggggcctagtggagtgaggggtaacaagatggcgaccgagacggtggagctccataagctaaagcttgccgaactaaagcaagaatgtcttgctcgtggtttggagaccaagggaataaagcaagatcttatccacagactccaggcatatcttgaagaacatgctgaagaggaggcaaatgaagaagatgtactgggagatgaaacagaggaagaagaaacaaagcccattgagctccctgtcaaagaggaagaaccccctgaaaaaactgttgatgtggcagcagagaagaaagtggtgaaaattacatctgaaataccacagactgagagaatgcagaagagggctgaacgattcaatgtacctgtgagcttggagagtaagaaagctgctcgggcagctaggtttgggatttcttcagttccaacaaaaggtctgtcatctgataacaaacctatggttaacttggataagctgaaggaaagagctcaaagatttggtttgaatgtctcttcaatctccagaaagtctgaagatgatgagaaactgaaaaagaggaaggagcgatttgggattgtcacaagttcagctggaactggaaccacagaggatacagaggcaaagaagaggaaaagagcagagcgctttgggattgcctgatgaaaagttcctgatactttctgttctccagtgttttccatttctctccttcttcttggtcacatatatgcctaaatgcacagtcatgtgcctacgtcctgcctcgcaatgagggagcatgtaccccaggttcaagtgctggattgtgtcatgtgaccatcccaaaactcagagcaccctatggccgtctttgccctctgtcacataacttgaaaactgcctgatggcctttttgcagtggttccctccaggaagccttgatctcagttgaagaagttctttcctggcattccaatgcccctgtcagctccatactcctcagacacccttaacaaaggctgtcatgcacacaatgtgacaaatacacaaaataaatgataattacactaataaaaaaaaaaacaccaccccttgggtttttatgcaagggtgagggggactcccccccccccccccccccnccccnccccccga

SEQ ID NO: 366537 - DNA, 1535 bp, Homo sapiens
  misc_feature (764)..(764): n is a, c, g, or t
cccccccccgaaccaattacggtcgtagcgaggctgggtggcgggagtgaggggtaacaagatggcgaccgagacggtggagctccataagctaaaggtgggattacgccccaagccgaattttgaaacagggagaggcctctcagaagatcggtctcgccttagaagcctggggttgaggaggtcttgagaatagtagaagtacagacacctcagatttaaaagttttcgagttctgtcacgcggctctcggcccgccagccttcctcacacaccatctccaaccaccagagagaactcacacctgcaatatttgggaaaaacaattccaagagcacttcttaaccttttggaggtcacagatatctttgaaactctgatgaaagcttgccgaactaaagcaagaatgtcttgctcgtggtttggagaccaagggaataaagcaagatcttatccacagactccaggcatatcttgaagaacatgctgaagaggaggcaaatgaagaagatgtactgggagatgaaacagaggaagaagaaacaaagcccattgagctccctgtcaaagaggaagaaccccctgaaaaaactgttgatgtggcagcagagaagaaagtggtgaaaattacatctgaaataccacagactgagagaatgcagaagagggctgaacgattcaatgtacctgtgagcttggagagtaagaaagctgctcgggcagctaggttgggatttcttcagttccaacaaaaggtctgtcantctgataacaaacctatggttaacttggataagctgaaggaaagagctcaaagatttggtttgaatgtctcttcaatctccagaaagtctgaagatgatgagaaactgaaaaagaggaaggagcgatttgggattgtcacaagttcagctggaactggaaccacagaggatacagaggcaaagaagaggaaaagagcagagcgctttgggattgcctgatgaaaagttcctgatactttctgttctccagtgttttccatttctctccttcttcttggtcacatatatgcctaaatgcacagtcatgtgcctacgtcctgcctcgcaatgagggagcatgtaccccaggtacatccatgaactgcggcagcagtttgacttattgctgtttcagctttaaggttgttgtgtttttgtttttgattatgttgcttgttaataaaaaaaaatagaaaagagaaaaaaaaactcttcgcaaaggctattcttatttggcgttgcggaagaaaaagaggtctttgaattgccacctggttcttagtctgtttcctgacccaatttttttgtttcaagcggtaggatttgccgggtcccctatagggagagcgtattaatttgcaataagccggttaactttatattggttggccagagagaccgccgggataacgccataaagcgcgtttgtgcggccacaaccctatctacactcgttactcgagacactggtctgcacagaacacgcttactctgcgtttgttgtctcatcac

SEQ ID NO: 366538 - DNA, 2737 bp, Homo sapiens
ttgaatgagtggttgacacacacgagagaaaagagaggagagggctagctggcgacgactctcttaatctaccaccgctacactctgaagatgatgagaaactgaaaaagaggaaggagcgatttgggattgtcacaagttcagctggaactggaaccacagaggatacagaggcaaagaagaggaaaagagcagagcgctttgggattgcctgatgaaaagttcctgatactttctgttctccagtgttttccatttctctccttcttcttggtcacatatatgcctaaatgcacagtcatgtgcctacgtcctgcctcgcaatgagggagcatgtaccccaggttcaagtgctggattgtgtcatgtgaccatcccaaaactcagagcaccctatggccgtctttgccctctgtcacataacttgaaaactgcctgatggcctttttgcagtggttccctccaggaagccttgatctcagttgaagaagttctttcctggcattccaatgcccctgtcagctccatactcctcagacacccttaacaaaggctgtcatgcacacaatgtgacaaatacacaaaataaatgataattacactaataatgatatgttcagaggggcactggccaggtccacacacatcataaggtgggagggggtgctaactcccactgggttgctgagctgtgccccccaagtcccttcactctgtgcctctttgggggtagggaggaacaggggaatgagacttcagctcacagatttatgttcataagagaaagacccctgccccccccccacccaccacacacacacaaaggtctttatttggtggtatttaaggagctgtattctaagtgtcccccatatttaatgccccagctctctagaatctgtagagggaagatacctgatgcttattgcccaatccctactctgccaagatcacgaggcatttgaccttggagggaggtatctgttcttcacttctctgttcctttccttccaccaaggaaatgtgagtggtgttgatggccgggtgtgtcttgtccttcaggattggggcagaaggaaggatgaagaacagggccagagaggcttggggttagcatagctgctatatgggtgaaggcaagctgaagagcctaacagccctgcccattcctctactgaaagatcttgtttcactttctcactataagaataggaataagatgttaaagctcaccaacatcaccttctcaagggtggtcacatacctttgccccttccaccaactggccaagggggagagtcatgctcttgggaagaatgagccatccagttttgctcaccagcttgggctttactttagttcagtactgtttttatcagacccgtaactgctggctctacttagagtgacagttttgctgaagattcttacccccacctctcctgacatcctctaagctcttgcctggagccaagaggcctggtggtgaagtaaggatagggtgtggatcaggagattctcaactccttggcttctaggcactgtccagctgggaggcagaggggaacttgtactctgaagcctgtgactcctcttaagcctcacatctcttcaccactactctggtgccctggttatctgtcccacagcgagaggtattttatgtccataaagtgcccgtggtaagtgctcagaattcatctcttggctgtggcgggtgctgtcatttctcattccattgaggggaagaaactgaggcacagtgagtccagaggagaatgggtcagggttgtgggaggaatgaatgggcctagctagtgacttgaaatggcaaccagtctctgcctgcttcctagccttccaagcccgggagtctccatccttcccatcctctgttctaactggccttgtcagatgcttttccccactgtactttcccctccctgctgccaggtactgttagattccaaaaataaaaggaaaaaataattatacactctgcttccttgttctcccctcttccaccctgagctttggggttaggagactaaaatgtcccccttccagaatccttcccaccttggtctgctggctctattccctagcccagagcagtgatttggattcaaatgccctgtaaccttcagcctccttactgctcctttcttgacctctcctaacgctttccagacccaggggactctggggtctctatactctctctaattgacctgaagatagaggctgggagcagggccattccagaggctctttggtctctctcttggctgagggaatttgggcataagcaggctgcaccctctggctaaataactcagcatcatgagggtggacctgagggtttaaagtagctctcattatatagatcctggatgttgagggttctctctcccacccccgcatccccagctcttaaaccctaacctcttactatttccatgacaactggcttcaattcaagccatttggctcagaaaaggttgagttagggtgatgatgggttagaaactaaacttcatgtgtccgccctcttgccctttactcccattcccaaccctggaggctttatacaagtgcttaagtgagtaggtgttggggagagcagggtttggggaataagggataaacggggcacagtgggcaggggccctcctattccagtaaagccaaataccaaaaaaatgaaaagtcacaataaataaataaataaaaattc

SEQ ID NO: 366539 - DNA, 1018 bp, Homo sapiens
agctcctggaggcggaggccgcgggtgggggcctagtggagtgaggggtaacaagatggcgaccgagacggtggagctccataagctaaagcttgccgaactaaagcaagaatgtcttgctcgtggtttggagaccaagggaataaagcaagatcttatccacagactccaggcatatcttgaagaacatgctgaagaggaggcaaatgaagaagatgtactgggagatgaaacagaggaagaagaaacaaagcccattgagctccctgtcaaagaggaagaaccccctgaaaaaactgttgatgtggcagcagagaagaaagtggtgaaaattacatctgaaataccacagactgagagaatgcagaagagggctgaacgattcaatgtacctgtgagcttggagagtaagaaagctgctcgggcagctaggtttgggatttcttcagttccaacaaaaggtctgtcatctgataacaaacctatggttaacttggataagctgaaggaaagagctcaaagatttggtttgaatgtctcttcaatctccagaaaggtaatgtaggctcgatggaagtaatgtttttgtgacattagagcagcttatgggaactacataggctggaaatgaccctcctgagaatgtagctggctacaaagcatttcatttcacatacttgattgactgtcacctcctctcactgactcttgattatgttacaggaattatttcacaagctgattgttttttcccgtggattgttttcatagctttcacccaggctgctagagcgtggtctacatttcttttctttctttcttttttttcctttgggacaaggtcagcctgggtgacagagtgagactcgtctcaaaataataataataataataataataataataataataataatagtatgtgtgcatgaaatcagttcactttgaagaatacaatttttttcttttgaaacaaggcttctattttgatctaattgctcatgcttggagctgcctg

SEQ ID NO: 366540 - DNA, 676 bp, Homo sapiens
agctcctggaggcggaggccgcgggtgggggcctagtggagtgaggggtaacaagatggcgaccgagacggtggagctccataagctaaagcttgccgaactaaagcaagaatgtcttgctcgtggtttggagaccaagggaataaagcaagatcttatccacagactccaggcatatcttgaagaacatgctgaagaggaggcaaatgaagaagatgtactgggagatgaaacagaggaagaagaaacaaagcccattgagctccctgtcaaagaggaagaaccccctgaaaaaactgttgatgtggcagcagagaagaaagtggtgaaaattacatctgaaataccacagactgagagaatgcagaagagggctgaacgattcaatgtacctgtgagcttggagagtaagaaagctgctcgggcagctaggtttgggatttcttcagttccaacaaaaggtaagagtacagagatacttctgagaaagttacctttttattctttcttttctggtataacaggttttatttctccaaaataaggtaaatttgctagctgtagaaactctttaagagattgtaacattcatctcctgctttaggtaaaattatacttaggccttcctgggcaattaagagagatactgaatgttatgagaggataggaagtgcca

SEQ ID NO: 366541 - DNA, 4998 bp, Homo sapiens
  misc_feature (62)..(62): n is a, c, g, or t
gtcgcgcgcgcggtcacggggctcgctcccgaggggcaggtcggggctgggagctggtgccngggtcggggtggcggcggcggcctgggccgcgaggtcgacgctcgctgctgcagcggcagaggctaaaggatccgccgcggcgctgtcgccggagagggagggccccgctgccgtcggtgaaaccagcccagagaagttacgggatttgcccccggggctcctgcccagcaagccagcgccgtgacccaggtgtgggggatgatggtgacgcttctcactcacatgtgaaggacggaaccactgcactccaggttccttgctgggtgctgagcgtggcctgagggacaggccctgggtcccgggatgcccctgcccgagcccagcgagcaggagggcgagagtgtgaaggccggccaggagccatcccccaagccaggcacggacgtcatcccggcagcccccaggaagcccagggagttctccaaactggtgctgctcacagcctccgaccaagatgaggatggggtgggatccaagccccaggaagtgcactgcgtcctgtccctggagatggctggccccgccaccctcgccagcaccttgcagatcctgccagttgaggagcagggaggggtggtccagccagccctagagatgcctgaacagaagtgcagcaagctggatgcagcagcccctcagtccctggagttcctgaggacaccattcgggggccgcctcctggtgctggagtccttcctgtacaagcaggagaaggcagtgggggacaaggtgtactggaagtgccgccaacatgctgagctgggctgccggggccgggccatcacccgaggcctgcgggccacagtgatgcggggccactgccacgcgcccgatgagcaaggcctggaggcccggcgccagagggagaaactgcccagcctggccctgccagagggcttgggagagccccagggtcctgagggccctggaggccgagtggaggagcccctggagggggtgggcccgtggcagtgccctgaggagcccgagcccactcctgggctggtgctgagcaagccggccctggaggaggaggaggcaccccgagccctgtcactgctgagcctgccgcccaagaagcgctcgatcctggggctgggacaggcccggcccctcgagttcctgaggacgtgctacgggggcagcttcctggtacacgagtcgttcctctacaagcgggagaaggctgtcggggacaaggtgtattggacctgccgggaccacgcgctgcacggctgccggagccgggccatcacccagggacagcgggtgactgtgatgcgtgggcactgccaccagcccgatatggagggcctggaagcccggcggcagcaggagaaggccgtggagacgctgcaggctgggcaggacggccctgggagccaagtggacacgctgctccgaggcgtggatagtttgctctaccgcaggggtccgggtcccctgactctcaccaggcctcggcccagaaagcgagcaaaggtcgaagaccaggagctgccaacccagcccgaggccccagacgagcaccaggacatggacgcagacccgggaggccctgagttcctgaagacgcccctggggggcagcttcctggtgtacgagtccttcctctaccggcgggagaaggcggctggggagaaggtgtattggacctgccgggaccaggcccgcatgggctgccgcagccgcgccatcacccagggccgacgggtgactgtcatgcgtggtcactgccacccgcccgacctgggaggcctggaggccctgaggcagcgggagaaacgccccaacacggcgcagcgggggagcccaggaggccccgagttcctgaagacgcccctggggggcagcttcctggtgtacgagtccttcctctaccggcgggagaaggcggccggggagaaggtgtattggacctgccgggaccaggcccgcatgggctgccgcagccgcgccatcacccagggccggcgggtcatggtcatgcgcaggcactgccacccaccggacctgggcggcctggaggccctgcggcagcgggagcacttccccaacctggcgcagtgggacagcccagatcctctccggcccctggagttcctgaggacttccctggggggcaggttcctggtgcacgagtccttcctctacaggaaggagaaggcggctggggagaaggtgtactggatgtgccgggaccaggctcggctgggctgccgcagccgcgccataacccagggccaccgcatcatggtcatgcgcagccactgccatcagcctgacctggcaggcctggaggccttgaggcaacgggagcggctccccaccacggcccagcaggaggacccagaaaagattcaagttcagctgtgcttcaagacgtgttctcctgaaagccagcagatttatggggacatcaaagacgtcagactggatggcgagtcccagtgaggcgatgtgggcagaggagctccgagccgcccacccaaggtggcttcacatccacacaggcacttcccatccacctaggtttggcttagcagaaacttcttttcattcttccaaagcatcgatggtcttcgcgtctcctcaggaggtctcccaggaggaattcttggatggtgtcctcatgtcggcggagaacagtgctcagagctggcgcttgcagacgcagctgtcgtggggcagggcggtggcgccttcctgacctttggaagacatgacaaagctgcctggacacggacgcccctgctgtacggccacagcacccctgggtttgcagagcacgcagccttcctagggctttccacctggcgaggccccgctctgctcagcacggtgcaaagtgaatgctgctgtcttggagcctgggcacgtttggggaagttcctgcttcaaactgagctgccccgcataggccaggtcaacccacaccaatcttttctggacaggtgctgggtaggccttcctggtctctggccgcctgctgccagggtgtggccatccccagcaaccggagccggccaaaccagaggcctcgctccgcactccacactttcctttctgtgctccttccaagttaaattaaaccccctctccacgattcccacggcaggcgtcattcccgagatgggagccagtccaggggtcagcaggagccagcgctgggcacacgtgccctggctgaggccagcggcatcctgggtggcccaggtccatcctgggcagcaaaggcgtgtccccttctgtcagacagcttcacagagtgtggcttcaccagtcagagggagcagtccggagaggcaagatgaccccaccgggactgcagagcctcctccttactaacaaggacctgtccgcagccgcgaggtccttcactcccaccctgtaattgtggggggagtgccagcaacaggcctgtcccctggcaagttggccacggaacccaccatgcactgcaaggctgtgacagcctgggcacccctgcttctcctctgcttgtacggttcccccaataaatcctattttccatctcaccgtgtggagctggtacttgttcacatccctcttgcagcaacagttggccgccgtgaaaccacactccgtcacatctccatgccagtgcccagggggagacccctccccatgcctgggctgttacagtcacctggcccagacgtaacctggaccaagagtggacggagacacctggggttggggcctctggaagggctgctggggggccagctgcagcctgtggcctctcccaggcccggatatggcaggacatttgcgtcgtgttgctggaagaggcaggatgctctgttctcgccattagcctgcgttacgcctagactcatctgcataagcctgggcaagtggcacccctgggccaagggcagacttgcccacccgtccatcctttgcctatggcagaggacacacaacacagtggctgcgctttgggcactgttctcggccctgaagcatcctgccccgaggctgacctaactgcccccagctggactcatggccaaggctacagacccagtactccaatcccgactcccactgtgtggtccaaatgtgtacgcccacaggaggcagccatgcccgaggaaggtacttgctgaaagatggtccagttcatgccgccaccagctggacctctgatcaggccccctgcagaaggggaagctctccacatgcccaagatacgagagaaacgcccgggtcacagcagcctgagtcactgcagcctctgctacctgccaagcctgcgccctccacctgtgggctccttgcctctgtgatggggcctccacggccagcatcttcccgccatggtcacatgatgccatgccctgctctgggcacccctaagcgggtatgaggcgaatcagaggaagaatatcggcttctcttcccttttggatatttgcgtcattgaccgggactggcccactcttcctctgcctcacgcctgctttgaccttagaagacagacggcagctcgcgttgctgggctgagattctccaatggacgtgaatttagatgatgctgttgccttgggtggcttcatggccaccaacccgcaccctggtggccactcagccatgacaagggcctgacagccactaagtgagcttcagagccttccccttgcaaagttccagggccaccagatgtcgcctgcccagtcactgtcacagagttaaagcgtgcgggtgaacgctggccgcggagcgtgcagcccggcagcagctcagcggggcagctcctgcttccagccctgcctctgctggtgtcgcccacaaaccctgctgtatgacatttgcaccacatggtgtgtgtccgtgccctttgacatgacagtgccaacaacatctcatgaaatttaaaataaatccccaaggcatcagaaacgtaaa

SEQ ID NO: 366542 - DNA, 3747 bp, Homo sapiens
  misc_feature (62)..(62): n is a, c, g, or t
gtcgcgcgcgcggtcacggggctcgctcccgaggggcaggtcggggctgggagctggtgccngggtcggggtggcggcggcggcctgggccgcgaggtcgacgctcgctgctgcagcggcagaggctaaaggatccgccgcggcgctgtcgccggagagggagggccccgctgccgtcggtgaaaccagcccagagaagttacgggatttgcccccggggctcctgcccagcaagccagcgccgtgacccaggtgtgggggatgatggtgacgcttctcactcacatgtgaaggacggaaccactgcactccaggttccttgctgggtgctgagcgtggcctgagggacaggccctgggtcccgggatgcccctgcccgagcccagcgagcaggagggcgagagtgtgaaggccggccaggagccatcccccaagccaggcacggacgtcatcccggcagcccccaggaagcccagggagttctccaaactggtgctgctcacagcctccgaccaagatgaggatggggtgggatccaagccccaggaagtgcactgcgtcctgtccctggagatggctggccccgccaccctcgccagcaccttgcagatcctgccagttgaggagcagggaggggtggtccagccagccctagagatgcctgaacagaagtgcagcaagctggatgcagcagcccctcagtccctggagttcctgaggacaccattcgggggccgcctcctggtgctggagtccttcctgtacaagcaggagaaggcagtgggggacaaggtgtactggaagtgccgccaacatgctgagctgggctgccggggccgggccatcacccgaggcctgcgggccacagtgatgcggggccactgccacgcgcccgatgagcaaggcctggaggcccggcgccagagggagaaactgcccagcctggccctgccagagggcttgggagagccccagggtcctgagggccctggaggccgagtggaggagcccctggagggggtgggcccgtggcagtgccctgaggagcccgagcccactcctgggctggtgctgagcaagccggccctggaggaggaggaggcaccccgagccctgtcactgctgagcctgccgcccaagaagcgctcgatcctggggctgggacaggcccggcccctcgagttcctgaggacgtgctacgggggcagcttcctggtacacgagtcgttcctctacaagcgggagaaggctgtcggggacaaggtgtattggacctgccgggaccacgcgctgcacggctgccggagccgggccatcacccagggacagcgggtgactgtgatgcgtgggcactgccaccagcccgatatggagggcctggaagcccggcggcagcaggagaaggccgtggagacgctgcaggctgggcaggacggccctgggagccaagtggacacgctgctccgaggcgtggatagtttgctctaccgcaggggtccgggtcccctgactctcaccaggcctcggcccagaaagcgagcaaaggtcgaagaccaggagctgccaacccagcccgaggccccagacgagcaccaggacatggacgcagacccgggaggccctgagttcctgaagacgcccctggggggcagcttcctggtgtacgagtccttcctctaccggcgggagaaggcggctggggagaaggtgtattggacctgccgggaccaggcccgcatgggctgccgcagccgcgccatcacccagggccgacgggtgactgtcatgcgtggtcactgccacccgcccgacctgggaggcctggaggccctgaggcagcgggagaaacgccccaacacggcgcagcgggggagcccaggcgctggcctctctttccagtggctcttccggatcctgcagcttttgggtcatgctcctgtgctgctgtgcccctcagggtcctcctgcctcccgagcctccctgctccacatggcccctgcccagccctctccatccctcttgaaggaggccccgagttcctgaagacgcccctggggggcagcttcctggtgtacgagtccttcctctaccggcgggagaaggcggccggggagaaggtgtattggacctgccgggaccaggcccgcatgggctgccgcagccgcgccatcacccagggccggcgggtcatggtcatgcgcaggcactgccacccaccggacctgggcggcctggaggccctgcggcagcgggagcacttccccaacctggcgcagtgggacagcccagatcctctccggcccctggagttcctgaggacttccctggggggcaggttcctggtgcacgagtccttcctctacaggaaggagaaggcggctggggagaaggtgtactggatgtgccgggaccaggctcggctgggctgccgcagccgcgccataacccagggccaccgcatcatggtcatgcgcagccactgccatcagcctgacctggcaggcctggaggccttgaggcaacgggagcggctccccaccacggcccagcaggaggacccagaaaagattcaagttcagctgtgcttcaagacgtgttctcctgaaagccagcagatttatggggacatcaaagacgtcagactggatggcgagtcccagtgaggcgatgtgggcagaggagctccgagccgcccacccaaggtggcttcacatccacacaggcacttcccatccacctaggtttggcttagcagaaacttcttttcattcttccaaagcatcgatggtcttcgcgtctcctcaggaggtctcccaggaggaattcttggatggtgtcctcatgtcggcggagaacagtgctcagagctggcgcttgcagacgcagctgtcgtggggcagggcggtggcgccttcctgacctttggaagacatgacaaagctgcctggacacggacgcccctgctgtacggccacagcacccctgggtttgcagagcacgcagccttcctagggctttccacctggcgaggccccgctctgctcagcacggtgcaaagtgaatgctgctgtcttggagcctgggcacgtttggggaagttcctgcttcaaactgagctgccccgcataggccaggtcaacccacaccaatcttttctggacaggtgctgggtaggccttcctggtctctggccgcctgctgccagggtgtggccatccccagcaaccggagccggccaaaccagaggcctcgctccgcactccacactttcctttctgtgctccttccaagttaaattaaaccccctctccacgattcccacggcaggcgtcattcccgagatgggagccagtccaggggtcagcaggagccagcgctgggcacacgtgccctggctgaggccagcggcatcctgggtggcccaggtccatcctgggcagcaaaggcgtgtccccttctgtcagacagcttcacagagtgtggcttcaccagtcagagggagcagtccggagaggcaagatgaccccaccgggactgcagagcctcctccttactaacaaggacctgtccgcagccgcgaggtccttcactcccaccctgtaattgtggggggagtgccagcaacaggcctgtcccctggcaagttggccacggaacccaccatgcactgcaaggctgtgacagcctgggcacccctgcttctcctctgcttgtacggttcccccaataaatcctattttccatct

SEQ ID NO: 366543 - DNA, 5259 bp, Homo sapiens
  misc_feature (62)..(62): n is a, c, g, or t
gtcgcgcgcgcggtcacggggctcgctcccgaggggcaggtcggggctgggagctggtgccngggtcggggtggcggcggcggcctgggccgcgaggtcgacgctcgctgctgcagcggcagaggctaaaggatccgccgcggcgctgtcgccggagagggagggccccgctgccgtcggtgaaaccagcccagagaagttacgggatttgcccccggggctcctgcccagcaagccagcgccgtgacccaggtgtgggggatgatggtgacgcttctcactcacatgtgaaggacggaaccactgcactccaggttccttgctgggtgctgagcgtggcctgagggacaggccctgggtcccgggatgcccctgcccgagcccagcgagcaggagggcgagagtgtgaaggccggccaggagccatcccccaagccaggcacggacgtcatcccggcagcccccaggaagcccagggagttctccaaactggtgctgctcacagcctccgaccaagatgaggatggggtgggatccaagccccaggaagtgcactgcgtcctgtccctggagatggctggccccgccaccctcgccagcaccttgcagatcctgccagttgaggagcagggaggggtggtccagccagccctagagatgcctgaacagaagtgcagcaagctggatgcagcagcccctcagtccctggagttcctgaggacaccattcgggggccgcctcctggtgctggagtccttcctgtacaagcaggagaaggcagtgggggacaaggtgtactggaagtgccgccaacatgctgagctgggctgccggggccgggccatcacccgaggcctgcgggccacagtgatgcggggccactgccacgcgcccgatgagcaaggcctggaggcccggcgccagagggagaaactgcccagcctggccctgccagagggcttgggagagccccagggtcctgagggccctggaggccgagtggaggagcccctggagggggtgggcccgtggcagtgccctgaggagcccgagcccactcctgggctggtgctgagcaagccggccctggaggaggaggaggcaccccgagccctgtcactgctgagcctgccgcccaagaagcgctcgatcctggggctgggacaggcccggcccctcgagttcctgaggacgtgctacgggggcagcttcctggtacacgagtcgttcctctacaagcgggagaaggctgtcggggacaaggtgtattggacctgccgggaccacgcgctgcacggctgccggagccgggccatcacccagggacagcgggtgactgtgatgcgtgggcactgccaccagcccgatatggagggcctggaagcccggcggcagcaggagaaggccgtggagacgctgcaggctgggcaggacggccctgggagccaagtggacacgctgctccgaggcgtggatagtttgctctaccgcaggggtccgggtcccctgactctcaccaggcctcggcccagaaagcgagcaaaggtcgaagaccaggagctgccaacccagcccgaggccccagacgagcaccaggacatggacgcagacccgggaggccctgagttcctgaagacgcccctggggggcagcttcctggtgtacgagtccttcctctaccggcgggagaaggcggctggggagaaggtgtattggacctgccgggaccaggcccgcatgggctgccgcagccgcgccatcacccagggccgacgggtgactgtcatgcgtggtcactgccacccgcccgacctgggaggcctggaggccctgaggcagcgggagaaacgccccaacacggcgcagcgggggagcccagagagacagtgctgcgaggtccccgcctcgtcctcacccccgctcctgaccccacaaagtcctggggtcacacctctacctgcgcggctctcgggggccacccctctcagccccatccggctcctgagcagctttgtccccagagggccccgggtcattcctctgaccaaccaggcacggcgcaccctgcatgcaagcctgggcgggtgctggggacggacgagtgacgcagcagacactgcctccctgaaggcatggcaaggaggccccgagttcctgaagacgcccctggggggcagcttcctggtgtacgagtccttcctctaccggcgggagaaggcggccggggagaaggtgtattggacctgccgggaccaggcccgcatgggctgccgcagccgcgccatcacccagggccggcgggtcatggtcatgcgcaggcactgccacccaccggacctgggcggcctggaggccctgcggcagcgggagcacttccccaacctggcgcagtgggacagcccagatcctctccggcccctggagttcctgaggacttccctggggggcaggttcctggtgcacgagtccttcctctacaggaaggagaaggcggctggggagaaggtgtactggatgtgccgggaccaggctcggctgggctgccgcagccgcgccataacccagggccaccgcatcatggtcatgcgcagccactgccatcagcctgacctggcaggcctggaggccttgaggcaacgggagcggctccccaccacggcccagcaggaggacccagaaaagattcaagttcagctgtgcttcaagacgtgttctcctgaaagccagcagatttatggggacatcaaagacgtcagactggatggcgagtcccagtgaggcgatgtgggcagaggagctccgagccgcccacccaaggtggcttcacatccacacaggcacttcccatccacctaggtttggcttagcagaaacttcttttcattcttccaaagcatcgatggtcttcgcgtctcctcaggaggtctcccaggaggaattcttggatggtgtcctcatgtcggcggagaacagtgctcagagctggcgcttgcagacgcagctgtcgtggggcagggcggtggcgccttcctgacctttggaagacatgacaaagctgcctggacacggacgcccctgctgtacggccacagcacccctgggtttgcagagcacgcagccttcctagggctttccacctggcgaggccccgctctgctcagcacggtgcaaagtgaatgctgctgtcttggagcctgggcacgtttggggaagttcctgcttcaaactgagctgccccgcataggccaggtcaacccacaccaatcttttctggacaggtgctgggtaggccttcctggtctctggccgcctgctgccagggtgtggccatccccagcaaccggagccggccaaaccagaggcctcgctccgcactccacactttcctttctgtgctccttccaagttaaattaaaccccctctccacgattcccacggcaggcgtcattcccgagatgggagccagtccaggggtcagcaggagccagcgctgggcacacgtgccctggctgaggccagcggcatcctgggtggcccaggtccatcctgggcagcaaaggcgtgtccccttctgtcagacagcttcacagagtgtggcttcaccagtcagagggagcagtccggagaggcaagatgaccccaccgggactgcagagcctcctccttactaacaaggacctgtccgcagccgcgaggtccttcactcccaccctgtaattgtggggggagtgccagcaacaggcctgtcccctggcaagttggccacggaacccaccatgcactgcaaggctgtgacagcctgggcacccctgcttctcctctgcttgtacggttcccccaataaatcctattttccatctcaccgtgtggagctggtacttgttcacatccctcttgcagcaacagttggccgccgtgaaaccacactccgtcacatctccatgccagtgcccagggggagacccctccccatgcctgggctgttacagtcacctggcccagacgtaacctggaccaagagtggacggagacacctggggttggggcctctggaagggctgctggggggccagctgcagcctgtggcctctcccaggcccggatatggcaggacatttgcgtcgtgttgctggaagaggcaggatgctctgttctcgccattagcctgcgttacgcctagactcatctgcataagcctgggcaagtggcacccctgggccaagggcagacttgcccacccgtccatcctttgcctatggcagaggacacacaacacagtggctgcgctttgggcactgttctcggccctgaagcatcctgccccgaggctgacctaactgcccccagctggactcatggccaaggctacagacccagtactccaatcccgactcccactgtgtggtccaaatgtgtacgcccacaggaggcagccatgcccgaggaaggtacttgctgaaagatggtccagttcatgccgccaccagctggacctctgatcaggccccctgcagaaggggaagctctccacatgcccaagatacgagagaaacgcccgggtcacagcagcctgagtcactgcagcctctgctacctgccaagcctgcgccctccacctgtgggctccttgcctctgtgatggggcctccacggccagcatcttcccgccatggtcacatgatgccatgccctgctctgggcacccctaagcgggtatgaggcgaatcagaggaagaatatcggcttctcttcccttttggatatttgcgtcattgaccgggactggcccactcttcctctgcctcacgcctgctttgaccttagaagacagacggcagctcgcgttgctgggctgagattctccaatggacgtgaatttagatgatgctgttgccttgggtggcttcatggccaccaacccgcaccctggtggccactcagccatgacaagggcctgacagccactaagtgagcttcagagccttccccttgcaaagttccagggccaccagatgtcgcctgcccagtcactgtcacagagttaaagcgtgcgggtgaacgctggccgcggagcgtgcagcccggcagcagctcagcggggcagctcctgcttccagccctgcctctgctggtgtcgcccacaaaccctgctgtatgacatttgcaccacatggtgtgtgtccgtgccctttgacatgacagtgccaacaacatctcatgaaatttaaaataaatccccaaggcatcagaaacgtaaa

SEQ ID NO: 366544 - DNA, 3675 bp, Homo sapiens
  misc_feature (62)..(62): n is a, c, g, or t
  misc_feature (3608)..(3608): n is a, c, g, or t
gtcgcgcgcgcggtcacggggctcgctcccgaggggcaggtcggggctgggagctggtgccngggtcggggtggcggcggcggcctgggccgcgaggtcgacgctcgctgctgcagcggcagaggctaaaggatccgccgcggcgctgtcgccggagagggagggccccgctgccgtcggtgaaaccagcccagagaagttacgggatttgcccccggggctcctgcccagcaagccagcgccgtgacccaggtgtgggggatgatggtgacgcttctcactcacatgtgaaggacggaaccactgcactccaggttccttgctgggtgctgagcgtggcctgagggacaggccctgggtcccgggatgcccctgcccgagcccagcgagcaggagggcgagagtgtgaaggccggccaggagccatcccccaagccaggcacggacgtcatcccggcagcccccaggaagcccagggagttctccaaactggtgctgctcacagcctccgaccaagatgaggatggggtgggatccaagccccaggaagtgcactgcgtcctgtccctggagatggctggccccgccaccctcgccagcaccttgcagatcctgccagttgaggagcagggaggggtggtccagccagccctagagatgcctgaacagaagtgcagcaagctggatgcagcagcccctcagtccctggagttcctgaggacaccattcgggggccgcctcctggtgctggagtccttcctgtacaagcaggagaaggcagtgggggacaaggtgtactggaagtgccgccaacatgctgagctgggctgccggggccgggccatcacccgaggcctgcgggccacagtgatgcggggccactgccacgcgcccgatgagcaaggcctggaggcccggcgccagagggagaaactgcccagcctggccctgccagagggcttgggagagccccagggtcctgagggccctggaggccgagtggaggagcccctggagggggtgggcccgtggcagtgccctgaggagcccgagcccactcctgggctggtgctgagcaagccggccctggaggaggaggaggcaccccgagccctgtcactgctgagcctgccgcccaagaagcgctcgatcctggggctgggacaggcccggcccctcgagttcctgaggacgtgctacgggggcagcttcctggtacacgagtcgttcctctacaagcgggagaaggctgtcggggacaaggtgtattggacctgccgggaccacgcgctgcacggctgccggagccgggccatcacccagggacagcgggtgactgtgatgcgtgggcactgccaccagcccgatatggagggcctggaagcccggcggcagcaggagaaggccgtggagacgctgcaggctgggcaggacggccctgggagccaagtggacacgctgctccgaggcgtggatagtttgctctaccgcaggggtccgggtcccctgactctcaccaggcctcggcccagaaagcgagcaaaggtcgaagaccaggagctgccaacccagcccgaggccccagacgagcaccaggacatggacgcagacccgggaggccctgagttcctgaagacgcccctggggggcagcttcctggtgtacgagtccttcctctaccggcgggagaaggcggctggggagaaggtgtattggacctgccgggaccaggcccgcatgggctgccgcagccgcgccatcacccagggccgacgggtgactgtcatgcgtggtcactgccacccgcccgacctgggaggcctggaggccctgaggcagcgggagaaacgccccaacacggcgcagcgggggagcccaggaggccccgagttcctgaagacgcccctggggggcagcttcctggtgtacgagtccttcctctaccggcgggagaaggcggccggggagaaggtgtattggacctgccgggaccaggcccgcatgggctgccgcagccgcgccatcacccagggccggcgggtcatggtcatgcgcaggcactgccacccaccggacctgggcggcctggaggccctgcggcagcgggagcacttccccaacctggcgcagtgggacagcccagatcctctccggcccctggagttcctgaggacttccctggggggcaggttcctggtgcacgagtccttcctctacaggaaggagaaggcggctggggagaaggtgtactggatgtgccgggaccaggctcggctgggctgccgcagccgcgccataacccagggccaccgcatcatggtcatgcgcagccactgccatcagcctgacctggcaggcctggaggccttgaggcaacgggagcggctccccaccacggcccagcaggaggacccagaaaagattcaagttcagctgtgcttcaagacgtgttctcctgaaagccagcagatttatggggacatcaaagacgtcagactggatggcgagtcccagtgaggcgatgtgggcagaggagctccgagccgcccacccaaggtggcttcacatccacacaggcacttcccatccacctaggtttggcttagcagaaacttcttttcattcttccaaagcatcgatggtcttcgcgtctcctcaggaggtctcccaggaggaattcttggatggtgtcctcatgtcggcggagaacagtgctcagagctggcgcttgcagacgcagctgtcgtggggcagggcggtggcgccttcctgacctttggaagacatgacaaagctgcctggacacggacgcccctgctgtacggccacagcacccctgggtttgcagagcacgcagccttcctagggctttccacctggcgaggccccgctctgctcagcacggtgcaaagtgaatgctgctgtcttggagcctgggcacgtttggggaagttcctgcttcaaactgagctgccccgcataggccaggtcaacccacaccaatcttttctggacaggtgctgggtaggccttcctggtctctggccgcctgctgccagggtgtggccatccccagcaaccggagccggccaaaccagaggcctcgctccgcactccacactttcctttctgtgctccttccaagttaaattaaaccccctctccacgattcccacggcaggcgtcattcccgagatgggagccagtccaggggtcagcaggagccagcgctgggcacacgtgccctggctgaggccagcggcatcctgggtggcccaggtccatcctgggcagcaaaggcgtgtccccttctgtcagacagcttcacagagtgtggcttcaccagtcagagggagcagtccggagaggcaagatgaccccaccgggactgcagagcctcctccttactaacaaggacctgtccgcagccgcgaggtccttcactcccaccctgtaattgtggggggagtgccagcaacaggcctgtcccctggcaagttggccacggaacccaccatgcactgcaaggctgtgacagcctgggcacccctgcttctcctctgcttgtacggttcccccaataaatcctattttccatctaaaaaaanaaaataaattttgagggggggcccgtgtcccaaatcgtcctataatgagtcgttttacaattcactg

SEQ ID NO: 366545 - DNA, 2555 bp, Homo sapiens
  misc_feature (62)..(62): n is a, c, g, or t
gtcgcgcgcgcggtcacggggctcgctcccgaggggcaggtcggggctgggagctggtgccngggtcggggtggcggcggcggcctgggccgcgaggtcgacgctcgctgctgcagcggcagaggctaaaggatccgccgcggcgctgtcgccggagagggagggccccgctgccgtcggtgaaaccagcccagagaagttacgggatttgcccccggggctcctgcccagcaagccagcgccgtgacccaggtgtgggggatgatggtgacgcttctcactcacatgtgaaggacggaaccactgcactccaggttccttgctgggtgctgagcgtggcctgagggacaggccctgggtcccgggatgcccctgcccgagcccagcgagcaggagggcgagagtgtgaaggccggccaggagccatcccccaagccaggcacggacgtcatcccggcagcccccaggaagcccagggagttctccaaactggtgctgctcacagcctccgaccaagatgaggatggggtgggatccaagccccaggaagtgcactgcgtcctgtccctggagatggctggccccgccaccctcgccagcaccttgcagatcctgccagttgaggagcagggaggggtggtccagccagccctagagatgcctgaacagaagtgcagcaagctggatgcagcagcccctcagtccctggagttcctgaggacaccattcgggggccgcctcctggtgctggagtccttcctgtacaagcaggagaaggcagtgggggacaaggtgtactggaagtgccgccaacatgctgagctgggctgccggggccgggccatcacccgaggcctgcgggccacagtgatgcggggccactgccacgcgcccgatgagcaaggcctggaggcccggcgccagagggagaaactgcccagcctggccctgccagagggcttgggagagccccagggtcctgagggccctggaggccgagtggaggagcccctggagggggtgggcccgtggcagtgccctgaggagcccgagcccactcctgggctggtgctgagcaagccggccctggaggaggaggaggcaccccgagccctgtcactgctgagcctgccgcccaagaagcgctcgatcctggggctgggacaggcccggcccctcgagttcctgaggacgtgctacgggggcagcttcctggtacacgagtcgttcctctacaagcgggagaaggctgtcggggacaaggtgtattggacctgccgggaccacgcgctgcacggctgccggagccgggccatcacccagggacagcgggtgactgtgatgcgtgggcactgccaccagcccgatatggagggcctggaagcccggcggcagcaggagaaggccgtggagacgctgcaggctgggcaggacggccctgggagccaagtggacacgctgctccgaggcgtggatagtttgctctaccgcaggggtccgggtcccctgactctcaccaggcctcggcccagaaagcgagcaaaggtcgaagaccaggagctgccaacccagcccgaggccccagacgagcaccaggacatggacgcagacccgggaggccctgagttcctgaagacgcccctggggggcagcttcctggtgtacgagtccttcctctaccggcgggagaaggcggctggggagaaggtgtattggacctgccgggaccaggcccgcatgggctgccgcagccgcgccatcacccagggccgacgggtgactgtcatgcgtggtcactgccacccgcccgacctgggaggcctggaggccctgaggcagcgggagaaacgccccaacacggcgcagcgggggagcccaggaggccccgagttcctgaagacgcccctggggggcagcttcctggtgtacgagtccttcctctaccggcgggagaaggcggccggggagaaggtgtattggacctgccgggaccaggcccgcatgggctgccgcagccgcgccatcacccagggccggcgggtcatggtcatgcgcaggcactgccacccaccggacctgggcggcctggaggccctgcggcagcgggagcacttccccaacctggcgcagtgggacagcccagatcctctccggcccctggagttcctgaggacttccctggggggcaggttcctggtgcacgagtccttcctctacaggaaggagaaggcggctggggagaaggtgtactggatgtgccgggaccaggctcggctgggctgccgcagccgcgccataacccagggccaccgcatcatggtcatgcgcagccactgccatcagcctgacctggcaggcctggaggccttgaggcaacgggagcggctccccaccacggcccagcaggaggacccagaaaagattcaagttcagctgtgcttcaagacgtgttctcctgaaagccagcagatttatgggtaattgtatttgttatctaatggtgcatgaccaattacaacaaaacgtagtgggcttaaaacaacaaatatttgctg

SEQ ID NO: 366546 - DNA, 3146 bp, Homo sapiens
  misc_feature (62)..(62): n is a, c, g, or t
gtcgcgcgcgcggtcacggggctcgctcccgaggggcaggtcggggctgggagctggtgccngggtcggggtggcggcggcggcctgggccgcgaggtcgacgctcgctgctgcagcggcagaggctaaaggatccgccgcggcgctgtcgccggagagggagggccccgctgccgtcggtgaaaccagcccagagaagttacgggatttgcccccggggctcctgcccagcaagccagcgccgtgacccaggtgtgggggatgatggtgacgcttctcactcacatgtgaaggacggaaccactgcactccaggttccttgctgggtgctgagcgtggcctgagggacaggccctgggtcccgggatgcccctgcccgagcccagcgagcaggagggcgagagtgtgaaggccggccaggagccatcccccaagccaggcacggacgtcatcccggcagcccccaggaagcccagggagttctccaaactggtgctgctcacagcctccgaccaagatgaggatggggtgggatccaagccccaggaagtgcactgcgtcctgtccctggagatggctggccccgccaccctcgccagcaccttgcagatcctgccagttgaggagcagggaggggtggtccagccagccctagagatgcctgaacagaagtgcagcaagctggatgcagcagcccctcagtccctggagttcctgaggacaccattcgggggccgcctcctggtgctggagtccttcctgtacaagcaggagaaggcagtgggggacaaggtgtactggaagtgccgccaacatgctgagctgggctgccggggccgggccatcacccgaggcctgcgggccacagtgatgcggggccactgccacgcgcccgatgagcaaggcctggaggcccggcgccagagggagaaactgcccagcctggccctgccagagggcttgggagagccccagggtcctgagggccctggaggccgagtggaggagcccctggagggggtgggcccgtggcagtgccctgaggagcccgagcccactcctgggctggtgctgagcaagccggccctggaggaggaggaggcaccccgagccctgtcactgctgagcctgccgcccaagaagcgctcgatcctggggctgggacaggcccggcccctcgagttcctgaggacgtgctacgggggcagcttcctggtacacgagtcgttcctctacaagcgggagaaggctgtcggggacaaggtgtattggacctgccgggaccacgcgctgcacggctgccggagccgggccatcacccagggacagcgggtgactgtgatgcgtgggcactgccaccagcccgatatggagggcctggaagcccggcggcagcaggagaaggccgtggagacgctgcaggctgggcaggacggccctgggagccaagtggacacgctgctccgaggcgtggatagtttgctctaccgcaggggtccgggtcccctgactctcaccaggcctcggcccagaaagcgagcaaaggtcgaagaccaggagctgccaacccagcccgaggccccagacgagcaccaggacatggacgcagacccgggaggccctgagttcctgaagacgcccctggggggcagcttcctggtgtacgagtccttcctctaccggcgggagaaggcggctggggagaaggtgtattggacctgccgggaccaggcccgcatgggctgccgcagccgcgccatcacccagggccgacgggtgactgtcatgcgtggtcactgccacccgcccgacctgggaggcctggaggccctgaggcagcgggagaaacgccccaacacggcgcagcgggggagcccaggaggccccgagttcctgaagacgcccctggggggcagcttcctggtgtacgagtccttcctctaccggcgggagaaggcggccggggagaaggtgtattggacctgccgggaccaggcccgcatgggctgccgcagccgcgccatcacccagggccggcgggtcatggtcatgcgcaggcactgccacccaccggacctgggcggcctggaggccctgcggcagcgggagcacttccccaacctggcgcagtgggacagcccagatcctctccggcccctggagttcctgaggacttccctggggggcaggttcctggtgcacgagtccttcctctacaggaaggagaaggcggctggggagaaggtgtactggatgtgccgggaccaggctcggctgggctgccgcagccgcgccataacccagggccaccgcatcatggtcatgcgcagccactgccatcagcctgacctggcaggcctggaggccttgaggcaacgggagcggctccccaccacggcccagcaggaggacccagaaaagattcaagttcagctgtgcttcaagacgtgttctcctgaaagccagcagatttatggtaaatcccagccactagtatgatggtaggctaagtcctgtgagtccctcaagtgcagtcaccaagcctagtgtgtgatggggatgcctgcataccagatcagtagagaaaaggacaaaaaccgtgtgatcactgaatagacacaaaacatttgacaacctccaacacgctttcatgataaaaacattcaacaaactaggaataaaaggagtttcttcagcctgatcaagagcatccgtgaaaacccccacaagcaggccaggcgcgggggttcacgcctgtaatcccacctcggtttccccaaatgctgggattacaggcgtgagccaccgcgcctggcccgggtgtcttttttcgaaaggataaattggcataggtgggatttcctcctcgatcttgagaaaatggccgagtgattagacaaataatagtaatgttttgcaatatcttgaagtgtaacctcttgtttccagttttggtgttttcttaaaaaggagcattcttcggaaagttaaaatgtcacgtcttaatttcagttttcctaatcagatttgataattcaagagtcttttcttatctagttcttaatctggctcactataccgttgaagacgctgaacccctagaactcttggtccagtacacccgccgtcgggtaccctctccgtca

SEQ ID NO: 366547 - DNA, 1942 bp, Homo sapiens
  misc_feature (62)..(62): n is a, c, g, or t
gtcgcgcgcgcggtcacggggctcgctcccgaggggcaggtcggggctgggagctggtgccngggtcggggtggcggcggcggcctgggccgcgaggtcgacgctcgctgctgcagcggcagaggctaaaggatccgccgcggcgctgtcgccggagagggagggccccgctgccgtcggtgaaaccagcccagagaagttacgggatttgcccccggggctcctgcccagcaagccagcgccgtgacccaggtgtgggggatgatggtgacgcttctcactcacatgtgaaggacggaaccactgcactccaggttccttgctgggtgctgagcgtggcctgagggacaggccctgggtcccgggatgcccctgcccgagcccagcgagcaggagggcgagagtgtgaaggccggccaggagccatcccccaagccaggcacggacgtcatcccggcagcccccaggaagcccagggagttctccaaactggtgctgctcacagcctccgaccaagatgaggatggggtgggatccaagccccaggaagtgcactgcgtcctgtccctggagatggctggccccgccaccctcgccagcaccttgcagatcctgccagttgaggagcagggaggggtggtccagccagccctagagatgcctgaacagaagtgcagcaagctggatgcagcagcccctcagtccctggagttcctgaggacaccattcgggggccgcctcctggtgctggagtccttcctgtacaagcaggagaaggcagtgggggacaaggtgtactggaagtgccgccaacatgctgagctgggctgccggggccgggccatcacccgaggcctgcgggccacagtgatgcggggccactgccacgcgcccgatgagcaaggcctggaggcccggcgccagagggagaaactgcccagcctggccctgccagagggcttgggagagccccagggtcctgagggccctggaggccgagtggaggagcccctggagggggtgggcccgtggcagtgccctgaggagcccgagcccactcctgggctggtgctgagcaagccggccctggaggaggaggaggcaccccgagccctgtcactgctgagcctgccgcccaagaagcgctcgatcctggggctgggacaggcccggcccctcgagttcctgaggacgtgctacgggggcagcttcctggtacacgagtcgttcctctacaagcgggagaaggctgtcggggacaaggtgtattggacctgccgggaccacgcgctgcacggctgccggagccgggccatcacccagggacagcgggtgactgtgatgcgtgggcactgccaccagcccgatatggagggcctggaagcccggcggcagcaggagaaggccgtggagacgctgcaggctgggcaggacggccctgggagccaagtggacacgctgctccgaggcgtggatagtttgctctaccgcaggggtccgggtcccctgactctcaccaggcctcggcccagaaagcgagcaaaggtcgaagaccaggagctgccaacccagcccgaggccccagacgagcaccaggacatggacgcagacccgggaggccctgagttcctgaagacgcccctggggggcagcttcctggtgtacgagtccttcctctaccggcgggagaaggcggctggggagaaggtgtattggacctgccgggaccaggcccgcatgggctgccgcagccgcgccatcacccagggccgacgggtgactgtcatgcgtggtcactgccacccgcccgacctgggaggcctggaggccctgaggcagcgggagaaacgccccaacacgtcttgcgggggctgcccgtcttgcggggggccagttcgtccctttccagttttacagtgaattgctgcgtcttggggggctg

SEQ ID NO: 366548 - DNA, 333 bp, Homo sapiens
  misc_feature (62)..(62): n is a, c, g, or t
gtcgcgcgcgcggtcacggggctcgctcccgaggggcaggtcggggctgggagctggtgccngggtcggggtggcggcggcggcctgggccgcgaggtcgacgctcgctgctgcagcggcagaggctaaaggatccgccgcggcgctgtcgccggagagggagggccccgctgccgtcggtgaaaccagcccagagaagttacgggatttgcccccggggctcctgcccagcaagccagcgccgtgacccaggtgtgggggatgatggtgacgcttctcactcacatgtgaaggtaattctgtggctccatcagctgccgacagagccgcctg

SEQ ID NO: 366549 - DNA, 5051 bp, Homo sapiens
  misc_feature (62)..(62): n is a, c, g, or t
gtcgcgcgcgcggtcacggggctcgctcccgaggggcaggtcggggctgggagctggtgccngggtcggggtggcggcggcggcctgggccgcgaggtcgacgctcgctgctgcagcggcagaggctaaaggatccgccgcggcgctgtcgccggagagggagggccccgctgccgtcggtgaaaccagcccagagaagttacgggatttgcccccggggctcctgcccagcaagccagcgccgtgacccaggtgtgggggatgatggtgacgcttctcactcacatgtgaaggacggaaccactgcactccaggttccttgctgggtgctgagcgtggcctgagggacaggccctgggtcccgggatgcccctgcccgagcccagcgagcaggagggcgagagtgtgaaggccggccaggagccatcccccaagccaggcacggacgtcatcccggcagcccccaggaagcccagggagttctccaaactggtgctgctcacagcctccgaccaagatgaggatggggtgggatccaagccccaggaagtgcactgcgtcctgtccctggagatggctggccccgccaccctcgccagcaccttgcagatcctgccagttgaggagcagggaggggtggtccagccagccctagagatgcctgaacagaagtgcagcaagctggatgcagcagcccctcagtccctggagttcctgaggacaccattcgggggccgcctcctggtgctggagtccttcctgtacaagcaggagaaggcagtgggggacaaggtgtactggaagtgccgccaacatgctgagctgggctgccggggccgggccatcacccgaggcctgcgggccacagtgatgcggggccactgccacgcgcccgatgagcaaggcctggaggcccggcgccagagggagaaactgcccagcctggccctgccagagggcttgggagagccccagggtcctgagggccctggaggccgagtggaggagcccctggagggggtgggcccgtggcagtgccctgaggagcccgagcccactcctgggctggtgctgagcaagccggccctggaggaggaggaggcaccccgagccctgtcactgctgagcctgccgcccaagaagcgctcgatcctggggctgggacaggcccggcccctcgagttcctgaggacgtgctacgggggcagcttcctggtacacgagtcgttcctctacaagcgggagaaggctgtcggggacaaggtgtattggacctgccgggaccacgcgctgcacggctgccggagccgggccatcacccagggacagcgggtgactgtgatgcgtgggcactgccaccagcccgatatggagggcctggaagcccggcggcagcaggagaaggccgtggagacgctgcaggctgggcaggacggccctgggagccaagtggacacgctgctccgaggcgtggatagtttgctctaccgcaggggtccgggtcccctgactctcaccaggcctcggcccagaaagcgagcaaaggtcgaagaccaggagctgccaacccagcccgaggccccagacgagcaccaggacatggacgcagacccgggaggccctgagttcctgaagacgcccctggggggcagcttcctggtgtacgagtccttcctctaccggcgggagaaggcggctggggagaaggtgtattggacctgccgggaccaggcccgcatgggctgccgcagccgcgccatcacccagggccgacgggtgactgtcatgcgtggtcactgccacccgcccgacctgggaggcctggaggccctgaggcagcgggagaaacgccccaacacggcgcagcgggggagcccaggcgctggcctctctttccagtggctcttccggatcctgcagcttttgggtcatgaggccccgagttcctgaagacgcccctggggggcagcttcctggtgtacgagtccttcctctaccggcgggagaaggcggccggggagaaggtgtattggacctgccgggaccaggcccgcatgggctgccgcagccgcgccatcacccagggccggcgggtcatggtcatgcgcaggcactgccacccaccggacctgggcggcctggaggccctgcggcagcgggagcacttccccaacctggcgcagtgggacagcccagatcctctccggcccctggagttcctgaggacttccctggggggcaggttcctggtgcacgagtccttcctctacaggaaggagaaggcggctggggagaaggtgtactggatgtgccgggaccaggctcggctgggctgccgcagccgcgccataacccagggccaccgcatcatggtcatgcgcagccactgccatcagcctgacctggcaggcctggaggccttgaggcaacgggagcggctccccaccacggcccagcaggaggacccagaaaagattcaagttcagctgtgcttcaagacgtgttctcctgaaagccagcagatttatggggacatcaaagacgtcagactggatggcgagtcccagtgaggcgatgtgggcagaggagctccgagccgcccacccaaggtggcttcacatccacacaggcacttcccatccacctaggtttggcttagcagaaacttcttttcattcttccaaagcatcgatggtcttcgcgtctcctcaggaggtctcccaggaggaattcttggatggtgtcctcatgtcggcggagaacagtgctcagagctggcgcttgcagacgcagctgtcgtggggcagggcggtggcgccttcctgacctttggaagacatgacaaagctgcctggacacggacgcccctgctgtacggccacagcacccctgggtttgcagagcacgcagccttcctagggctttccacctggcgaggccccgctctgctcagcacggtgcaaagtgaatgctgctgtcttggagcctgggcacgtttggggaagttcctgcttcaaactgagctgccccgcataggccaggtcaacccacaccaatcttttctggacaggtgctgggtaggccttcctggtctctggccgcctgctgccagggtgtggccatccccagcaaccggagccggccaaaccagaggcctcgctccgcactccacactttcctttctgtgctccttccaagttaaattaaaccccctctccacgattcccacggcaggcgtcattcccgagatgggagccagtccaggggtcagcaggagccagcgctgggcacacgtgccctggctgaggccagcggcatcctgggtggcccaggtccatcctgggcagcaaaggcgtgtccccttctgtcagacagcttcacagagtgtggcttcaccagtcagagggagcagtccggagaggcaagatgaccccaccgggactgcagagcctcctccttactaacaaggacctgtccgcagccgcgaggtccttcactcccaccctgtaattgtggggggagtgccagcaacaggcctgtcccctggcaagttggccacggaacccaccatgcactgcaaggctgtgacagcctgggcacccctgcttctcctctgcttgtacggttcccccaataaatcctattttccatctcaccgtgtggagctggtacttgttcacatccctcttgcagcaacagttggccgccgtgaaaccacactccgtcacatctccatgccagtgcccagggggagacccctccccatgcctgggctgttacagtcacctggcccagacgtaacctggaccaagagtggacggagacacctggggttggggcctctggaagggctgctggggggccagctgcagcctgtggcctctcccaggcccggatatggcaggacatttgcgtcgtgttgctggaagaggcaggatgctctgttctcgccattagcctgcgttacgcctagactcatctgcataagcctgggcaagtggcacccctgggccaagggcagacttgcccacccgtccatcctttgcctatggcagaggacacacaacacagtggctgcgctttgggcactgttctcggccctgaagcatcctgccccgaggctgacctaactgcccccagctggactcatggccaaggctacagacccagtactccaatcccgactcccactgtgtggtccaaatgtgtacgcccacaggaggcagccatgcccgaggaaggtacttgctgaaagatggtccagttcatgccgccaccagctggacctctgatcaggccccctgcagaaggggaagctctccacatgcccaagatacgagagaaacgcccgggtcacagcagcctgagtcactgcagcctctgctacctgccaagcctgcgccctccacctgtgggctccttgcctctgtgatggggcctccacggccagcatcttcccgccatggtcacatgatgccatgccctgctctgggcacccctaagcgggtatgaggcgaatcagaggaagaatatcggcttctcttcccttttggatatttgcgtcattgaccgggactggcccactcttcctctgcctcacgcctgctttgaccttagaagacagacggcagctcgcgttgctgggctgagattctccaatggacgtgaatttagatgatgctgttgccttgggtggcttcatggccaccaacccgcaccctggtggccactcagccatgacaagggcctgacagccactaagtgagcttcagagccttccccttgcaaagttccagggccaccagatgtcgcctgcccagtcactgtcacagagttaaagcgtgcgggtgaacgctggccgcggagcgtgcagcccggcagcagctcagcggggcagctcctgcttccagccctgcctctgctggtgtcgcccacaaaccctgctgtatgacatttgcaccacatggtgtgtgtccgtgccctttgacatgacagtgccaacaacatctcatgaaatttaaaataaatccccaaggcatcagaaacgtaaa

SEQ ID NO: 366550 - DNA, 3765 bp, Homo sapiens
  misc_feature (62)..(62): n is a, c, g, or t
  misc_feature (3602)..(3602): n is a, c, g, or t
gtcgcgcgcgcggtcacggggctcgctcccgaggggcaggtcggggctgggagctggtgccngggtcggggtggcggcggcggcctgggccgcgaggtcgacgctcgctgctgcagcggcagaggctaaaggatccgccgcggcgctgtcgccggagagggagggccccgctgccgtcggtgaaaccagcccagagaagttacgggatttgcccccggggctcctgcccagcaagccagcgccgtgacccaggtgtgggggatgatggtgacgcttctcactcacatgtgaaggacggaaccactgcactccaggttccttgctgggtgctgagcgtggcctgagggacaggccctgggtcccgggatgcccctgcccgagcccagcgagcaggagggcgagagtgtgaaggccggccaggagccatcccccaagccaggcacggacgtcatcccggcagcccccaggaagcccagggagttctccaaactggtgctgctcacagcctccgaccaagatgaggatggggtgggatccaagccccaggaagtgcactgcgtcctgtccctggagatggctggccccgccaccctcgccagcaccttgcagatcctgccagttgaggagcagggaggggtggtccagccagccctagagatgcctgaacagaagtgcagcaagctggatgcagcagcccctcagtccctggagttcctgaggacaccattcgggggccgcctcctggtgctggagtccttcctgtacaagcaggagaaggcagtgggggacaaggtgtactggaagtgccgccaacatgctgagctgggctgccggggccgggccatcacccgaggcctgcgggccacagtgatgcggggccactgccacgcgcccgatgagcaaggcctggaggcccggcgccagagggagaaactgcccagcctggccctgccagagggcttgggagagccccagggtcctgagggccctggaggccgagtggaggagcccctggagggggtgggcccgtggcagtgccctgaggagcccgagcccactcctgggctggtgctgagcaagccggccctggaggaggaggaggcaccccgagccctgtcactgctgagcctgccgcccaagaagcgctcgatcctggggctgggacaggcccggcccctcgagttcctgaggacgtgctacgggggcagcttcctggtacacgagtcgttcctctacaagcgggagaaggctgtcggggacaaggtgtattggacctgccgggaccacgcgctgcacggctgccggagccgggccatcacccagggacagcgggtgactgtgatgcgtgggcactgccaccagcccgatatggagggcctggaagcccggcggcagcaggagaaggccgtggagacgctgcaggctgggcaggacggccctgggagccaagtggacacgctgctccgaggcgtggatagtttgctctaccgcaggggtccgggtcccctgactctcaccaggcctcggcccagaaagcgagcaaaggtcgaagaccaggagctgccaacccagcccgaggccccagacgagcaccaggacatggacgcagacccgggaggccctgagttcctgaagacgcccctggggggcagcttcctggtgtacgagtccttcctctaccggcgggagaaggcggctggggagaaggtgtattggacctgccgggaccaggcccgcatgggctgccgcagccgcgccatcacccagggccgacgggtgactgtcatgcgtggtcactgccacccgcccgacctgggaggcctggaggccctgaggcagcgggagaaacgccccaacacggcgcagcgggggagcccaggaggccccgagttcctgaagacgcccctggggggcagcttcctggtgtacgagtccttcctctaccggcgggagaaggcggccggggagaaggtgtattggacctgccgggaccaggcccgcatgggctgccgcagccgcgccatcacccagggccggcgggtcatggtcatgcgcaggcactgccacccaccggacctgggcggcctggaggccctgcggcagcgggagcacttccccaacctggcgcagtgggacagcccagatcctctccggcccctggagttcctgaggacttccctggggggcaggttcctggtgcacgagtccttcctctacaggaaggagaaggcggctggggagaaggtgtactggatgtgccgggaccaggctcggctgggctgccgcagccgcgccataacccagggccaccgcatcatggtcatgcgcagccactgccatcagcctgacctggcaggcctggaggccttgaggcaacgggagcggctccccaccacggcccagcaggaggacccagaaaagattcaagttcagctgtgcttcaagacgtgttctcctgaaagccagcagatttatggggacatcaaagacgtcagactggatggcgagtcccagtgaggcgatgtgggcagaggagctccgagccgcccacccaaggtggcttcacatccacacaggcacttcccatccacctaggtttggcttagcagaaacttcttttcattcttccaaagcatcgatggtcttcgcgtctcctcaggaggtctcccaggaggaattcttggatggtgtcctcatgtcggcggagaacagtgctcagagctggcgcttgcagacgcagctgtcgtggggcagggcggtggcgccttcctgacctttggaagacatgacaaagctgcctggacacggacgcccctgctgtacggccacagcacccctgggtttgcagagcacgcagccttcctagggctttccacctggcgaggccccgctctgctcagcacggtgcaaagtgaatgctgctgtcttggagcctgggcacgtttggggaagttcctgcttcaaactgagctgccccgcataggccaggtcaacccacaccaatcttttctggacaggtgctgggtaggccttcctggtctctggccgcctgctgccagggtgtggccatccccagcaaccggagccggccaaaccagaggcctcgctccgcactccacactttcctttctgtgctccttccaagttaaattaaaccccctctccacgattcccacggcaggcgtcattcccgagatgggagccagtccaggggtcagcaggagccagcgctgggcacacgtgccctggctgaggccagcggcatcctgggtggcccaggtccatcctgggcagcaaaggcgtgtccccttctgtcagacagcttcacagagtgtggcttcaccagtcagagggagcagtccggagaggcaagatgaccccaccgggactgcagagcctcctccttactaacaaggacctgtccgcagccgcgaggtccttcactcccaccctgtaattgtggggggagtgccagcaacaggcctgtcccctggcaagttggccacggaacccaccatgcactgcaaggctgtgacagcctgggcacccctgcttctcctctgcttgtacggttcccccaataaatcctattttccatctgnaactgggggggggcccggtcccgaatttgcctataaggaggggtttacattgaatggccgtggtttacaaagccgtgacgggaaaaaacctgctgtccccaattaggcttgaagacatacccctttgccaggtgggctattcgggccggcgttgcccttttcc

SEQ ID NO: 366551 - DNA, 453 bp, Homo sapiens
cctggcgcagtgggacagcccaggtgcgtgtggagggtgctgggctgggtctgcctggtctcccaggacctgtgccccacacgctggctggaggctgcccgtggggtgttgtgtgttgtgcatggtggtctgacagccggggccataaactccccaggggcaggaggctccatctgcgggctccgagctcctgcagctggtcctctgggtagtggggactggctgtcggaggtagaaacccactcagctctctagaggaagaggatggtggccaggggtggcattggcagccacagagagtgcttggcatctgctgacgggccgtacggtggatcctggacactcttggtctacccccacgccacccacactgcttctagtctcacggggttctctctggccaccccaacatcatgtgaccttttagttcagcttgttaaaagtcagctgcca

SEQ ID NO: 366552 - DNA, 480 bp, Homo sapiens
tcttgcgcattcaccgaggctcactgtaccttggtgttcccatttctaaaataaggcctgtagtaatccctacctcactgagttgttgagagacttcatgtaaattgtttagcagggagcctggcacagaacaagagcctagcagaaaagtaagctgttgttactttaagcaaatatttagcagcctaaaatggtggctttacccagtttctgtaatggttgaagtgatgacagaattcagccaatcccaccccatagtttttcttgctaataaagcagtttgtttctaagtgtgttttgatgcgtataattaatacttcctgtccttgatttttggctgaaaaatgtcttctcttcctcgcaccctctgttattcccgtagtgaatattttcattgtggaagagaaattcccattggctcatggttggcattttatttctcctgtccagagacaatatttccacagcctcaaacgtgaa

SEQ ID NO: 366553 - DNA, 347 bp, Homo sapiens
tgcgccaggcatgtgagggcgtccggtggtgggtgcctggcctcgtcagctccaacgacaacccagcaccaccaagagacctgggagctgagtctcctaccagatggggagaccctgggacagagaaggaaggtccggatcaaactggagaagaatcgaagcagatgtttgcacctctttggtacctgatccaaacaaaccaattgtgacacaggttaagtttccaacttgagctagatatctgataatgatgagaaattattgttactcatgtcaggtgtgaccatggtagtgtggttttgtttttcttttttatgccagtatccttacctgaccgagagttgttc

SEQ ID NO: 366554 - DNA, 577 bp, Homo sapiens
tacattgagtaccaccgatgcttgtgtgatcagcgattagttcaacgaatatttattgagtgtaagaggcgctattctagtgggacacagcagtgaagaaaactgatgaaaatcttgcttcacagagtgtggacctgaaggccaccgagggaattatcggttttatgaagtcattctttcttgacctcctcagctacagggtttactcgttacctttgggacagctttatttagatcacttttataacttgttgaaaaagcatgacaataattagcacaaagtttaatcataaagaatttcagaactgcaaaggcagtgttaacacagctccagtgtgctgttacctttacctttagatgttgatgaaaactattgaatgaagatattaaaactgaaagtcttggttttcattaaacagggtccagtcagtggagtgaccaagtaaaaagtgaaaacaagtccccatgggatggcccatgcagtaagcctgcacttaggaaggctgaggcaggaggatgacttgagcccacaagttcaagaccagcctaggcaacatagcaagaccatttctttaaa

SEQ ID NO: 366555 - DNA, 1371 bp, Homo sapiens
agaccgctcacagcggtaccgagggcgggaagggggcaggcagggaagcggcccgcccttcgtcctgccccttcgccctactctgtcacctccgctggaaggagtggaacccatacttgctggtctgatccatgcacaaggcggggctgctaggcctctgtgcccgggcttggaattcggtgcggatggccagctccgggatgacccgccgggacccgctcgcaaataaggtggccctggtaacggcctccaccgacgggatcggcttcgccatcgcccggcgtttggcccaggacggggcccatgtggtcgtcagcagccggaagcagcagaatgtggaccaggcggtggccacgctgcagggggaggggctgagcgtgacgggcaccgtgtgccatgtggggaaggcggaggaccgggagcggctggtggccacggctgtgaagcttcatggaggtatcgatatcctagtctccaatgctgctgtcaaccctttctttggaagcataatggatgtcactgaggaggtgtgggacaagactctggacattaatgtgaaggccccagccctgatgacaaaggcagtggtgccagaaatggagaaacgaggaggcggctcagtggtgatcgtgtcttccatagcagccttcagtccatctcctggcttcagtccttacaatgtcagtaaaacagccttgctgggcctgaccaagaccctggccatagagctggccccaaggaacattagggtgaactgcctagcacctggacttatcaagactagcttcagcaggatgctctggatggacaaggaaaaagaggaaagcatgaaagaaaccctgcggataagaaggttaggcgagccagaggattgtgctggcatcgtgtctttcctgtgctctgaagatgccagctacatcactggggaaacagtggtggtgggtggaggaaccccgtcccgcctctgaggaccgggagacagcccacaggccagagttgggctctagctcctggtgctgttcctgcattcacccactggcctttcccacctctgctcaccttactgttcacctcatcaaatcagttctgccctgtgaaaagatccagccttccctgccgtcaaggtggcgtcttactcgggattcctgctgttgttgtggccttgggtaaaggcctcccctgagaacacaggacaggcctgctgacaaggctgagtctaccttggcaaagaccaagatattttttcctgggccactggggaatctgaggggtgatgggagagaaggaacctggagtggaaggagcagagttgcaaattaacaacttgcaaatgaggtgcaaataaaatgcagatgattgcgcggctttgaa

SEQ ID NO: 366556 - DNA, 1529 bp, Homo sapiens
aggtatatcatcctaagatcttcgtcagctctgacaaacatcctaggaacccactctaactcctcattttttcatgcctcctccagtgctcttcactcatgctgtttccccttcttctcttggcttcagactctggacattaatgtgaaggccccagccctgatgacaaaggcagtggtgccagaaatggagaaacgagggtacagagagtgagagagagcctgggtgagaggggacaccacacgggctgagggcactggtccacaatgggaagatggtcagctctcttctttttccagaggcggctcagtggtgatcgtgtcttccatagcagccttcagtccatctcctgtaagaacccttttgtctacctcttccatcccaccctccactccacatctttccacccctcctattacccaaggaagtttgtgtccccttgtagaatcacaccaccaagtccctgcccacaaaatagatgccttgcctccacaaaccacaacctaggggaggtttagccacaagacagttccctaactctgcccctcccttacaggagatccctattgagcactgccctctatgtctagttattagaaccaagaatgacctggaaactatgagtctaacacattctcttctttctccagggcttcagtccttacaatgtcagtaaaacagccttgctgggcctgaccaagaccctggccatagagctggccccaaggaacattagggtgaactgcctagcacctggacttatcaagactagcttcagcaggatggtgaggaaggggagctttgcatttgactgggaccccttgaaaggcatccatcttcttggacagggaagcccactacctgagtcctgagctctcagccactccattctccttccctggactttcccatattccctctctgtaccacctgccctatacaagccacactcttatcacaccttttctgaggtataggctggagactgaggtattcagactgtactcacactgtttcctccctccttacatggatgagaattggagagacgcagcaaaatgcatcactagaacctgaaacaaatgaaacagatgagggcagtggggagagctgggagctagaaaaaaataggaagtgaaagagggaagtctctctccccatccctcctctcagttaccatgaggatgggcagtttcttccctttccgttcttcactttcctcttcttaaacataaagagatttctgggtggggtggctcatgcctgtaatcccagcacattgggaggccgaggcgggcagatcacgaggtcaggaggtcgagaccatcttggctaacacggtgaaaccccgtctctactggaaatacaaaaaaattagccgggcgcagtggcgggcgcctgtagtcccagctactcgggaggctgaggcaggagaatggcataacccgggaggcggagtttgcagtgagccaagatagcgccactacagtccggcctgggcaaaagagcaagactccgtctctaaaaag

SEQ ID NO: 366557 - DNA, 802 bp, Homo sapiens
agaccgctcacagcggtaccgagggcgggaagggggcaggcagggaagcggcccgcccttcgtcctgccccttcgccctactctgtcacctccgctggaaggagtggaacccatacttgctggtctgatccatgcacaaggcggggctgctaggcctctgtgcccgggcttggaattcggtgcggatggccagctccgggatgacccgccgggacccgctcgcaaataaggtggccctggtaacggcctccaccgacgggatcggcttcgccatcgcccggcgtttggcccaggacggggcccatgtggtcgtcagcagccggaagcagcagaatgtggaccaggcggtggccacgctgcagggggaggggctgagcgtgacgggcaccgtgtgccatgtggggaaggcggaggaccgggagcggctggtggccacggctgtgaagcttcatggaggtatcgatatcctagtctccaatgctgctgtcaaccctttctttggaagcataatggatgtcactgaggaggtgtgggacaagctctggatggacaaggaaaaagaggaaagcatgaaagaaaccctgcggataagaaggtaaactgtcatgagggcaagggcactaagagacatgaagatgggaaggtctggtccctagcagcccacagcccgctgtctcagtcccacagataacacaggcaggctctcttctgcctcacagaccacgaattcataaacactatcactacagtgacctgagcaagaagtcagcttccctttcaaaaggtaaacacagagacatcg

SEQ ID NO: 366558 - DNA, 619 bp, Homo sapiens
tcctctttttccttgtccatccagagcttgtcccacacctgctcagtgacatccattatgcttccaaagaaaccctgcggataaaaaggttaggcgagccagaggattgtgctggcatcgtgtctttcctgtgctctgaagatgccagctacatcactggggaaacagtggtggtgggtggaggaaccccgtcccgcctctgaggaccgggagacagcccacaggccagagttgggctctagctcctggtgctgttcctgcattcacccactggcctttcccacctctgctcaccttactgttcacctcatcaaatcagttctgccctgtgaaaagatccagccttccctgccgtcaaggtggcgtcttactcgggattcctgctgttgttgtggccttgggtaaaggcctcccctgagaacacaggacaggcctgctgacaaggctgagtctaccttggcaaagaccaagatattttttcctgggccactggggaatctgaggggtgatgggagagaaggaacctggagtggaaggagcagagttgcaaattaacaacttgcaaatgaggtgcaaataaaatgcagatgattgcgcggctttgaatccaattgacctg

SEQ ID NO: 366559 - DNA, 1138 bp, Homo sapiens
atataaagataaggtctcgctgcatggcccaggcttctctcaaactcctcagctcaagtgagcctcccaccttggcctcccaaagtgccatgattacaggcatgagccacagctccttgcccagaaggaagtttttatcaacatgggtaaatgcacctcccttacttactgcagccctggtccagaacttacccctctctctaggctgtgaagcttcatggaggtatcgatatcctagtctccaatgctgctgtcaaccctttctttggaagcataatggatgtcactgaggaggtgtgggacaagactctggacattaatgtgaaggccccagccctgatgacaaaggcagtggtgccagaaatggagaaacgaggaggcggctcagtggtgatcgtgtcttccatagcagccttcagtccatctcctggcttcagtccttacaatgtcagtaaaacagccttgctgggcctgaccaagaccctggccatagagctggccccaaggaacattagggtgaactgcctagcacctggacttatcaagactagcttcagcaggatgctctggatggacaaggaaaaagaggaaagcatgaaagaaaccctgcggataagaaggttaggcgagccagaggattgtgctggcatcgtgtctttcctgtgctctgaagatgccagctacatcactggggaaacagtggtggtgggtggaggaaccccgtcccgcctctgaggaccgggagacagcccacaggccagagttgggctctagctcctggtgctgttcctgcattcacccactggcctttcccacctctgctcaccttactgttcacctcatcaaatcagttctgccctgtgaaaagatccagccttccctgccgtcaaggtggcgtcttactcgggattcctgctgttgttgtggccttgggtaaaggcctcccctgagaacacaggacaggcctgctgacaaggctgagtctaccttggcaaagaccaagatattttttcctgggccactggggaatctgaggggtgatgggagagaaggaacctggagtggaaggagcagagttgcaaattaacaacttgcaaatgaggtgcaaataaaatgcagatgattgcgcggctttgaa

SEQ ID NO: 366560 - DNA, 1113 bp, Homo sapiens
agaccgctcacagcggtaccgagggcgggaagggggcaggcagggaagcggcccgcccttcgtcctgccccttcgccctactctgtcacctccgctggaaggagtggaacccatacttgctggtctgatccatgcacaaggcggggctgctaggcctctgtgcccgggcttggaattcggtgcggatggccagctccgggatgacccgccgggacccgctcgcaaataaggtggccctggtaacggcctccaccgacgggatcggcttcgccatcgcccggcgtttggcccaggacggggcccatgtggtcgtcagcagccggaagcagcagaatgtggaccaggcggtggccacgctgcagggggaggggctgagcgtgacgggcaccgtgtgccatgtggggaaggcggaggaccgggagcggctggtggccacggctgtgaagcttcatggaggtatcgatatcctagtctccaatgctgctgtcaaccctttctttggaagcataatggatgtcactgaggaggtgtgggacaagctctggatggacaaggaaaaagaggaaagcatgaaagaaaccctgcggataagaaggttaggcgagccagaggattgtgctggcatcgtgtctttcctgtgctctgaagatgccagctacatcactggggaaacagtggtggtgggtggaggaaccccgtcccgcctctgaggaccgggagacagcccacaggccagagttgggctctagctcctggtgctgttcctgcattcacccactggcctttcccacctctgctcaccttactgttcacctcatcaaatcagttctgccctgtgaaaagatccagccttccctgccgtcaaggtggcgtcttactcgggattcctgctgttgttgtggccttgggtaaaggcctcccctgagaacacaggacaggcctgctgacaaggctgagtctaccttggcaaagaccaagatattttttcctgggccactggggaatctgaggggtgatgggagagaaggaacctggagtggaaggagcagagttgcaaattaacaacttgcaaatgaggtgcaaataaaatgcagatgattgcgcggctttgaa

SEQ ID NO: 366561 - DNA, 1105 bp, Homo sapiens
agaccgctcacagcggtaccgagggcgggaagggggcaggcagggaagcggcccgcccttcgtcctgccccttcgccctactctgtcacctccgctggaaggagtggaacccatacttgctggtctgatccatgcacaaggcggggctgctaggcctctgtgcccgggcttggaattcggtgcggatggccagctccgggatgacccgccgggacccgctcgcaaataaggtggccctggtaacggcctccaccgacgggatcggcttcgccatcgcccggcgtttggcccaggacggggcccatgtggtcgtcagcagccggaagcagcagaatgtggaccaggcggtggccacgctgcagggggaggggctgagcgtgacgggcaccgtgtgccatgtggggaaggcggaggaccgggagcggctggtggccacggctgtgaagcttcatggaggtatcgatatcctagtctccaatgctgctgtcaaccctttctttggaagcataatggatgtcactgaggaggtgtgggacaagactctggacattaatgtgaaggccccagccctgatgacaaaggcagtggtgccagaaatggagaaacgaggaggcggctcagtggtgatcgtgtcttccatagcagccttcagtccatctcctggcttcagtccttacaatgtcagtaaaacagccttgctgggcctgaccaagaccctggccatagagctggccccaaggaacattagggtgaactgcctagcacctggacttatcaagactagcttcagcaggatgctctggatggacaaggaaaaagaggaaagcatgaaaagatccagccttccctgccgtcaaggtggcgtcttactcgggattcctgctgttgttgtggccttgggtaaaggcctcccctgagaacacaggacaggcctgctgacaaggctgagtctaccttggcaaagaccaagatattttttcctgggccactggggaatctgaggggtgatgggagagaaggaacctggagtggaaggagcagagttgcaaattaacaacttgcaaatgaggtgcaaataaaatgcagatgattgcgcggctttgaa

SEQ ID NO: 366562 - DNA, 989 bp, Homo sapiens
agaccgctcacagcggtaccgagggcgggaagggggcaggcagggaagcggcccgcccttcgtcctgccccttcgccctactctgtcacctccgctggaaggagtggaacccatacttgctggtctgatccatgcacaaggcggggctgctaggcctctgtgcccgggcttggaattcggtgcggatggccagctccgggatgacccgccgggacccgctcgcaaataaggtggccctggtaacggcctccaccgacgggatcggcttcgccatcgcccggcgtttggcccaggacggggcccatgtggtcgtcagcagccggaagcagcagaatgtggaccaggcggtggccacgctgcagggggaggggctgagcgtgacgggcaccgtgtgccatgtggggaaggcggaggaccgggagcggctggtggccacggctgtgaagcttcatggaggtatcgatatcctagtctccaatgctgctgtcaaccctttctttggaagcataatggatgtcactgaggaggtgtgggacaagactctggacattaatgtgaaggccccagccctgatgacaaaggcagtggtgccagaaatggagaaacgaggaggcggctcagtggtgatcgtgtcttccatagcagccttcagtccatctcctggcttcagtccttacaatgtcagtaaaacagccttgctgggcctgaccaagaccctggccatagagctggccccaaggaacattagggtgaactgcctagcacctggacttatcaagactagcttcagcaggatgctctggatggacaaggaaaaagaggaaagcatgaaagaaaccctgcggataagaagcccgctgtctcagtcccacagataacacaggcaggctctcttctgcctcacagaccacgaattcataaacactatcactacagtgacctgagcaagaagtcagcttccctttcaaaaggtaaacacagagacatcg

SEQ ID NO: 366563 - DNA, 982 bp, Homo sapiens
agaccgctcacagcggtaccgagggcgggaagggggcaggcagggaagcggcccgcccttcgtcctgccccttcgccctactctgtcacctccgctggaaggagtggaacccatacttgctggtctgatccatgcacaaggcggggctgctaggcctctgtgcccgggcttggaattcggtgcggatggccagctccgggatgacccgccgggacccgctcgcaaataaggtggccctggtaacggcctccaccgacgggatcggcttcgccatcgcccggcgtttggcccaggacggggcccatgtggtcgtcagcagccggaagcagcagaatgtggaccaggcggtggccacgctgcagggggaggggctgagcgtgacgggcaccgtgtgccatgtggggaaggcggaggaccgggagcggctggtggccacggctgtgaagcttcatggaggtatcgatatcctagtctccaatgctgctgtcaaccctttctttggaagcataatggatatcactggggaaacagtggtggtgggtggaggaaccccgtcccgcctctgaggaccgggagacagcccacaggccagagttgggctctagctcctggtgctgttcctgcattcacccactggcctttcccacctctgctcaccttactgttcacctcatcaaatcagttctgccctgtgaaaagatccagccttccctgccgtcaaggtggcgtcttactcgggattcctgctgttgttgtggccttgggtaaaggcctcccctgagaacacaggacaggcctgctgacaaggctgagtctaccttggcaaagaccaagatattttttcctgggccactggggaatctgaggggtgatgggagagaaggaacctggagtggaaggagcagagttgcaaattaacaacttgcaaatgaggtgcaaataaaatgcagatgattgcgcggctttgaatccaattgacctg

SEQ ID NO: 366564 - DNA, 869 bp, Homo sapiens
agaccgctcacagcggtaccgagggcgggaagggggcaggcagggaagcggcccgcccttcgtcctgccccttcgccctactctgtcacctccgctggaaggagtggaacccatacttgctggtctgatccatgcacaaggcggggctgctaggcctctgtgcccgggcttggaattcggtgcggatggccagctccgggatgacccgccgggacccgctcgcaaataaggtggccctggtaacggcctccaccgacgggatcggcttcgccatcgcccggcgtttggcccaggacggggcccatgtggtcgtcagcagccggaagcagcagaatgtggaccaggcggtggccacgctgcagggggaggggctgagcgtgacgggcaccgtgtgccatgtggggaaggcggaggaccgggagcggctggtggccacggctgtgaagcttcatggaggtatcgatatcctagtctccaatgctgctgtcaaccctttctttggaagcataatggatgtcactgaggaggtgtgggacaaggttatttatttatttttgtgatggagcctcactctgttacccaggctggagtgcagtggtgctatctcagctcactgcaacctccacctcccgggttcaagctattctgctgtctcatcctcctgagtagcttggattacaaacacatgccaccacgtctggctaatttttgtatttttagtacagacgaggtttgccatgttgcccaggctgttctcgaactcctgacctaaaagtgatccacccatcttggcctcccgaagtgcagggattgcaggcatgagccaccatgcccagccctgagtttgttttttttttttaatttacatt

SEQ ID NO: 366565 - DNA, 410 bp, Homo sapiens
attttgttgtcattgttgttgttgtttttaatataaagataaggtctcgctgcatggcccaggcttctctcaaactcctcagctcaagtgagcctcccaccttggcctcccaaagtgccatgattacaggcatgagccacagctccttgcccagaaggaagtttttatcaacatgggtaaatgcacctcccttacttactgcagccctggtccagaacttacccctctctctaggctgtgaagcttcatggaggtatcgatatcctagtctccaatgctgctgtcaaccctttctttggaagcataatggatgtcactgaggaggtgtgggacaaggtgagaggggattaaagcaggggggccggggggggcgccttggaacacattcagcacaaactccatctgctttt

SEQ ID NO: 366566 - DNA, 1126 bp, Homo sapiens
agaccgctcacagcggtaccgagggcgggaagggggcaggcagggaagcggcccgcccttcgtcctgccccttcgccctactctgtcacctccgctggaaggagtggaacccatacttgctggtctgatccatgcacaaggcggggctgctaggcctctgtgcccgggcttggaattcggtgcggatggccagctccgggatgacccgccgggacccgctcgcaaataaggtggccctggtaacggcctccaccgacgggatcggcttcgccatcgcccggcgtttggcccaggacggggcccatgtggtcgtcagcagccggaagcagcagaatgtggaccaggcggtggccacgctgcagggggaggggctgagcgtgacgggcaccgtgtgccatgtggggaaggcggaggaccgggagcggctggtggccacggctgtgaagcttcatggaggtatcgatatcctagtctccaatgctgctgtcaaccctttctttggaagcataatggatgtcactgaggaggtgtgggacaagctctggatggacaaggaaaaagaggaaagcatgaaagaaaccctgcggataagaaggttaggcgagccagaggattgtgctggcatcgtgtctttcctgtgctctgaagatgccagctacatcactggggaaacagtggtggtgggtggaggaaccccgtcccgcctctgaggaccgggagacagcccacaggccagagttgggctctagctcctggtgctgttcctgcattcacccactggcctttcccacctctgctcaccttactgttcacctcatcaaatcagttctgccctgtgaaaagatccagccttccctgccgtcaaggtggcgtcttactcgggattcctgctgttgttgtggccttgggtaaaggcctcccctgagaacacaggacaggcctgctgacaaggctgagtctaccttggcaaagaccaagatattttttcctgggccactggggaatctgaggggtgatgggagagaaggaacctggagtggaaggagcagagttgcaaattaacaacttgcaaatgaggtgcaaataaaatgcagatgattgcgcggctttgaatccaattgacctg

SEQ ID NO: 366567 - DNA, 1685 bp, Homo sapiens
gcattcaacaaatatttattgaactaagatggcggctaagacctggggacagagtggttagggagaacttgagtgccccgagttctttgcatttccaccactgcttgagggactgtccagcctcctcgctaccacttagcccctgtaaaggaggaagtccctttgtcaacggacatgagaatgctgtttggccaatgaccatagtctgccctccagggcccgtgaagatggaagagaccttgggcagagtgaagggcagtgccaggcctggcgcagctactccctatcacgtctctctcccaggctcttccagcctcacctggtggactccatggcgaccacaggcctcacctccatgggcagtctcaaaacatttgccctcctgtgggctgtcacacacatagacccagactttcttggagaaggaattttgctggtctgatccatgcacaaggcggggctgctaggcctctgtgcccgggcttggaattcggtgcggatggccagctccgggatgacccgccgggacccgctcgcaaataaggtggccctggtaacggcctccaccgacgggatcggcttcgccatcgcccggcgtttggcccaggacggggcccatgtggtcgtcagcagccggaagcagcagaatgtggaccaggcggtggccacgctgcagggggaggggctgagcgtgacgggcaccgtgtgccatgtggggaaggcggaggaccgggagcggctggtggccacggctgtgaagcttcatggaggtatcgatatcctagtctccaatgctgctgtcaaccctttctttggaagcataatggatgtcactgaggaggtgtgggacaagactctggacattaatgtgaaggccccagccctgatgacaaaggcagtggtgccagaaatggagaaacgaggaggcggctcagtggtgatcgtgtcttccatagcagccttcagtccatctcctggcttcagtccttacaatgtcagtaaaacagccttgctgggcctgaccaagaccctggccatagagctggccccaaggaacattagggtgaactgcctagcacctggacttatcaagactagcttcagcaggatgctctggatggacaaggaaaaagaggaaagcatgaaagaaaccctgcggataagaaggttaggcgagccagaggattgtgctggcatcgtgtctttcctgtgctctgaagatgccagctacatcactggggaaacagtggtggtgggtggaggaaccccgtcccgcctctgaggaccgggagacagcccacaggccagagttgggctctagctcctggtgctgttcctgcattcacccactggcctttcccacctctgctcaccttactgttcacctcatcaaatcagttctgccctgtgaaaagatccagccttccctgccgtcaaggtggcgtcttactcgggattcctgctgttgttgtggccttgggtaaaggcctcccctgagaacacaggacaggcctgctgacaaggctgagtctaccttggcaaagaccaagatattttttcctgggccactggggaatctgaggggtgatgggagagaaggaacctggagtggaaggagcagagttgcaaattaacaacttgcaaatgaggtgcaaataaaatgcagatgattgcgcggctttgaa

SEQ ID NO: 366568 - DNA, 1560 bp, Homo sapiens
  misc_feature (1394)..(1397): n is a, c, g, or t
  misc_feature (1400)..(1400): n is a, c, g, or t
  misc_feature (1403)..(1403): n is a, c, g, or t
  misc_feature (1409)..(1410): n is a, c, g, or t
  misc_feature (1419)..(1419): n is a, c, g, or t
  misc_feature (1422)..(1422): n is a, c, g, or t
  misc_feature (1431)..(1431): n is a, c, g, or t
  misc_feature (1440)..(1440): n is a, c, g, or t
  misc_feature (1457)..(1457): n is a, c, g, or t
  misc_feature (1459)..(1459): n is a, c, g, or t
  misc_feature (1466)..(1466): n is a, c, g, or t
  misc_feature (1481)..(1481): n is a, c, g, or t
  misc_feature (1488)..(1488): n is a, c, g, or t
  misc_feature (1491)..(1491): n is a, c, g, or t
  misc_feature (1494)..(1494): n is a, c, g, or t
  misc_feature (1502)..(1502): n is a, c, g, or t
  misc_feature (1505)..(1505): n is a, c, g, or t
  misc_feature (1508)..(1508): n is a, c, g, or t
  misc_feature (1510)..(1510): n is a, c, g, or t
agaccgctcacagcggtaccgagggcgggaagggggcaggcagggaagcggcccgcccttcgtcctgccccttcgccctactctgtcacctccgctggaaggagtggaacccatacttgctggtctgatccatgcacaaggcggggctgctaggcctctgtgcccgggcttggaattcggtgcggatggccagctccgggatgacccgccgggacccgctcgcaaataaggtggccctggtaacggcctccaccgacgggatcggcttcgccatcgcccggcgtttggcccaggacggggcccatgtggtcgtcagcagccggaagcagcagaatgtggaccaggcggtggccacgctgcagggggaggggctgagcgtgacgggcaccgtgtgccatgtggggaaggcggaggaccgggagcggctggtggccacggctgtgaagcttcatggaggtatcgatatcctagtctccaatgctgctgtcaaccctttctttggaagcataatggatgtcactgaggaggtgtgggacaagactctggacattaatgtgaaggccccagccctgatgacaaaggcagtggtgccagaaatggagaaacgaggaggcggctcagtggtgatcgtgtcttccatagcagccttcagtccatctcctggcttcagtccttacaatgtcagtaaaacagccttgctgggcctgaccaagaccctggccatagagctggccccaaggaacattagggtgaactgcctagcacctggacttatcaagactagcttcagcaggatgctctggatggacaaggaaaaagaggaaagcatgaaagaaaccctgcggataagaaggttaggcgagccagaggattgtgctggcatcgtgtctttcctgtgctctgaagatgccagctacatcactggggaaacagtggtggtgggtggaggaaccccgtcccgcctctgaggaccgggagacagcccacaggccagagttgggctctagctcctggtgctgttcctgcattcacccactggcctttcccacctctgctcaccttactgttcacctcatcaaatcagttctgccctgtgaaaagatccagccttccctgccgtcaaggtggcgtcttactcgggattcctgctgttgttgtggccttgggtaaaggcctcccctgagaacacaggacaggcctgctgacaaggctgagtctaccttggcaaagaccaagatattttttcctgggccactggggaatctgaggggtgatgggagagaaggaacctggagtggaaggagcagagttgcaaattaacaacttgcaaatgaggtgcaaataaaatgcagatgattgcgcggctttgaaaaaaaaaaaaaaaaaaaaaaaannnnttnggntttttnngaaaaaagnttntggcccaantttttcaanaggttgggggggggggntnacttganccaaggatttgaggnttgcggnaanttnttattaanaanttncnttcaagcttaggggggggggggaccttttttaaaataaaaacgggggacc

SEQ ID NO: 366569 - DNA, 1006 bp, Homo sapiens
agaccgctcacagcggtaccgagggcgggaagggggcaggcagggaagcggcccgcccttcgtcctgccccttcgccctactctgtcacctccgctggaaggagtggaacccatacttgctggtctgatccatgcacaaggcggggctgctaggcctctgtgcccgggcttggaattcggtgcggatggccagctccgggatgacccgccgggacccgctcgcaaataaggtggccctggtaacggcctccaccgacgggatcggcttcgccatcgcccggcgtttggcccaggacggggcccatgtggtcgtcagcagccggaagcagcagaatgtggaccaggcggtggccacgctgcagggggaggggctgagcgtgacgggcaccgtgtgccatgtggggaaggcggaggaccgggagcggctggtggccacggctgtgaagcttcatggaggtatcgatatcctagtctccaatgctgctgtcaaccctttctttggaagcataatggatgtcactgaggaggtgtgggacaagactctggacattaatgtgaaggccccagccctgatgacaaaggcagtggtgccagaaatggagaaacgaggaggcggctcagtggtgatcgtgtcttccatagcagccttcagtccatctcctggcttcagtccttacaatgtcagtaaaacagccttgctgggcctgaccaagaccctggccatagagctggccccaaggaacattagggtgaactgcctagcacctggacttatcaagactagcttcagcaggatgctctggatggacaaggaaaaagaggaaagcatgaaagaaaccctgcggataagaaggttaggcgagccagaggattgtgctggcatcgtgtctttcctgtgctctgaagatgccagctacatcactggggaaacagtggtggtgggtggaggaacccctgctcctgcgctggggtcccactggagtacgcgagactcgcaattacgtaa

SEQ ID NO: 366570 - DNA, 1024 bp, Homo sapiens
agaccgctcacagcggtaccgagggcgggaagggggcaggcagggaagcggcccgcccttcgtcctgccccttcgccctactctgtcacctccgctggaaggagtggaacccatacttgctggtctgatccatgcacaaggcggggctgctaggcctctgtgcccgggcttggaattcggtgcggatggccagctccgggatgacccgccgggacccgctcgcaaataaggtggccctggtaacggcctccaccgacgggatcggcttcgccatcgcccggcgtttggcccaggacggggcccatgtggtcgtcagcagccggaagcagcagaatgtggaccaggcggtggccacgctgcagggggaggggctgagcgtgacgggcaccgtgtgccatgtggggaaggcggaggaccgggagcggctggtggccacgctctggatggacaaggaaaaagaggaaagcatgaaagaaaccctgcggataagaaggttaggcgagccagaggattgtgctggcatcgtgtctttcctgtgctctgaagatgccagctacatcactggggaaacagtggtggtgggtggaggaaccccgtcccgcctctgaggaccgggagacagcccacaggccagagttgggctctagctcctggtgctgttcctgcattcacccactggcctttcccacctctgctcaccttactgttcacctcatcaaatcagttctgccctgtgaaaagatccagccttccctgccgtcaaggtggcgtcttactcgggattcctgctgttgttgtggccttgggtaaaggcctcccctgagaacacaggacaggcctgctgacaaggctgagtctaccttggcaaagaccaagatattttttcctgggccactggggaatctgaggggtgatgggagagaaggaacctggagtggaaggagcagagttgcaaattaacaacttgcaaatgaggtgcaaataaaatgcagatgattgcgcggctttgaatccaattgacctg

SEQ ID NO: 366571 - DNA, 770 bp, Homo sapiens
agaccgctcacagcggtaccgagggcgggaagggggcaggcagggaagcggcccgcccttcgtcctgccccttcgccctactctgtcacctccgctggaaggagtggaacccatacttgctggtctgatccatgcacaaggcggggctgctaggcctctgtgcccgggcttggaattcggtgcggatggccagctccgggatgacccgccgggacccgctcgcaaataaggtggccctggtaacggcctccaccgacgggatcggcttcgccatcgcccggcgtttggcccaggacggggcccatgtggtcgtcagcagccggaagcagcagaatgtggaccaggcggtggccacgctgcagggggaggggctgagcgtgacgggcaccgtgtgccatgtggggaaggcggaggaccgggagcggctggtggccacggtgagctgcagggaaatgggcacagagccaggaggtggaaaacggagccagcctgagcctccttccctgctttcctagacagcagcacatttttactgtgtgcctttctattatgtccatatactaacgtcagagaatcatcccatctcagtcagagaattttaaaacattctaatgcttcaaccctgcatcatcccttgagtaccccaaagaaacagctggtactggttctgcagtaattttcaatctaattgaacagatgtgaagggtaaatacaatcacaaaatacatgttcccacccatgagttaataaacattcccctcttcttcagc

SEQ ID NO: 366572 - DNA, 756 bp, Homo sapiens
agtgttaagtgtgcagtctggcagccctctagagctctggccaattttgaaagcgtaatcaacaatgctaaatggaaaagaccatttatggcatggccaggcgtggtgactcatgcctgtaattgcagcactttgggaggccaaggcaggtggatcacctgaggtcaggaattcgagaccagcctgaccaacatggtgaaaccccgtctctactaaaaatacaaaattagccgggcatggtgtgcacctgtaatcccagttactcaggaggctgagacaggagaatcgcctgaacccgggaggcggaaggtgcggtgagctgagatcacgccattgcactccagcctgggcaacaagagcgaaactccgtctcaaaaaaaaaaaatggaaaagaccatttatggcctaaccttggtttttctgtctgtctcaacaagaagtcatatgactttaaaaaacagagcagtaaagtgttaaaaaaaaaaaaaaattagacttcaaggacctgtcaccatttggaagagattgactgactttttgctgtgtttggttaaatccattctgattctgattgtgcctgaggaattctaaatttatgaggtaaggtgtctttttcattgcttggagcaggaatttgtgggtcctcagtcctgtttcagttgagtgctgttcaaaactctggtcttctgccttgtatgggtataacaaaaatgtccccatatagcagaaaataatggtattctctttttacttaaa

SEQ ID NO: 366573 - DNA, 1188 bp, Homo sapiens
atgggtgcgtctgctgtggtctcgcgtattgtgattcggttgtggtggttgcgtgttgtgtgtagtgtgacgtgtgagtgacttcttgtttgcggtacgcctgtcgttcaggtgtcttcagtataaaattggtgtcgagcttcgcttctctactctggtggtcttgttgcgcgttctcttcagcctctttaaggtgtccccccgggcgtatgctgttcgtttctgtgcggtctgccttataggcgagagtaggggacagtgacccgggttgctgtctatggttggccccttccgccgggtggccctttccccctggcagcggcctccttgcctcccttccaccagtgctgccatcccgtgcctgtcgtgttggttcttcacacgtgctctgttctcggggttgttccattcatgccttcttggagggtgagggtggcttgggaaccgacccagtgatcatgcctactttcttctttgtatctccctccttcccagcccacccgggcagcagactctgatggaaggaaggtgccgtaggtgggcttttagaaactaacgggactggttttcaaagcagttatcttgggaaactgtttattccagcgatgtgacttttttcagaatatttcttggaatcatattcagagtctggggctgtgtgttgagcagccttaaggatgctagacactcatttagtgcccagggagtccagcgaatgacgtctgtggccaagcgaggtctcaggtgcaaagcaaaaggaccatttaaagtaaaatagcttggattcaatcatgtgacttttaaattggctcagaaagcaattttgtaatttcagagagtgttttgagccatggccacgttgtcattgtgagtctatagcttgactccttggagaacaatattcatttggttgtggagactgatttgctgggagaaatctgtcctgttactttctggtcatcccaggttctgacttttaccaggggcaaaaaaaaaaaaaaaaagcaagagggagataaatcccatctgtgagtttgtcttattggcgcctttttcctcagctgtcttccaagtattatttttactgttaaaaaattttttaaaaatgtgaaatgtaatgtttttacagcaacaatatgaaatatattttataaggaataaaatggtaccttgtctgatttaaaaagt

SEQ ID NO: 366574 - DNA, 1415 bp, Homo sapiens
agaattaattaccctccgtttcccacatccccactctctaggggattagcttgtgcgtgtcaaaagaaggaacagctcgttctgcttcctgctgagtcggtgaattctttgctttctaaactcttccagaaaggactgtgagcaagatgaatttacttttcttaaaaaaaaaaaaaaaaaaaaaaaaaagagtttctggctgatgggtgactcagagtgcaggactgcctggccgtggggcagaggggtttgcccttctcggagggtacctcctgttccctgtctgagcatcctgcatggaagtcaaaggaaatccctttcttggtgacgacttaaatctgggttccctcagacattgggttgcaccccaacaaatattaaatggcttcttcttaaagcccagagaaagaggttttttaaaagactgtcgccaaatagctgagccaaaaggctgatcagaattcactttttggaatgtggcagttaaacactaccttgatcattctctcctctttcctcgaggaactcctggagggtttgagcgtctggaaactctctgctctgacccgaggaagcaccctcctgacgccgccttcctccggttattgaaaggacgcctcagaaatgctttgttttcttttacgatgtattcagaagcctttactgattaaagttttcttttatttgggtggccgggagagacccagggaggttctggaggttcctttctgtctcctggccccaccagggatttccccatttctgtttgctgcctgaaagcaggatgaggaaggccaaggagagtccttgcacccgtgagcgtcaggatgaggaaatgacaggaggaagacgtgggtttgggttagtggctgctggcgttttggcccttggtgtttctggagcctccagggatctaggggagcctgggctgcgtgcatgtcgataagcagagctgttcttggggagaaggagggaggtctcgggagtgtagcaccatgccaaccagccctgcgcgaagacagagtgagccacgcccggatggcagggcatgtttctgttttggtgtctcactttcctcccagcgtgacttatttggggattcctcagggcctactggaatgtgactgcccactgcccagctgcctcgggaggaggaggaggaggaagaggagggctggtagggggaggtgtcatgagtgcgagagggtagacggacatgttccctactgaggtcactgctgccaactgtcctgctctgctgatctgtacagttccccccaccttctggacctaccctctcatggcccagagctcacttatctgagcctaaacctccccggtctcaagcaatagagagcagaaatgccagatgcagaggttctctggttaggatctttcaggatcctgctagatca

SEQ ID NO: 366575 - DNA, 141 bp, Homo sapiens
ttttttttttataacttagtaaaaaaaaaaaaatgtatgtggaattctgtctcttgaattctgtctcttggtaaagctcaaagccaggctagcctgaggtggcgcagggctctccttcctgtcccttcgatctccttgaga

SEQ ID NO: 366576 - DNA, 2873 bp, Homo sapiens
agaattaattaccctccgtttcccacatccccactctctaggggattagcttgtgcgtgtcaaaagaaggaacagctcgttctgcttcctgctgagtcggtgaattctttgctttctaaactcttccagaaaggactgtgagcaagatgaatttacttttcttaaaaaaaaaaaaaaaaaaaaaaaaaagagtttctggctgatgggtgactcagagtgcaggactgcctggccgtggggcagaggggtttgcccttctcggagggtacctcctgttccctgtctgagcatcctgcatggaagtcaaaggaaatccctttcttggtgacgacttaaatctgggttccctcagacattgggttgcaccccaacaaatattaaatggcttcttcttaaagcccagagaaagaggttttttaaaagactgtcgccaaatagctgagccaaaaggctgatcagaattcactttttggaatgtggcagttaaacactaccttgatcattctctcctctttcctcgaggaactcctggagggtttgagcgtctggaaactctctgctctgacccgaggaagcaccctcctgacgccgccttcctccggttattgaaaggacgcctcagaaatgctttgttttcttttacgatgtattcagaagcctttactgattaaagttttcttttatttgggtggccgggagagacccagggaggttctggaggttcctttctgtctcctggccccaccagggatttccccatttctgtttgctgcctgaaagcaggatgaggaaggccaaggagagtccttgcacccgtgagcgtcaggatgaggaaatgacaggaggaagacgtgggtttgggttagtggctgctggcgttttggcccttggtgtttctggagcctccagggatctaggggagcctgggctgcgtgcatgtcgataagcagagctgttcttggggagaaggagggaggtctcgggagtgtagcaccatgccaaccagccctgcgcgaagacagagtgagccacgcccggatggcagggcatgtttctgttttggtgtctcactttcctcccagcgtgacttatttggggattcctcagggcctactggaatgtgactgcccactgcccagctgcctcgggtacaagtcctggccctatgtcccagctgtcaggggctcagggaatcctacccagccacctgtcctgggatggagtgtcagcatccaccccttggttgtcatcgaggccgccctcccagtcctgggtgaagatatttgggccaccagggctcccttggccccttcacgtaggaaatagacacgtgctttttaatgcaggacactttgagtgttacaaaatctgtagacctggcagtagggtcatgatgttgggaagggtgtagtgccctaggttggtgacagaagggacagacacttgtgcacaggtgtctttggtgatggggtttttttttttataacttagtaaaaaaaaaaaaatgtatgtggaattctgtctcttggtaaagctcaaagccaggctagcctgaggtggcgcagggctctccttcctgtcccttcgatctccttgagaattaagagctggcagctgctgatggtgtttcccaacccccctcacttcccaagacaacccccagcttcaggtcctcatggggaggggagggcacgttcttgacacatgggaacttcgctcaggagggcctccccttcccctctccctcagagttttcactgccgtctcgtctttagaaagctgtttgaattccccccgcccccagtttggaccgtgtagatataactggatatacggatttttctctttgtgcaggcttcttatgccgttggtatacagggcaggaaagagaggaataaagggagagagcagtgtggaaaccacggtggttttgctttgttcttactaggttttggtgccaccttccctgcctgcgcttgtgccccctctcctccttggcactggcggcctccttgcctcccttccaccagtgctgccatcccgtgcctgtcgtgttggttcttcacacgtgctctgttctcggggttgttccattcatgccttcttggagggtgagggtggcttgggaaccgacccagtgatcatgcctactttcttctttgtatctccctccttcccagcccacccgggcagcagactctgatggaaggaaggtgccgtaggtgggcttttagaaactaacgggactggttttcaaagcagttatcttgggaaactgtttattccagcgatgtgacttttttcagaatatttcttggaatcatattcagagtctggggctgtgtgttgagcagccttaaggatgctagacactcatttagtgcccagggagtccagcgaatgacgtctgtggccaagcgaggtctcaggtgcaaagcaaaaggaccatttaaagtaaaatagcttggattcaatcatgtgacttttaaattggctcagaaagcaattttgtaatttcagagagtgttttgagccatggccacgttgtcattgtgagtctatagcttgactccttggagaacaatattcatttggttgtggagactgatttgctgggagaaatctgtcctgttactttctggtcatcccaggttctgacttttaccaggggcaaaaaaaaaaaaaaaaagcaagagggagataaatcccatctgtgagtttgtcttattggcgcctttttcctcagctgtcttccaagtattatttttactgttaaaaaattttttaaaaatgtgaaatgtaatgtttttacagcaacaatatgaaatatattttataaggaataaaatggtaccttgtctgatttaaaaagt

SEQ ID NO: 366577 - DNA, 1495 bp, Homo sapiens
  misc_feature (1478)..(1478): n is a, c, g, or t
agaattaattaccctccgtttcccacatccccactctctaggggattagcttgtgcgtgtcaaaagaaggaacagctcgttctgcttcctgctgagtcggtgaattctttgctttctaaactcttccagaaaggactgtgagcaagatgaatttacttttcttaaaaaaaaaaaaaaaaaaaaaaaaaagagtttctggctgatgggtgactcagagtgcaggactgcctggccgtggggcagaggggtttgcccttctcggagggtacctcctgttccctgtctgagcatcctgcatggaagtcaaaggaaatccctttcttggtgacgacttaaatctgggttccctcagacattgggttgcaccccaacaaatattaaatggcttcttcttaaagcccagagaaagaggttttttaaaagactgtcgccaaatagctgagccaaaaggctgatcagaattcactttttggaatgtggcagttaaacactaccttgatcattctctcctctttcctcgaggaactcctggagggtttgagcgtctggaaactctctgctctgacccgaggaagcaccctcctgacgccgccttcctccggttattgaaaggacgcctcagaaatgctttgttttcttttacgatgtattcagaagcctttactgattaaagttttcttttatttgggtggccgggagagacccagggaggttctggaggttcctttctgtctcctggccccaccagggatttccccatttctgtttgctgcctgaaagcaggatgaggaaggccaaggagagtccttgcacccgtgagcgtcaggatgaggaaatgacaggaggaagacgtgggtttgggttagtggctgctggcgttttggcccttggtgtttctggagcctccagggatctaggggagcctgggctgcgtgcatgtcgataagcagagctgttcttggggagaaggagggaggtctcgggagtgtagcaccatgccaaccagccctgcgcgaagacagagtgagccacgcccggatggcagggcatgtttctgttttggtgtctcactttcctcccagcgtgacttatttggggattcctcagggcctactggaatgtgactgcccactgcccagctgcctcgggtacaagtcctggccctatgtcccagctgtcaggggctcagggaatcctacccagccacctgtcctgggatggagtgtcagcatccaccccttggttgtcatcgaggccgccctcccagtcctgggtgaagatatttgggccaccagggctcccttggccccttcacgtaggaaatagacacgtgctttttaatgcaggacactttgagtgttacaaaatctgtagacctggcagtagggtcatgatgttgggaagggtgtagtgccctaggttggtgacagaagggacagacacttgtgcacaggtgtctttggtgatggtaccgtctnaggggtcgtctagtacc

SEQ ID NO: 366578 - DNA, 3577 bp, Homo sapiens
ccccgtgtgtgcagccgtgttgccgcccgctgtgctatgagcagtcagagcgccgtctccacaagagtttacaaatgaaaatggaggaaatgtctttgtctggcctggataacagcaaactagaggccatcgctcaggagatatacgcggacctggtcgaggattcttgtttgggattctgctttgaggtacaccgggctgtcaagtgtggctacttcttcttggacgacacggaccctgatagcatgaaggattttgagatcgtggaccagccgggcttggacatctttggacaggttttcaaccagtggaagagcaaggagtgtgtttgccccaattgcagtcgcagcattgccgcctcccgctttgctccccatctggagaagtgcctgggaatgggtcggaacagcagccgaatcgccaaccgccggattgccaatagcaacaatatgaataagtctgagagtgaccaagaagataatgatgacatcaatgacaacgactggtcctatggctcggagaagaaagccaagaagagaaagtcagacaagaaccccaattcccctcgaagatccaagtcattaaaacacaaaaatggggaacttagcaattcggatccttttaagtataacaattcaactgggatcagctatgagaccctggggccggaggagcttcgcagcctgctaaccacgcaatgtggggtgatttctgaacacaccaagaagatgtgcacaaggtccctgcgctgcccacagcacacagatgagcagaggcgaaccgtacggatttattttctcgggccctcggctgtccttccagaggtcgagagctccctggataatgacagctttgacatgactgacagccaggccctgatcagccggcttcagtgggacggctcctctgacctctcaccctctgattcaggctcctccaagacgagtgaaaatcagggatggggtctaggtaccaacagctctgagtcacggaaaaccaagaaaaagaaatcccatctgagcctggtagggactgcctccggcctaggttccaacaagaagaagaagccaaagccaccggcacccccgacgcccagcatctatgatgacatcaactgacttgggtgcaagggatagcctttggctgagcagagccctctctcctgacccccacccaggtggcatagcctggcaaatggacggctgctgggggttggggcttgggaagcttggtgggccaggcaggcagaggatccgattatgcgcccctggggggtgtcaaagtcctctgcaatggagcacgactcctcggcgtgcaggactcagacctggacatattatgccttggacataagtttggtggggaggcggttttcctatttattctgtgagttactggatgtccagctaggccaggggcctgacctgggcactgtgccagggcactgcctgccccccaccccaggaactggactaagccctgctgaggggcaatgtggcgacccgggaggctgtgggttggaagctgagcctggagggggcctgcctcggccgccctcagcaatgtgaatgggtccggtgcttggagctgaggggcaaggctgggcatgtcctgtctgtgtgcagaatcttatcaaatgcccccagtcccaggggtaggcaggcacagagtgctgtctgctgaggtgggcgtccagaactgccgccaccttccctgcccctcacaggggcagccctttcccctcagtccccatgggcctccttggcagcaggagctgtccttttgttgggtgccaggaaagggcctccagcctctacagcttcaaggaatgggaaagggagggtaggaagagggagaagtgtcagaattcctccccctgcctctcctccctgacccagggctggtgaggagtggggccccaaggtgagagggaacggtgctgctttatttgaaatgttttcttacctcattccctgccccaggaagggacccagcctcaccctcctggggtggccccgtgttcctcctgcccaccctgccccactgccctaccggggcagcccaggttcccaactgctgcttccacccccttcaccttgactggcttcagttcctctcagcgctcctgcctccaaagcgtgccctgtttcccttccttagcgcttttaagttatttattctgtacttgtggtttggggctctgaggaaaatcctaatcttgtgcctctccccctttgctaggagttgggtgggaagagagggtggcctctgtgccccaggttgtcagtggaggggaaggggtgtcactgcccctctgtgggactgtcatgccagtgtgcccacctgcctggtctacatcctaaagagatgtaccgtcccccctccatgcgggcaccaccactcccaggagccaagctggaggaccgcgacctgggctgggagcagagctgactgacatgggtggaggtgaccctgagccaagttctctggcacttgctggacatgtcccctaccctcttcccaagaggagccatcccacatttgggtagttagtacccaggactggttggactgatcgggttagggaccctagagggttaagggaacaacagagatggggctgcaatgccctgtctggaactccgctctcccgctggggtggttctgattgtggctcatgcctggttgcaaattggtttttaacccacaaattgtgattattttttaaaaagccaaacagattttggcaggagttagaataaatcccggggcctgggcttctctattcttggccctccgtagtctccctccgagaggaggccagagggagaggaggatctcagcaggcctctagccgcttccagatgcagtctggggagtgggctgaaggtgaagggaggaaggctgtgggccactctcccttctgagaggcagctgcagctcaggccctaatacactctttgccctgtggcctctcccttttccccccttctggttggaggagggagaagtgggaagtagcttgggaactggtttgtccacataaacttccccattgttccttggcccgccctcagggcagagccccctgcccaggctgggtaagagatgggcttggtccagcagggaccctgagggaacaaacccttttccttctggggagagagtgcccccccctaccatgtagttgaacaggggctaggagctccccactcccctccctctaacagcaggctgtgtgggtttcaattcccatccttcccaccccggctaggtgtcgtccaccctgtatcctgtgtctgagtgtgtgtgggggggttctgtactaatttccatggccggtggcttttccttccatgcatcactcccccccgcatgcccaggggccacccgcctggcattaccgcatgctggggtcattgggggaggggggtggggctcacgctgtcctgtggtcttgagatttttatttttgcatatgtaatccattctgtacaggtagctaactttgtaaacgctgtgtattccctctgcccccatggctgctggtgtaaataaactgcatctcccgttggta

SEQ ID NO: 366579 - DNA, 3736 bp, Homo sapiens
ccccgtgtgtgcagccgtgttgccgcccgctgtgctatgagcagtcagagcgccgtctccacaagagtttacaaatgaaaatggaggaaatgtctttgtctggcctggataacagcaaactagaggccatcgctcaggagatatacgcggacctggtcgaggattcttgtttgggattctgctttgaggtacaccgggctgtcaagtgtggctacttcttcttggacgacacggaccctgatagcatgaaggattttgagatcgtggaccagccgggcttggacatctttggacaggttttcaaccagtggaagagcaaggagtgtgtttgccccaattgcagtcgcagcattgccgcctcccgctttgctccccatctggagaagtgcctgggaatgggtcggaacagcagccgaatcgccaaccgccggattgccaatagcaacaatatgaataagtctgagagtgaccaagaagataatgatgacatcaatgacaacgactggtcctatggctcggagaagaaagccaagaagagaaagtcagacaagaaccccaattcccctcgaagatccaagtcattaaaacacaaaaatggggaacttagcaattcggatccttttaagtataacaattcaactgggatcagctatgagaccctggggccggaggagcttcgcagcctgctaaccacgcaatgtggggtgatttctgaacacaccaagaagatgtgcacaaggtccctgcgctgcccacagcacacagatgagcagaggcgaaccgtacggatttattttctcgggccctcggctgtccttccagaggtcgagagctccctggataatgacagctttgacatgactgacagccaggccctgatcagccggcttcagtgggacggctcctctgacctctcaccctctgattcaggctcctccaagacgagtgaaaatcagggatggggtctaggtaccaacagctctgagtcacggaaaaccaagaaaaagaaatcccatctgagcctggtagggactgcctccggcctaggttccaacaagaagaagaagccaaagccaccggcacccccgacgcccagcatctatgatgacatcaactgacttgggtgcaagggatagcctttggctgagcagagccctctctcctgacccccacccaggtggcatagcctggcaaatggacggctgctgggggttggggcttgggaagcttggtgggccaggcaggcagaggatccgattatgcgcccctggggggtgtcaaagtcctctgcaatggagcacgactcctcggcgtgcaggactcagacctggacatattatgccttggacataagtttggtggggaggcggttttcctatttattctgtgagttactggatgtccagctaggccaggggcctgacctgggcactgtgccagggcactgcctgccccccaccccaggaactggactaagccctgctgaggggcaatgtggcgacccgggaggctgtgggttggaagctgagcctggagggggcctgcctcggccgccctcagcaatgtgaatgggtccggtgcttggagctgaggggcaaggctgggcatgtcctgtctgtgtgcagaatcttatcaaatgcccccagtcccaggggtaggcaggcacagagtgctgtctgctgaggtgggcgtccagaactgccgccaccttccctgcccctcacaggggcagccctttcccctcagtccccatgggcctccttggcagcaggagctgtccttttgttgggtgccaggaaagggcctccagcctctacagcttcaaggaatgggaaagggagggtaggaagagggagaagtgtcagaattcctccccctgcctctcctccctgacccagggctggtgaggagtggggccccaaggtgagagggaacggtgctgctttatttgaaatgttttcttacctcattccctgccccaggaagggacccagcctcaccctcctggggtggccccgtgttcctcctgcccaccctgccccactgccctaccggggcagcccaggttcccaactgctgcttccacccccttcaccttgactggcttcagttcctctcagcgctcctgcctccaaagcgtgccctgtttcccttccttagcgcttttaagttatttattctgtacttgtggtttggggctctgaggaaaatcctaatcttgtgcctctccccctttgctaggagttgggtgggaagagagggtggcctctgtgccccaggttgtcagtggaggggaaggggtgtcactgcccctctgtgggactgtcatgccagtgtgcccacctgcctggtctacatcctaaagagatgtaccgtcccccctccatgcgggcaccaccactcccaggagccaagctggaggaccgcgacctgggctgggagcagagctgactgacatgggtggaggtgaccctgagccaagttctctggcacttgctggacatgtcccctaccctcttcccaagaggagccatcccacatttgggtagttagtacccaggactggttggactgatcgggttagggaccctagagggttaagggaacaacagagatggggctgcaatgccctgtctggaactccgctctcccgctggggtggttctgattgtggctcatgcctggttgcaaattggtttttaacccacaaattgtgattattttttaaaaagccaaacagattttggcaggagttagaataaatcccggggcctgggcttctctattcttggccctccgtagtctccctccgagaggaggccagagggagaggaggatctcagcaggcctctagccgcttccagatgcagtctggggagtgggctgaaggtgaagggaggaaggctgtgggccactctcccttctgagaggcagctgcagctcaggccctaatacactctttgccctgtggcctctcccttttccccccttctggttggaggagggagaagtgggaagtagcttgggaactggtttgtccacataaacttccccattgttccttggcccgccctcagggcagagccccctgcccaggctgggtaagagatgggcttggtccagcagggaccctgagggaacaaacccttttccttctggggagagagtgcccccccctaccatgtagttgaacaggggctaggagctccccactcccctccctctaacagcaggctgtgtgggtttcaattcccatccttcccaccccggctaggtgtcgtccaccctgtatcctgtgtctgagtgtgtgtgggggggttctgtactaatttccatggccggtggcttttccttccatgcatcactcccccccgcatgcccaggggccacccgcctggcattaccgcatgctggggtcattgggggaggggggtggggctcacgctgtcctgtggtcttgagatttttatttttgcatatgtaatccattctgtacaggtagctaactttgtaaacgctgtgtattccctctgcccccatggctgctggtgtaaataaactgcatctcccgttggtaaaacacccacgacaagaagggggcggctaaaggaacccccgaggggccaaggaaacagggaccaggtcgggccaaggggctcaaggggggcgaaaaacgaagcacggcggggtacaccgcggcgggaacggaccgggattgggagccaccggggccagc

SEQ ID NO: 366580 - DNA, 3046 bp, Homo sapiens
tgtctggaattaggtttcccggcccatagtgtcctgggaccatctgctctggacacctttgggccatctctgcttgtgctatctagcatttatacagaaagaaacatctaacatctagagtaggttccttccatccctcctttcagcttatattcctcttccagcaatgtggggtgatttctgaacacaccaagaagatgtgcacaaggtccctgcgctgcccacagcacacagatgagcagaggcgaaccgtacggatttattttctcgggccctcggctgtccttccagaggtcgagagctccctggataatgacagctttgacatgactgacagccaggccctgatcagccggcttcagtgggacggctcctctgacctctcaccctctgattcaggctcctccaagacgagtgaaaatcagggatggggtctaggtaccaacagctctgagtcacggaaaaccaagaaaaagaaatcccatctgagcctggtagggactgcctccggcctaggttccaacaagaagaagaagccaaagccaccggcacccccgacgcccagcatctatgatgacatcaactgacttgggtgcaagggatagcctttggctgagcagagccctctctcctgacccccacccaggtggcatagcctggcaaatggacggctgctgggggttggggcttgggaagcttggtgggccaggcaggcagaggatccgattatgcgcccctggggggtgtcaaagtcctctgcaatggagcacgactcctcggcgtgcaggactcagacctggacatattatgccttggacataagtttggtggggaggcggttttcctatttattctgtgagttactggatgtccagctaggccaggggcctgacctgggcactgtgccagggcactgcctgccccccaccccaggaactggactaagccctgctgaggggcaatgtggcgacccgggaggctgtgggttggaagctgagcctggagggggcctgcctcggccgccctcagcaatgtgaatgggtccggtgcttggagctgaggggcaaggctgggcatgtcctgtctgtgtgcagaatcttatcaaatgcccccagtcccaggggtaggcaggcacagagtgctgtctgctgaggtgggcgtccagaactgccgccaccttccctgcccctcacaggggcagccctttcccctcagtccccatgggcctccttggcagcaggagctgtccttttgttgggtgccaggaaagggcctccagcctctacagcttcaaggaatgggaaagggagggtaggaagagggagaagtgtcagaattcctccccctgcctctcctccctgacccagggctggtgaggagtggggccccaaggtgagagggaacggtgctgctttatttgaaatgttttcttacctcattccctgccccaggaagggacccagcctcaccctcctggggtggccccgtgttcctcctgcccaccctgccccactgccctaccggggcagcccaggttcccaactgctgcttccacccccttcaccttgactggcttcagttcctctcagcgctcctgcctccaaagcgtgccctgtttcccttccttagcgcttttaagttatttattctgtacttgtggtttggggctctgaggaaaatcctaatcttgtgcctctccccctttgctaggagttgggtgggaagagagggtggcctctgtgccccaggttgtcagtggaggggaaggggtgtcactgcccctctgtgggactgtcatgccagtgtgcccacctgcctggtctacatcctaaagagatgtaccgtcccccctccatgcgggcaccaccactcccaggagccaagctggaggaccgcgacctgggctgggagcagagctgactgacatgggtggaggtgaccctgagccaagttctctggcacttgctggacatgtcccctaccctcttcccaagaggagccatcccacatttgggtagttagtacccaggactggttggactgatcgggttagggaccctagagggttaagggaacaacagagatggggctgcaatgccctgtctggaactccgctctcccgctggggtggttctgattgtggctcatgcctggttgcaaattggtttttaacccacaaattgtgattattttttaaaaagccaaacagattttggcaggagttagaataaatcccggggcctgggcttctctattcttggccctccgtagtctccctccgagaggaggccagagggagaggaggatctcagcaggcctctagccgcttccagatgcagtctggggagtgggctgaaggtgaagggaggaaggctgtgggccactctcccttctgagaggcagctgcagctcaggccctaatacactctttgccctgtggcctctcccttttccccccttctggttggaggagggagaagtgggaagtagcttgggaactggtttgtccacataaacttccccattgttccttggcccgccctcagggcagagccccctgcccaggctgggtaagagatgggcttggtccagcagggaccctgagggaacaaacccttttccttctggggagagagtgcccccccctaccatgtagttgaacaggggctaggagctccccactcccctccctctaacagcaggctgtgtgggtttcaattcccatccttcccaccccggctaggtgtcgtccaccctgtatcctgtgtctgagtgtgtgtgggggggttctgtactaatttccatggccggtggcttttccttccatgcatcactcccccccgcatgcccaggggccacccgcctggcattaccgcatgctggggtcattgggggaggggggtggggctcacgctgtcctgtggtcttgagatttttatttttgcatatgtaatccattctgtacaggtagctaactttgtaaacgctgtgtattccctctgcccccatggctgctggtgtaaataaactgcatctcccgttggta

SEQ ID NO: 366581 - DNA, 3941 bp, Homo sapiens
ccccgtgtgtgcagccgtgttgccgcccgctgtgctatgagcagtcagagcgccgtctccacaagagtttacaaatgaaaatggaggaaatgtctttgtctggcctggataacagcaaactagaggccatcgctcaggagatatacgcggacctggtcgaggattcttgtttgggattctgctttgaggtacaccgggctgtcaagtgtggctacttcttcttggacgacacggaccctgatagcatgaaggattttgagatcgtggaccagccgggcttggacatctttggacaggttttcaaccagtggaagagcaaggagtgtgtttgccccaattgcagtcgcagcattgccgcctcccgctttgctccccatctggagaagtgcctgggaatgggtcggaacagcagccgaatcgccaaccgccggattgccaatagcaacaatatgaataagtctgagagtgaccaagaagataatgatgacatcaatgacaacgactggtcctatggctcggagaagaaagccaagaagagaaagtcagacaagaaccccaattcccctcgaagatccaagtcattaaaacacaaaaatggggaacttagcaattcggatccttttaagtataacaattcaactgggatcagctatgagaccctggggccggaggagcttcgcagcctgctaaccacgcaatgtggggtgatttctgaacacaccaagaagatgtgcacaaggtccctgcgctgcccacagcacacagatgagcagaggcgaaccgtacggatttattttctcgggccctcggctgtccttccagaggtcgagagctccctggataatgacagctttgacatgactgacagccaggccctgatcagccggcttcagtgggacggctcctctgacctctcaccctctgattcaggctcctccaagacgagtgaaaatcagggatggggtctaggtaccaacagctctgagtcacggaaaaccaagaaaaagaaatcccatctgagcctggtagggactgcctccggcctaggttccaacaagaagaagaagccaaagccaccggcacccccgacgcccagcatctatgatgacatcaactgacttgggtgcaagggatagcctttggctgagcagagccctctctcctgacccccacccaggtggcatagcctggcaaatggacggctgctgggggttggggcttgggaagcttggtgggccaggcaggcagaggatccgattatgcgcccctggggggtgtcaaagtcctctgcaatggagcacgactcctcggcgtgcaggactcagacctggacatattatgccttggacataagtttggtggggaggcggttttcctatttattctgtgagttactggatgtccagctaggccaggggcctgacctgggcactgtgccagggcactgcctgccccccaccccaggaactggactaagccctgctgaggggcaatgtggcgacccgggaggctgtgggttggaagctgagcctggagggggcctgcctcggccgccctcagcaatgtgaatgggtccggtgcttggagctgaggggcaaggctgggcatgtcctgtctgtgtgcagaatcttatcaaatgcccccagtcccaggggtaggcaggcacagagtgctgtctgctgaggtgggcgtccagaactgccgccaccttccctgcccctcacaggggcagccctttcccctcagtccccatgggcctccttggcagcaggagctgtccttttgttgggtgccaggaaagggcctccagcctctacagcttcaaggaatgggaaagggagggtaggaagagggagaagtgtcagaattcctccccctgcctctcctccctgacccagggctggtgaggagtggggccccaaggtgagagggaacggtgctgctttatttgaaatgttttcttacctcattccctgccccaggaagggacccagcctcaccctcctggggtggccccgtgttcctcctgcccaccctgccccactgccctaccggggcagcccaggttcccaactgctgcttccacccccttcaccttgactggcttcagttcctctcagcgctcctgcctccaaagcgtgccctgtttcccttccttagcgcttttaagttatttattctgtacttgtggtttggggctctgaggaaaatcctaatcttgtgcctctccccctttgctaggagttgggtgggaagagagggtggcctctgtgccccaggttgtcagtggaggggaaggggtgtcactgcccctctgtgggactgtcatgccagtgtgcccacctgcctggtctacatcctaaagagatgtaccgtcccccctccatgcgggcaccaccactcccaggagccaagctggaggaccgcgacctgggctgggagcagagctgactgacatgggtggaggtgaccctgagccaagttctctggcacttgctggacatgtcccctaccctcttcccaagaggagccatcccacatttgggtagttagtacccaggactggttggactgatcgggttagggaccctagagggttaagggaacaacagagatggggctgcaatgccctgtctggaactccgctctcccgctggggtggttctgattgtggctcatgcctggttgcaaattggtttttaacccacaaattgtgattattttttaaaaagccaaacagattttggcaggagttagaataaatcccggggcctgggcttctctattcttggccctccgtagtctccctccgagaggaggccagagggagaggaggatctcagcaggcctctagccgcttccagatgcagtctggggagtgggctgaaggtgaagggaggaaggctgtgggccactctcccttctgagaggcagctgcagctcaggccctaatacactctttgccctgtggcctctcccttttccccccttctggttggaggagggagaagtgggaagtagcttgggaactggtttgtccacataaacttccccattgttccttggcccgccctcagggcagagccccctgcccaggctgggtaagagatgggcttggtccagcagggaccctgagggaacaaacccttttccttctggggagagagtgcccccccctaccatgtagttgaacaggggctaggagctccccactcccctccctctaacagcaggctgtgtgggtttcaattcccatccttcccaccccggctaggtgtcgtccaccctgtatcctgtgtctgagtgtgtgtgggggggttctgtactaatttccatggccggtggcttttccttccatgcatcactcccccccgcatgcccaggggccacccgcctggcattaccgcatgctggggtcattgggggaggggggtggggctcacgctgtcctgtggtcttgagatttttatttttgcatatgtaatccattctgtacaggtagctaactttgtaaacgctgtgtattccctctgcccccatggctgctggtgtaaataaactgcatctcccgttggtaaaaaaaaaaaaaaaaaaaaaaaaaaaaattttttggggggccttgggccttggaaaaagtttttataaaccaatttggttgggggggggggcccaggttgggttagggtgaagtgggcaataaggggtggtccccaagggagactccgggcgccattgagaacatagtggcttgggagttctctcaacccaattttaaaaaaaacgcgcgccggcggggaacacccggagcgcggtttcttggaaccaacattccacgagggggagtgtccggaagggcgacaatacacgggggatcttataacacaggggactgtccaaaggcgagcgctcagatcttcaaatttacgccgcgaccggtgggt

SEQ ID NO: 366582 - DNA, 3220 bp, Homo sapiens
  misc_feature (3155)..(3155): n is a, c, g, or t
  misc_feature (3158)..(3158): n is a, c, g, or t
  misc_feature (3160)..(3160): n is a, c, g, or t
ccccgtgtgtgcagccgtgttgccgcccgctgtgctatgagcagtcagagcgccgtctccacaagagtttacaaatgaaaatggaggaaatgtctttgtctggcctggataacagcaaactagaggccatcgctcaggagatatacgcggacctggtcgaggattcttgtttgggattctgctttgaggtacaccgggctgtcaagtgtggctacttcttcttggacgacacggaccctgatagcatgaaggattttgagatcgtggaccagccgggcttggacatctttggacaggttttcaaccagtggaagagcaaggagtgtgtttgccccaattgcagtcgcagcattgccgcctcccgctttgctccccatctggagaagtgcctgggaatgggtcggaacagcagccgaatcgccaaccgccggattgccaatagcaacaatatgaataagtctgagagtgaccaagaagataatgatgacatcaatgacaacgactggtcctatggctcggagaagaaagccaagaagagaaagtcagacaagaaccccaattcccctcgaagatccaagtcattaaaacacaaaaatggggaacttagcaattcggatccttttaagtataacaattcaactgggatcagctatgagaccctggggccggaggagcttcgcagcctgctaaccacgcaatgtggggtgatttctgaacacaccaagaagatgtgcacaaggtccctgcgctgcccacagcacacagatgagcagaggcgaaccgtacggatttattttctcgggccctcggctgtccttccagaggtcgagagctccctggataatgacagctttgacatgactgacagccaggccctgatcagccggcttcagtgggacggctcctctgacctctcaccctctgattcaggctcctccaagacgagtgaaaatcagggatggggtctaggtaccaacagctctgagtcacggaaaaccaagaaaaagaaatcccatctgagcctggtagggactgcctccggcctaggttccaacaagaagaagaagccaaagccaccggcacccccgacgcccagcatctatgatgacatcaactgacttgggtgcaagggatagcctttggctgagcagagccctctctcctgacccccacccaggtggcatagcctggcaaatggacggctgctgggggttggggcttgggaagcttggtgggccaggcaggcagaggatccgattatgcgcccctggggggtgtcaaagtcctctgcaatggagcacgactcctcggcgtgcaggactcagacctggacatattatgccttggacataagtttggtggggaggcggttttcctatttattctgtgagttactggatgtccagctaggccaggggcctgacctgggcactgtgccagggcactgcctgccccccaccccaggaactggactaagccctgctgaggggcaatgtggcgacccgggaggctgtgggttggaagctgagcctggagggggcctgcctcggccgccctcagcaatgtgaatgggtccggtgcttggagctgaggggcaaggctgggcatgtcctgtctgtgtgcagaatcttatcaaatgcccccagtcccaggggtaggcaggcacagagtgctgtctgctgaggtgggcgtccagaactgccgccaccttccctgcccctcacaggggcagccctttcccctcagtccccatgggcctccttggcagcaggagctgtccttttgttgggtgccaggaaagggcctccagcctctacagcttcaaggaatgggaaagggagggtaggaagagggagaagtgtcagaattcctccccctgcctctcctccctgacccagggctggtgaggagtggggccccaaggtgagagggaacggtgctgctttatttgaaatgttttcttacctcattccctgccccaggaagggacccagcctcaccctcctggggtggccccgtgttcctcctgcccaccctgccccactgccctaccggggcagcccaggttcccaactgctgcttccacccccttcaccttgactggcttcagttcctctcagcgctcctgcctccaaagcgtgccctgtttcccttccttagcgcttttaagttatttattctgtacttgtggtttggggctctgaggaaaatcctaatcttgtgcctctccccctttgctaggagttgggtgggaagagagggtggcctctgtgccccaggttgtcagtggaggggaaggggtgtcactgcccctctgtgggactgtcatgccagtgtgcccacctgcctggtctacatcctaaagagatgtaccgtcccccctccatgcgggcaccaccactcccaggagccaagctggaggaccgcgacctgggctgggagcagagctgactgacatgggtggaggtgaccctgagccaagttctctggcacttgctggacatgtcccctaccctcttcccaagaggagccatcccacatttgggtagttagtacccaggactggttggactgatcgggttagggaccctagagggttaagggaacaacagagatggggctgcaatgccctgtctggaactccgctctcccgctggggtggttctgattgtggctcatgcctggttgcaaattggtttttaacccacaaattgtgattattttttaaaaagccaaacagattttggcaggagttagaataaatcccggggcctgggcttctctattcttggccctccgtagtctccctccgagaggaggccagagggagaggaggatctcagcaggcctctagccgcttccagatgcagtctggggagtgggctgaaggtgaagggaggaaggctgtgggccactctcccttctgagaggcagctgcagctcaggccctaatacactctttgccctgtggcctctcccttttccccccttctggttggaggagggagaagtgggaagtagcttgggaactggtttgtccacataaacttccccattgttccttggcccgccctcagggcagagccccctgcccaggctgggtaagagatgggcttggtccagcagggaccctgagggaaaccctttctctgganaanangcccccttacatgatagaccaggctaagagaccaatcctccctaacgcgctgctgtaacc

SEQ ID NO: 366583 - DNA, 2106 bp, Homo sapiens
  misc_feature (25)..(25): n is a, c, g, or t
tggtgatctagaggatcccgagagntgggacccgggaggctgtgggttggaagctgagcctggagggggcctgcctcggccgccctcagcaatgtgaatgggtccggtgcttggagctgaggggcaaggctgggcatgtcctgtctgtgtgcagaatcttatcaaatgcccccagtcccaggggtaggcaggcacagagtgctgtctgctgaggtgggcgtccagaactgccgccaccttccctgcccctcacaggggcagccctttcccctcagtccccatgggcctccttggcagcaggagctgtccttttgttgggtgccaggaaagggcctccagcctctacagcttcaaggaatgggaaagggagggtaggaagagggagaagtgtcagaattcctccccctgcctctcctccctgacccagggctggtgaggagtggggccccaaggtgagagggaacggtgctgctttatttgaaatgttttcttacctcattccctgccccaggaagggacccagcctcaccctcctggggtggccccgtgttcctcctgcccaccctgccccactgccctaccggggcagcccaggttcccaactgctgcttccacccccttcaccttgactggcttcagttcctctcagcgctcctgcctccaaagcgtgccctgtttcccttccttagcgcttttaagttatttattctgtacttgtggtttggggctctgaggaaaatcctaatcttgtgcctctccccctttgctaggagttgggtgggaagagagggtggcctctgtgccccaggttgtcagtggaggggaaggggtgtcactgcccctctgtgggactgtcatgccagtgtgcccacctgcctggtctacatcctaaagagatgtaccgtcccccctccatgcgggcaccaccactcccaggagccaagctggaggaccgcgacctgggctgggagcagagctgactgacatgggtggaggtgaccctgagccaagttctctggcacttgctggacatgtcccctaccctcttcccaagaggagccatcccacatttgggtagttagtacccaggactggttggactgatcgggttagggaccctagagggttaagggaacaacagagatggggctgcaatgccctgtctggaactccgctctcccgctggggtggttctgattgtggctcatgcctggttgcaaattggtttttaacccacaaattgtgattattttttaaaaagccaaacagattttggcaggagttagaataaatcccggggcctgggcttctctattcttggccctccgtagtctccctccgagaggaggccagagggagaggaggatctcagcaggcctctagccgcttccagatgcagtctggggagtgggctgaaggtgaagggaggaaggctgtgggccactctcccttctgagaggcagctgcagctcaggccctaatacactctttgccctgtggcctctcccttttccccccttctggttggaggagggagaagtgggaagtagcttgggaactggtttgtccacataaacttccccattgttccttggcccgccctcagggcagagccccctgcccaggctgggtaagagatgggcttggtccagcagggaccctgagggaacaaacccttttccttctggggagagagtgcccccccctaccatgtagttgaacaggggctaggagctccccactcccctccctctaacagcaggctgtgtgggtttcaattcccatccttcccaccccggctaggtgtcgtccaccctgtatcctgtgtctgagtgtgtgtgggggggttctgtactaatttccatggccggtggcttttccttccatgcatcactcccccccgcatgcccaggggccacccgcctggcattaccgcatgctggggtcattgggggaggggggtggggctcacgctgtcctgtggtcttgagatttttatttttgcatatgtaatccattctgtacaggtagctaactttgtaaacgctgtgtattccctctgcccccatggctgctggtgtaaataaactgcatctcccgttggta

SEQ ID NO: 366584 - DNA, 1882 bp, Homo sapiens
ccagccccttctgctcctgtctcctcgtctccgccttcctggagctccccctccctcttggcttctccgcacccgcccactgtccttttgttgggtgccaggaaagggcctccagcctctacagcttcaaggaatgggaaagggagggtaggaagagggagaagtgtcagaattcctccccctgcctctcctccctgacccagggctggtgaggagtggggccccaaggtgagagggaacggtgctgctttatttgaaatgttttcttacctcattccctgccccaggaagggacccagcctcaccctcctggggtggccccgtgttcctcctgcccaccctgccccactgccctaccggggcagcccaggttcccaactgctgcttccacccccttcaccttgactggcttcagttcctctcagcgctcctgcctccaaagcgtgccctgtttcccttccttagcgcttttaagttatttattctgtacttgtggtttggggctctgaggaaaatcctaatcttgtgcctctccccctttgctaggagttgggtgggaagagagggtggcctctgtgccccaggttgtcagtggaggggaaggggtgtcactgcccctctgtgggactgtcatgccagtgtgcccacctgcctggtctacatcctaaagagatgtaccgtcccccctccatgcgggcaccaccactcccaggagccaagctggaggaccgcgacctgggctgggagcagagctgactgacatgggtggaggtgaccctgagccaagttctctggcacttgctggacatgtcccctaccctcttcccaagaggagccatcccacatttgggtagttagtacccaggactggttggactgatcgggttagggaccctagagggttaagggaacaacagagatggggctgcaatgccctgtctggaactccgctctcccgctggggtggttctgattgtggctcatgcctggttgcaaattggtttttaacccacaaattgtgattattttttaaaaagccaaacagattttggcaggagttagaataaatcccggggcctgggcttctctattcttggccctccgtagtctccctccgagaggaggccagagggagaggaggatctcagcaggcctctagccgcttccagatgcagtctggggagtgggctgaaggtgaagggaggaaggctgtgggccactctcccttctgagaggcagctgcagctcaggccctaatacactctttgccctgtggcctctcccttttccccccttctggttggaggagggagaagtgggaagtagcttgggaactggtttgtccacataaacttccccattgttccttggcccgccctcagggcagagccccctgcccaggctgggtaagagatgggcttggtccagcagggaccctgagggaacaaacccttttccttctggggagagagtgcccccccctaccatgtagttgaacaggggctaggagctccccactcccctccctctaacagcaggctgtgtgggtttcaattcccatccttcccaccccggctaggtgtcgtccaccctgtatcctgtgtctgagtgtgtgtgggggggttctgtactaatttccatggccggtggcttttccttccatgcatcactcccccccgcatgcccaggggccacccgcctggcattaccgcatgctggggtcattgggggaggggggtggggctcacgctgtcctgtggtcttgagatttttatttttgcatatgtaatccattctgtacaggtagctaactttgtaaacgctgtgtattccctctgcccccatggctgctggtgtaaataaactgcatctcccgttggta

SEQ ID NO: 366585 - DNA, 1804 bp, Homo sapiens
ccccgtgtgtgcagccgtgttgccgcccgctgtgctatgagcagtcagagcgccgtctccacaagagtttacaaatgaaaatggaggaaatgtctttgtctggcctggataacagcaaactagaggccatcgctcaggagatatacgcggacctggtcgaggattcttgtttgggattctgctttgaggtacaccgggctgtcaagtgtggctacttcttcttggacgacacggaccctgatagcatgaaggattttgagatcgtggaccagccgggcttggacatctttggacaggttttcaaccagtggaagagcaaggagtgtgtttgccccaattgcagtcgcagcattgccgcctcccgctttgctccccatctggagaagtgcctgggaatgggtcggaacagcagccgaatcgccaaccgccggattgccaatagcaacaatatgaataagtctgagagtgaccaagaagataatgatgacatcaatgacaacgactggtcctatggctcggagaagaaagccaagaagagaaagtcagacaagaaccccaattcccctcgaagatccaagtcattaaaacacaaaaatggggaacttagcaattcggatccttttaagtataacaattcaactgggatcagctatgagaccctggggccggaggagcttcgcagcctgctaaccacgcaatgtggggtgatttctgaacacaccaagaagatgtgcacaaggtccctgcgctgcccacagcacacagatgagcagaggcgaaccgtacggatttattttctcgggccctcggctgtccttccagaggtcgagagctccctggataatgacagctttgacatgactgacagccaggccctgatcagccggcttcagtgggacggctcctctgacctctcaccctctgattcaggctcctccaagacgagtgaaaatcagggatggggtctaggtaccaacagctctgagtcacggaaaaccaagaaaaagaaatccaagaggagccatcccacatttgggtagttagtacccaggactggttggactgatcgggttagggaccctagagggttaagggaacaacagagatggggctgcaatgccctgtctggaactccgctctcccgctggggtggttctgattgtggctcatgcctggttgcaaattggtttttaacccacaaattgtgattattttttaaaaagccaaacagattttggcaggagttagaataaatcccggggcctgggcttctctattcttggccctccgtagtctccctccgagaggaggccagagggagaggaggatctcagcaggcctctagccgcttccagatgcagtctggggagtgggctgaaggtgaagggagagagtgcccccccctaccatgtagttgaacaggggctaggagctccccactcccctccctctaacagcaggctgtgtgggtttcaattcccatccttcccaccccggctaggtgtcgtccaccctgtatcctgtgtctgagtgtgtgtgggggggttctgtactaatttccatggccggtggcttttccttccatgcatcactcccccccgcatgcccaggggccacccgcctggcattaccgcatgctggggtcattgggggaggggggtggggctcacgctgtcctgtggtcttgagatttttatttttgcatatgtaatccattctgtacaggtagctaactttgtaaacgctgtgtattccctctgcccccatggctgctggtgtaaataaactgcatctcccgttggta

SEQ ID NO: 366586 - DNA, 167 bp, Homo sapiens
ggctcacgctgtcctgtggtcttgagatttttatttttgcatatgtaatccattctgtacaggtagctaactttgtaaacgctgtgtattccctctgcccccatggctgctggtgtaaataaactgcatctcccgttggtagccccggcctacctactctcattacc

SEQ ID NO: 366587 - DNA, 3160 bp, Homo sapiens
agacaggcctcctactggggaggaagagtaggaatttgaggatgctgctttgtcaaatcttttttccttccctgggttctcggctcccccttttcgttaccctttccccaaagctatggtatctcccattccagaaccccaattcccctcgaagatccaagtcattaaaacacaaaaatggggaacttagcaattcggatccttttaagtataacaattcaactgggatcagctatgagaccctggggccggaggagcttcgcagcctgctaaccacgcaatgtggggtgatttctgaacacaccaagaagatgtgcacaaggtccctgcgctgcccacagcacacagatgagcagaggcgaaccgtacggatttattttctcgggccctcggctgtccttccagaggtcgagagctccctggataatgacagctttgacatgactgacagccaggccctgatcagccggcttcagtgggacggctcctctgacctctcaccctctgattcaggctcctccaagacgagtgaaaatcagggatggggtctaggtaccaacagctctgagtcacggaaaaccaagaaaaagaaatcccatctgagcctggtagggactgcctccggcctaggttccaacaagaagaagaagccaaagccaccggcacccccgacgcccagcatctatgatgacatcaactgacttgggtgcaagggatagcctttggctgagcagagccctctctcctgacccccacccaggtggcatagcctggcaaatggacggctgctgggggttggggcttgggaagcttggtgggccaggcaggcagaggatccgattatgcgcccctggggggtgtcaaagtcctctgcaatggagcacgactcctcggcgtgcaggactcagacctggacatattatgccttggacataagtttggtggggaggcggttttcctatttattctgtgagttactggatgtccagctaggccaggggcctgacctgggcactgtgccagggcactgcctgccccccaccccaggaactggactaagccctgctgaggggcaatgtggcgacccgggaggctgtgggttggaagctgagcctggagggggcctgcctcggccgccctcagcaatgtgaatgggtccggtgcttggagctgaggggcaaggctgggcatgtcctgtctgtgtgcagaatcttatcaaatgcccccagtcccaggggtaggcaggcacagagtgctgtctgctgaggtgggcgtccagaactgccgccaccttccctgcccctcacaggggcagccctttcccctcagtccccatgggcctccttggcagcaggagctgtccttttgttgggtgccaggaaagggcctccagcctctacagcttcaaggaatgggaaagggagggtaggaagagggagaagtgtcagaattcctccccctgcctctcctccctgacccagggctggtgaggagtggggccccaaggtgagagggaacggtgctgctttatttgaaatgttttcttacctcattccctgccccaggaagggacccagcctcaccctcctggggtggccccgtgttcctcctgcccaccctgccccactgccctaccggggcagcccaggttcccaactgctgcttccacccccttcaccttgactggcttcagttcctctcagcgctcctgcctccaaagcgtgccctgtttcccttccttagcgcttttaagttatttattctgtacttgtggtttggggctctgaggaaaatcctaatcttgtgcctctccccctttgctaggagttgggtgggaagagagggtggcctctgtgccccaggttgtcagtggaggggaaggggtgtcactgcccctctgtgggactgtcatgccagtgtgcccacctgcctggtctacatcctaaagagatgtaccgtcccccctccatgcgggcaccaccactcccaggagccaagctggaggaccgcgacctgggctgggagcagagctgactgacatgggtggaggtgaccctgagccaagttctctggcacttgctggacatgtcccctaccctcttcccaagaggagccatcccacatttgggtagttagtacccaggactggttggactgatcgggttagggaccctagagggttaagggaacaacagagatggggctgcaatgccctgtctggaactccgctctcccgctggggtggttctgattgtggctcatgcctggttgcaaattggtttttaacccacaaattgtgattattttttaaaaagccaaacagattttggcaggagttagaataaatcccggggcctgggcttctctattcttggccctccgtagtctccctccgagaggaggccagagggagaggaggatctcagcaggcctctagccgcttccagatgcagtctggggagtgggctgaaggtgaagggaggaaggctgtgggccactctcccttctgagaggcagctgcagctcaggccctaatacactctttgccctgtggcctctcccttttccccccttctggttggaggagggagaagtgggaagtagcttgggaactggtttgtccacataaacttccccattgttccttggcccgccctcagggcagagccccctgcccaggctgggtaagagatgggcttggtccagcagggaccctgagggaacaaacccttttccttctggggagagagtgcccccccctaccatgtagttgaacaggggctaggagctccccactcccctccctctaacagcaggctgtgtgggtttcaattcccatccttcccaccccggctaggtgtcgtccaccctgtatcctgtgtctgagtgtgtgtgggggggttctgtactaatttccatggccggtggcttttccttccatgcatcactcccccccgcatgcccaggggccacccgcctggcattaccgcatgctggggtcattgggggaggggggtggggctcacgctgtcctgtggtcttgagatttttatttttgcatatgtaatccattctgtacaggtagctaactttgtaaacgctgtgtattccctctgcccccatggctgctggtgtaaataaactgcatctcccgttggta

SEQ ID NO: 366588 - DNA, 3652 bp, Homo sapiens
ccccgtgtgtgcagccgtgttgccgcccgctgtgctatgagcagtcagagcgccgtctccacaagagtttacaaatgaaaatggaggaaatgtctttgtctggcctggataacagcaaactagaggccatcgctcaggagatatacgcggacctggtcgaggattcttgtttgggattctgctttgaggtacaccgggctgtcaagtgtggctacttcttcttggacgacacggaccctgatagcatgaaggattttgagatcgtggaccagccgggcttggacatctttggacaggttttcaaccagtggaagagcaaggagtgtgtttgccccaattgcagtcgcagcattgccgcctcccgctttgctccccatctggagaagtgcctgggaatgggtcggaacagcagccgaatcgccaaccgccggattgccaatagcaacaatatgaataagtctgagagtgaccaagaagataatgatgacatcaatgacaacgactggtcctatggctcggagaagaaagccaagaagagaaagtcagacaagaaccccaattcccctcgaagatccaagtcattaaaacacaaaaatgggttctctgtctgtacctctgcatcaaacacccttccccttcttttttcttcttcaggggaacttagcaattcggatccttttaagtataacaattcaactgggatcagctatgagaccctggggccggaggagcttcgcagcctgctaaccacgcttatattcctcttccagcaatgtggggtgatttctgaacacaccaagaagatgtgcacaaggtccctgcgctgcccacagcacacagatgagcagaggcgaaccgtacggatttattttctcgggccctcggctgtccttccagaggtcgagagctccctggataatgacagctttgacatgactgacagccaggccctgatcagccggcttcagtgggacggctcctctgacctctcaccctctgattcaggctcctccaagacgagtgaaaatcagggatggggtctaggtaccaacagctctgagtcacggaaaaccaagaaaaagaaatcccatctgagcctggtagggactgcctccggcctaggttccaacaagaagaagaagccaaagccaccggcacccccgacgcccagcatctatgatgacatcaactgacttgggtgcaagggatagcctttggctgagcagagccctctctcctgacccccacccaggtggcatagcctggcaaatggacggctgctgggggttggggcttgggaagcttggtgggccaggcaggcagaggatccgattatgcgcccctggggggtgtcaaagtcctctgcaatggagcacgactcctcggcgtgcaggactcagacctggacatattatgccttggacataagtttggtggggaggcggttttcctatttattctgtgagttactggatgtccagctaggccaggggcctgacctgggcactgtgccagggcactgcctgccccccaccccaggaactggactaagccctgctgaggggcaatgtggcgacccgggaggctgtgggttggaagctgagcctggagggggcctgcctcggccgccctcagcaatgtgaatgggtccggtgcttggagctgaggggcaaggctgggcatgtcctgtctgtgtgcagaatcttatcaaatgcccccagtcccaggggtaggcaggcacagagtgctgtctgctgaggtgggcgtccagaactgccgccaccttccctgcccctcacaggggcagccctttcccctcagtccccatgggcctccttggcagcaggagctgtccttttgttgggtgccaggaaagggcctccagcctctacagcttcaaggaatgggaaagggagggtaggaagagggagaagtgtcagaattcctccccctgcctctcctccctgacccagggctggtgaggagtggggccccaaggtgagagggaacggtgctgctttatttgaaatgttttcttacctcattccctgccccaggaagggacccagcctcaccctcctggggtggccccgtgttcctcctgcccaccctgccccactgccctaccggggcagcccaggttcccaactgctgcttccacccccttcaccttgactggcttcagttcctctcagcgctcctgcctccaaagcgtgccctgtttcccttccttagcgcttttaagttatttattctgtacttgtggtttggggctctgaggaaaatcctaatcttgtgcctctccccctttgctaggagttgggtgggaagagagggtggcctctgtgccccaggttgtcagtggaggggaaggggtgtcactgcccctctgtgggactgtcatgccagtgtgcccacctgcctggtctacatcctaaagagatgtaccgtcccccctccatgcgggcaccaccactcccaggagccaagctggaggaccgcgacctgggctgggagcagagctgactgacatgggtggaggtgaccctgagccaagttctctggcacttgctggacatgtcccctaccctcttcccaagaggagccatcccacatttgggtagttagtacccaggactggttggactgatcgggttagggaccctagagggttaagggaacaacagagatggggctgcaatgccctgtctggaactccgctctcccgctggggtggttctgattgtggctcatgcctggttgcaaattggtttttaacccacaaattgtgattattttttaaaaagccaaacagattttggcaggagttagaataaatcccggggcctgggcttctctattcttggccctccgtagtctccctccgagaggaggccagagggagaggaggatctcagcaggcctctagccgcttccagatgcagtctggggagtgggctgaaggtgaagggaggaaggctgtgggccactctcccttctgagaggcagctgcagctcaggccctaatacactctttgccctgtggcctctcccttttccccccttctggttggaggagggagaagtgggaagtagcttgggaactggtttgtccacataaacttccccattgttccttggcccgccctcagggcagagccccctgcccaggctgggtaagagatgggcttggtccagcagggaccctgagggaacaaacccttttccttctggggagagagtgcccccccctaccatgtagttgaacaggggctaggagctccccactcccctccctctaacagcaggctgtgtgggtttcaattcccatccttcccaccccggctaggtgtcgtccaccctgtatcctgtgtctgagtgtgtgtgggggggttctgtactaatttccatggccggtggcttttccttccatgcatcactcccccccgcatgcccaggggccacccgcctggcattaccgcatgctggggtcattgggggaggggggtggggctcacgctgtcctgtggtcttgagatttttatttttgcatatgtaatccattctgtacaggtagctaactttgtaaacgctgtgtattccctctgcccccatggctgctggtgtaaataaactgcatctcccgttggta

SEQ ID NO: 366589 - DNA, 3313 bp, Homo sapiens
ccccgtgtgtgcagccgtgttgccgcccgctgtgctatgagcagtcagagcgccgtctccacaagagtttacaaatgaaaatggaggaaatgtctttgtctggcctggataacagcaaactagaggccatcgctcaggagatatacgcggacctggtcgaggattcttgtttgggattctgctttgaggtacaccgggctgtcaagtgtggctacttcttcttggacgacacggaccctgatagcatgaaggattttgagatcgtggaccagccgggcttggacatctttggacaggttttcaaccagtggaagagcaaggagtgtgtttgccccaattgcagtcgcagcattgccgcctcccgctttgctccccatctggagaagtgcctgggaatgggtcggaacagcagccgaatcgccaaccgccggattgccaatagcaacaatatgaataagtctgagagtgaccaagaagataatgatgacatcaatgacaacgactggtcctatggctcggagaagaaagccaagaagagaaagtcagacaagaaccccaattcccctcgaagatccaagtcattaaaacacaaaaatggggaacttagcaattcggatccttttaagtataacaattcaactgggatcagctatgagaccctggggccggaggagcttcgcagcctgctaaccacgcaatgtggggtgatttctgaacacaccaagaagatgtgcacaaggtccctgcgctgcccacagcacacagatgagcagaggcgaaccgtacggatttattttctcgggccctcggctgtccttccagaggtcgagagctccctggataatgacagctttgacatgactgacagccaggccctgatcagccggcttcagtgggacggctcctctgacctctcaccctctgattcaggctcctccaagacgagtgaaaatcagggatggggtctaggtaccaacagctctgagtcacggaaaaccaagaaaaagaaatcccatctgagcctggtagggactgcctccggcctaggttccaacaagaagaagaagccaaagccaccggcacccccgacgcccagcatctatgatgacatcaactgacttgggtgcaagggatagcctttggctgagcagagccctctctcctgacccccacccaggtggcatagcctggcaaatggacggctgctgggggttggggcttgggaagcttggtgggccaggcaggcagaggatccgattatgcgcccctggggggtgtcaaagtcctctgcaatggagcacgactcctcggcgtgcaggactcagacctggacatattatgccttggacataagtttggtggggaggcggttttcctatttattctgtgagttactggatgtccagctaggccaggggcctgacctgggcactgtgccagggcactgcctgccccccaccccaggaactggactaagccctgctgaggggcaatgtggcgacccgggaggctgtgggttggaagctgagcctggagggggcctgcctcggccgccctcagcaatgtgaatgggtccggtgcttggagctgaggggcaaggctgggcatgtcctgtctgtgtgcagaatcttatcaaatgcccccagtcccaggggtaggcaggcacagagtgctgtctgctgaggtgggcgtccagaactgccgccaccttccctgcccctcacaggggcagccctttcccctcagtccccatgggcctccttggcagcaggagctgtccttttgttgggtgccaggaaagggcctccagcctctacagcttcaaggaatgggaaagggagggtaggaagagggagaagtgtcagaattcctccccctgcctctcctccctgacccagggctggtgaggagtggggccccaaggtgagagggaacggtgctgctttatttgaaatgttttcttacctcattccctgccccaggaagggacccagcctcaccctcctggggtggccccgtgttcctcctgcccaccctgccccactgccctaccggggcagcccaggttcccaactgctgcttccacccccttcaccttgactggcttcagttcctctcagcgctcctgcctccaaagcgtgccctgtttcccttccttagcgcttttaagttatttattctgtacttgtggtttggggctctgaggaaaatcctaatcttgtgcctctccccctttgctaggagttgggtgggaagagagggtggcctctgtgccccaggttgtcagtggaggggaaggggtgtcactgcccctctgtgggactgtcatgccagtgtgcccacctgcctggtctacatcctaaagagatgtaccgtcccccctccatgcgggcaccaccactcccaggagccaagctggaggaccgcgacctgggctgggagcagagctgactgacatgggtggaggtgaccctgagccaagttctctggcacttgctggacatgtcccctaccctcttcccaagaggagccatcccacatttgggtagttagtacccaggactggttggactgatcgggttagggaccctagagggttaagggaacaacagagatggggctgcaatgccctgtctggaactccgctctcccgctggggtggttctgattgtggctcatgcctggttgcaaattggtttttaacccacaaattgtgattattttttaaaaagccaaacagattttggcaggagttagaataaatcccggggcctgggcttctctattcttggccctccgtagtctccctccgagaggaggccagagggagaggaggatctcagcaggcctctagccgcttccagatgcagtctggggagtgggctgaaggtgaagggagagagtgcccccccctaccatgtagttgaacaggggctaggagctccccactcccctccctctaacagcaggctgtgtgggtttcaattcccatccttcccaccccggctaggtgtcgtccaccctgtatcctgtgtctgagtgtgtgtgggggggttctgtactaatttccatggccggtggcttttccttccatgcatcactcccccccgcatgcccaggggccacccgcctggcattaccgcatgctggggtcattgggggaggggggtggggctcacgctgtcctgtggtcttgagatttttatttttgcatatgtaatccattctgtacaggtagctaactttgtaaacgctgtgtattccctctgcccccatggctgctggtgtaaataaactgcatctcccgttggta

SEQ ID NO: 366590 - DNA, 2552 bp, Homo sapiens
ccccgtgtgtgcagccgtgttgccgcccgctgtgctatgagcagtcagagcgccgtctccacaagagtttacaaatgaaaatggaggaaatgtctttgtctggcctggataacagcaaactagaggccatcgctcaggagatatacgcggacctggtcgaggattcttgtttgggattctgctttgaggtacaccgggctgtcaagtgtggctacttcttcttggacgacacggaccctgatagcatgaaggattttgagatcgtggaccagccgggcttggacatctttggacaggttttcaaccagtggaagagcaaggagtgtgtttgccccaattgcagtcgcagcattgccgcctcccgctttgctccccatctggagaagtgcctgggaatgggtcggaacagcagccgaatcgccaaccgccggattgccaatagcaacaatatgaataagtctgagagtgaccaagaagataatgatgacatcaatgacaacgactggtcctatggctcggagaagaaagccaagaagagaaagtcagacaagaaccccaattcccctcgaagatccaagtcattaaaacacaaaaatggggaacttagcaattcggatccttttaagtataacaattcaactgggatcagctatgagaccctggggccggaggagcttcgcagcctgctaaccacgcaatgtggggtgatttctgaacacaccaagaagatgtgcacaaggtccctgcgctgcccacagcacacagatgagcagaggcgaaccgtacggatttattttctcgggccctcggctgtccttccagaggtcgagagctccctggataatgacagctttgacatgactgacagccaggccctgatcagccggcttcagtgggacggctcctctgacctctcaccctctgattcaggctcctccaagacgagtgaaaatcagggatggggtctaggtaccaacagctctgagtcacggaaaaccaagaaaaagaaatcccatctgagcctggtagggactgcctccggcctaggttccaacaagaagaagaagccaaagccaccggcacccccgacgcccagcatctatgatgacatcaactgacttgggtgcaagggatagcctttggctgagcagagccctctctcctgacccccacccaggtggcatagcctggcaaatggacggctgctgggggttggggcttgggaagcttggtgggccaggcaggcagaggatccgattatgcgcccctggggggtgtcaaagtcctctgcaatggagcacgactcctcggcgtgcaggactcagacctggacatattatgccttggacataagtttggtggggaggcggttttcctatttattctgtgagttactggatgtccagctaggccaggggcctgacctgggcactgtgccagggcactgcctgccccccaccccaggaactggactaagccctgctgaggggcaatgtggcgacccgggaggctgtgggttggaagctgagcctggagggggcctgcctcggccgccctcagcaatgtgaatgggtccggtgcttggagctgaggggcaaggctgggcatgtcctgtctgtgtgcagaatcttatcaaatgcccccagtcccaggggtaggcaggcacagagtgctgtctgctgaggtgggcgtccagaactgccgccaccttccctgcccctcacaggggcagccctttcccctcagtccccatgggcctccttggcagcaggagctgtccttttgttgggtgccaggaaagggcctccagcctctacagcttcaaggaatgggaaagggagggtaggaagagggagaagtgtcagaattcctccccctgcctctcctccctgacccagggctggtgaggagtggggccccaaggtgagagggaacggtgctgctttatttgaaatgttttcttacctcattccctgccccaggaagggacccagcctcaccccgcctggcattaccgcatgctggggtcattgggggaggggggtggggctcacgctgtcctgtggtcttgagatttttatttttgcatatgtaatccattctgtacaggtagctaactttgtaaacgctgtgtattccctctgcccccatggctgctggtgtaaataaactgcatctcccgttggtaaaaaaaaaaaaaaaaaaaaaaaaaaaaattttttggggggccttgggccttggaaaaagtttttataaaccaatttggttgggggggggggcccaggttgggttagggtgaagtgggcaataaggggtggtccccaagggagactccgggcgccattgagaacatagtggcttgggagttctctcaacccaattttaaaaaaaacgcgcgccggcggggaacacccggagcgcggtttcttggaaccaacattccacgagggggagtgtccggaagggcgacaatacacgggggatcttataacacaggggactgtccaaaggcgagcgctcagatcttcaaatttacgccgcgaccggtgggt

SEQ ID NO: 366591 - DNA, 890 bp, Homo sapiens
ggacttctgtttccaccaatgcgggaggttcttgttctgcaggtctggcgtctgccaggagctacggccggaagatggcggcggccgcagagttgtcgctactggagaagtccctgggactgagtaaggggaataaatacagtgctcagggcgagcgacagattccagttcttcagacaaacaatggtccaagtctaacaggattgactactatagcagctcatctagtcaagcaagccaacaaagaatatttgctggggagtactgcagaagaaaaagcaatcgttcagcagtggttagaatacagggtcactcaagtagatgggcactccagtaaaaatgacatccacacactgttgaaggatcttaattcatatcttgaagataaagtctaccttacagggtataactttacattagcagatatactattgtactatggacttcatcgctttatagttgacctgacagttcaagaaaaggagaaatatcttaatgtgtctcgctggttttgtcacattcagcattatccaggcatcaggcaacatctgtctagtgttgtcttcatcaagaacagactatatactaattcccactagaagctgtccatgccatacagaagatctattaaaaatgttttaaatggaaaatgtactctagaccacaggactaatgtaaattaatatacagtcattcattatttgttgaagttgatagaatttttgaagtgtaaacttgtgtctgaatgttttatttgttctttagctgaagttttgcaatttttatgtcaaaattcaattgctattaaacaagttgagatccagttataaattaaccttgtttttagtagatgacatttatttcaataaaagttgcaaatcgggcttaat

SEQ ID NO: 366592 - DNA, 2235 bp, Homo sapiens
gtcgggatgagtggcggagggacagagacccctgtgggttgtgaggccgccccgggcggtggcagcaagaagagggactccctggggactgcgggctcagcgcacctcattatcaaggatcttggagaaattcattcaaggcttttggatcacagaccagttattcaaggtgaaactcgttattttgtaaaagaatttgaagaaaaacgtggtcttcgagaaatgcgagttcttgaaaatttgaagaacatgatccatgaaacaaatgaacatactcttcccaaatgtagagacacaatgcgggacagcctcagccaggttctccagagattgcaagcagctaatgactcagtctgtagactccaacagagggaacaggaacgaaaaaagattcatagtgaccacttagtagctagtgagaaacagcatatgctccagtgggacaacttcatgaaggagcaacccaacaaaagggctgaagtggatgaagagcacagaaaagccatggaaaggcttaaagaacaatatgctgagatggagaaggacctagcgaaattttcaaccttttaagaacttgaaccacaacaatcacaaactaatgagaagatgttcacctctctcctgaaaactattcccaccagaccgtttagcctctgcttcaagcttagcaatatattcagtggcactcttatatcagaagaaagaagtttctactggcattctgattggatatttaaagaagggtgccacatttttccagctttaagtgcctatatatgattatttgaatgaagaggagtaggaaggaaaatggaatcaatatactctttgttagtcagaattgatcatcttttccattgattagctcagagaactgtaggtatagacttcttagaaagataatttcattcatttctatacagggttaacaatagtttattattgtggcttaatgggaaggtatagaagctacctgtcatagcctccttggctgttggaaggatgtataaagtgttactgcatgagtaatgtagacaaaaaaaaaagccagctgtccttggagcagagatcacatttcagagaggtgagagtgaacacattgtctctgctgtggcaaagatggccacgctggtgtttgagctgcctcttgggaagcgttgcatattttacagtgcagcataatgccatgggcttccgtggatgggaagacacatgttaagttttgtggccttccagcacttactattttcagctttttaaagcatgcttagaaggaaaagcttaccaaaaatatattttgacatttagtttttccaagagctgtaatcttgcccatagtatttacctcatttttgtgtctgttttgctgtgggtaagctttataagataaataatgtctatacatgtttcgactgtttaatgagtaatcaacaaaatctgccagagagtccctctggaaccgtataaagttcctggctttgaatgaaccagaagtgtttgcccacacagcaaatggtccatgttaaatgtaaatcctttttagtgttaatgtctgttctcataagcaggtatattatgatgaaacatgtaccagttctgtcatcactgtgatctttaaaaacctgcatttaacagtctaatttgaggctgggtgcagtggctcacacctgtaatctcaacactttgggaggccgaggcaggcggatcatttgaagtcaggagttcaagcctagcctggccaacatggggaaaccccgtctctactaaaaatacaaaaattagcccggcatgttggtgcacgcttgtaatcccagctactcaggagtctgaggcacgagaatcacctgaactcaggaggcggaggttgcggtgagctgagatggcaccactgcactccagcttgggtgacagagtgagactccatctcaacaaaaaaaaaatctaactgaagaactaagttgattttttatttgccataaaccaagcaaaagtaaatgcaataatttcgagatttatggtaaacaaatttgaggtatggataaatctttcacatattttttattgctctttagtaaagaaaggcacaagaaagaaaatatccagctctcttgtgttatctcagtgtggcgactgcagaaaattgacaatgcctgcctgtgtaaatgtatggcttactgtcaaagcttcattcttggctgcatgttgaaaatgtgattaaagttaatagaggagatg

SEQ ID NO: 366593 - DNA, 1581 bp, Homo sapiens
agaagcagtgaagattctccctggtaacaacttaagtaaatcaagccaacaaatacgagtccaaataaacatttaatgagaaaatactgcctactttttaattttattgttaatatccttttgtattctgtaataattactgcatgtggagtgatttatccttcacctttggtgatctggtaacttagcagaatgcttgtctgcagaacaggtatgtgctaaatgctgaaaagccaaggacattcatctcactaaaaatgtctcccaacaagcaggctgctggggggtttgtagcgcttgtagggtggctgagttatttctttctgcaaacactcctgtcagcattatagagacttgcactatctgttaagtaaatgtgacttaggagaaggaacgacaccacccattcatggggtcatggctgcaagttactgccctactggttttctctttacctgataactctcaataattctaaagtttatcttagagaaaagtctttgagtcacctattttggaatttgagcccagtgaaatgataagcacctgcagtttgtatcacgtctctctctaaccaaatctctgagcattcttgtagcttgatagcaaattgggtgaactgctccattcactaaaagattgagttcagctttattgcaaacagaattatgaaggtctgttctcatgcatttactcagcctccttcatctgagtcacacaccactggaagtagcccctccttatattaagcaatattgacttgaaatggatcatttcctttttttaggtttactaaagaataccagagaaagaactgtatcttaatctatcttcctttccaatgaagtaaaaaacaaattatttgacctccaaatcctcagttaatgtaaattttgcatttgttgaaaacttggtatttcgcaggaaggacatcaggttttgtactgaacataacattgaacacgaagaacctttataagtcagtgttcactgggctgaaacttttactcctatctgaatatgttggcttttgagagctcttgggggattgatgttgttttttcaacttctatctcctacttaagtgatattaacagttgtgcttatgtaacatctgtgttgtgtgtgtatgtttttaatctctacttagttgacctgacagttcaagaaaaggagaaatatcttaatgtgtctcgctggttttgtcacattcagcattatccaggcatcaggcaacatctgtctagtgttgtcttcatcaagaacagactatatactaattcccactagaagctgtccatgccatacagaagatctattaaaaatgttttaaatggaaaatgtactctagaccacaggactaatgtaaattaatatacagtcattcattatttgttgaagttgatagaatttttgaagtgtaaacttgtgtctgaatgttttatttgttctttagctgaagttttgcaatttttatgtcaaaattcaattgctattaaacaagttgagatccagttataaattaaccttgtttttagtagatgacatttatttcaataaaagttgcaaatcgggcttaat

SEQ ID NO: 366594 - DNA, 874 bp, Homo sapiens
ggacttctgtttccaccaatgcgggaggttcttgttctgcaggtctggcgtctgccaggagctacggccggaagatggcggcggccgcagagttgtcgctactggagaagtccctgggactgagtaaggggaataaatacagtgctcagggcgagcgacagattccagttcttcagacaaacaatggtccaagtctaacaggattgactactatagcagctcatctagtcaagcaagccaacaaagaatatttgctggggagtactgcagaagaaaaagcaatcgttcagcagtggttagaatacagggtcactcaagtagatgggcactccagtaaaaatgacatccacacactgttgaaggatcttaattcatatcttgaagataaagtctaccttacagggtataactttacattagcagatatactattgtactatggacttcatcgctttatagtgagtatttgtatagttactggctttttttctgtagtgttgagaatgatttttaaaactttgtcttgaatttaaatcagatttgcatttttggcttatcaaataaaaatgaaaggaattcctttatacaaggtgccttttgtaacaaccctgcacgttgtgcacatgtaccctaaaacttaaagtataataataataaaattaaaaaaaactttgtcttgaatttaaatcagatttgcattttcagcttatcagataaaaatgaaaggaattcctttcagttgcttccttttccttgaccttgatttttttcctatgcttctgcccttcttcagcagtgacttctccagccacactttaggttttgtcatcatcccctgggccccatattcctaccattccacctctagatctta

SEQ ID NO: 366595 - DNA, 761 bp, Homo sapiens
  misc_feature (9)..(9): n is a, c, g, or t
  misc_feature (13)..(13): n is a, c, g, or t
  misc_feature (25)..(25): n is a, c, g, or t
cctttgggnttcnttattttttctnaactccatctcaacaaaaaaaaaatctaactgaagaactaagttgattttttatttgccataaaccaagcaaaagtaaatgcaataatttcgagatttatggtaaacaaatttgaggtatggataaatctttcacatattttttattgctctttagtaaagaaaggcacaagaaagaaaatatccagctctcttgtgttatctcagtgtggcgactgcagaaaattgacaatgcctgcctgtgtaaatgtatggcttactgtcaaagcttcattcttggctgcatgttgaaaatgtgattaaagttaatagaggagatgaaataagtatttgagatttttttcaataacactgaacttctgccaactttctctatccgctactgtaggcttgacaggctcatcaatcatttgctggtacctggactaaaaagcgcacttgctgacaccaaggcatgttggaattttcttaattcagtggatggaaaaagaaatacttccaaaaatatcccacacatgaaaagggaggggagccttaaatgaaaattccctttgtaccgtagacactttttggaatgcgattaattgccaacacatcattgaacgaatgctgtaaccaagaaattaagattgtgtgtgtgaagggaatatattcttaactgtggctacccaacttgtatagcaaagatttctgatagtttgtgttcatctcatgtgaataataaatactttacccta

SEQ ID NO: 366596 - DNA, 654 bp, Homo sapiens
aactctagaggtcccctgatgcatttagacctagtgatagagcatttcatgttaaaatgaattatttttgaccaagtgaggtacatttctattgatacaagtcatgcccctaaaagatagatgttatacagagtagcagtgaattaagaaatgtttcctctaaaagataaatataaaatttccaccatttgataccctaaacagtttaattttaattatagaatgttcatctacaaagtatctagaggaggcttttgctttattccatttctgccaaacttaagagaaaatgtactgatgaagggaaacatatccacattggaaaacatttgactgtctaaatgcaatcagattgcatttagacattcagcattatccaggcatcaggcaacatctgtctagtgttgtcttcatcaagaacagactatatactaattcccactagaagctgtccatgccatacagaagatctattaaaaatgttttaaatggaaaatgtactctagaccacaggactaatgtaaattaatatacagtcattcattatttgttgaagttgatagaatttttgaagtgtaaacttgtgtctgaatgcaatcatacttcataaacagccccaccaagaaagaaaatcgcgatcccgatataaccatt

SEQ ID NO: 366597 - DNA, 1267 bp, Homo sapiens
ggacttctgtttccaccaatgcgggaggttcttgttctgcaggtctggcgtctgccaggagctacggccggaagatggcggcggccgcagagttgtcgctactggagaagtccctgggactgagtaaggggaataaatacagtgctcagggcgagcgacagattccagttcttcagacaaacaatggtccaagtctaacaggattgactactatagcagctcatctagtcaagcaagccaacaaagaatatttgctggggagtactgcagaagaaaaagcaatcgttcagcagtggttagaatacagggtcactcaagtagatgggcactccagtaaaaatgacatccacacactgttgaaggatcttaattcatatcttgaagataaagtctaccttacagggtataactttacattagcagatatactattgtactatggacttcatcgctttatagttgacctgacagttcaagaaaaggagaaatatcttaatgtgtctcgctggttttgtcacattcagcattatccaggcatcaggcaacatctgtctagtgttgtcttcatcaagaacagactatatactaattcccactagaagctgtccatgccatacagaagatctattaaaaatgttttaaatggaaaatgtactctagaccacaggactaatgtaaattaatatacagtcattcattatttgttgaagttgatagaatttttgaagtgtaaacttgtgtctgaatgttttatttgttctttagctgaagttttgcaatttttatgtcaaaattcaattgctattaaacaagttgagatccagttataaattaaccttgtttttagtagatgacatttatttcaataaaagttgcaaatcgggcttaataaaaaaaaaaaaaaaaaaaaaaaaaaaaaaaaaaaaaaacaaaaaaaaaaaaaaaaaagaaaaaaaaaaaaaggggggggggggtaaaaaatttccccggggggggccaaagttaatgacgtgacacccggttttgtggtgtaaaaggggcgccaaaatagagggggagtaatataagagagagagcagacggggcggtgttataaacagttgttgtgtggtggagaaacttgtgtgtgggatattattgggaaaagacccccttcttgtggggtgaattgtggacacacctagagagaatttaagccaggaaattaacttagggtgtatggtggtaacgcgatattgtggaaaatttgtcagattgttgaaatagg

SEQ ID NO: 366598 - DNA, 1002 bp, Homo sapiens
  misc_feature (51)..(51): n is a, c, g, or t
  misc_feature (59)..(59): n is a, c, g, or t
  misc_feature (66)..(66): n is a, c, g, or t
gatgtgtatttgtcatagagtattattttgcgagagcgatggagagctcantagccacntcttcanactctattccagttcttcagacaaacaatggtccaagtctaacaggattgactactatagcagctcatctagtcaagcaagccaacaaagaatatttgctggggagtactgcagaagaaaaagcaatcgttcagcagtggttagaatacagggtcactcaagtagatgggcactccagtaaaaatgacatccacacactgttgaaggatcttaattcatatcttgaagataaagtctaccttacagggtataactttacattagcagatatactattgtactatggacttcatcgctttatagttgacctgacagttcaagaaaaggagaaatatcttaatgtgtctcgctggttttgtcacattcagcattatccaggcatcaggcaacatctgtctagtgttgtcttcatcaagaacagactatatactaattcccactagaagctgtccatgccatacagaagatctattaaaaatgttttaaatggaaaatgtactctagaccacaggactaatgtaaattaatatacagtcattcattatttgttgaagttgatagaatttttgaagtgtaaacttgtgtctgaatgttttatttgttctttagctgaagttttgcaatttttatgtcaaaattcaattgctattaaacaagttgagatccagttataaattaaccttgtttttagtagatgacatttatttcaataaaagttgcaaatcgggcttaatcttaaaattggtggtcatttcaatggttgacatatttggctatttattaacctctctttcatattctaaaattcattttccccttatggatatttatggtagtttgttaagaactgataaattgtgccaaggaagccaaaagggaagacagatggatttgttttaaaatatttatgtgagctagtaaatgtggttgaaaaaa

SEQ ID NO: 366599 - DNA, 1006 bp, Homo sapiens
gagaagtaggaaggaaaggagagaggggaagaaaaaatttgaaaaaaaaataaaaactagtaaccacttttacagattccagttcttcagacaaacaatggtccaagtctaacaggattgactactatagcagctcatctagtcaagcaagccaacaaagaatatttgctggggagtactgcagaagaaaaagcaatcgttcagcagtggttagaatacagggtcactcaagtagatgggcactccagtaaaaatgacatccacacactgttgaaggatcttaattcatatcttgaagataaagtctaccttacagggtataactttacattagcagatatactattgtactatggacttcatcgctttatagttgacctgacagttcaagaaaaggagaaatatcttaatgtgtctcgctggttttgtcacattcagcattatccaggcatcaggcaacatctgtctagtgttgtcttcatcaagaacagactatatactaattcccactagaagctgtccatgccatacagaagatctattaaaaatgttttaaatggaaaatgtactctagaccacaggactaatgtaaattaatatacagtcattcattatttgttgaagttgatagaatttttgaagtgtaaacttgtgtctgaatgttttatttgttctttagctgaagttttgcaatttttatgtcaaaattcaattgctattaaacaagttgagatccagttataaattaaccttgtttttagtagatgacatttatttcaataaaagttgcaaatcgggcttaatcttaaaattggtggtcatttcaatggttgacatatttggctatttattaacctctctttcatattctaaaattcattttccccttatggatatttatggtagtttgttaagaactgataaattgtgccaaggaagccaaaagggaagacagatggatttgttttaaaatatttatgtgagctagtaaatgtggttgaaaaaa

SEQ ID NO: 366600 - DNA, 1017 bp, Homo sapiens
gtagtagtgacaagtgttaaaagaagtgcggcaatgttttgtgtatatttattatccatttgtttcatcaaactttgggcccaaggattccagttcttcagacaaacaatggtccaagtctaacaggattgactactatagcagctcatctagtcaagcaagccaacaaagaatatttgctggggagtactgcagaagaaaaagcaatcgttcagcagtggttagaatacagggtcactcaagtagatgggcactccagtaaaaatgacatccacacactgttgaaggatcttaattcatatcttgaagataaagtctaccttacagggtataactttacattagcagatatactattgtactatggacttcatcgctttatagttgacctgacagttcaagaaaaggagaaatatcttaatgtgtctcgctggttttgtcacattcagcattatccaggcatcaggcaacatctgtctagtgttgtcttcatcaagaacagactatatactaattcccactagaagctgtccatgccatacagaagatctattaaaaatgttttaaatggaaaatgtactctagaccacaggactaatgtaaattaatatacagtcattcattatttgttgaagttgatagaatttttgaagtgtaaacttgtgtctgaatgttttatttgttctttagctgaagttttgcaatttttatgtcaaaattcaattgctattaaacaagttgagatccagttataaattaaccttgtttttagtagatgacatttatttcaataaaagttgcaaatcgggcttaatcttaaaattggtggtcatttcaatggttgacatatttggctatttattaacctctctttcatattctaaaattcattttccccttatggatatttatggtagtttgttaagaactgataaattgtgccaaggaagccaaaagggaagacagatggatttgttttaaaatatttatgtgagctagtaaatgtggttgaaaaaa

SEQ ID NO: 366601 - DNA, 2652 bp, Homo sapiens
gtcgggatgagtggcggagggacagagacccctgtgggttgtgaggccgccccgggcggtggcagcaagaagagggactccctggggactgcgggctcagcgcacctcattatcaaggatcttggagaaattcattcaaggcttttggatcacagaccagttattcaaggtgaaactcgttattttgtaaaagaatttgaagaaaaacgtggtcttcgagaaatgcgagttcttgaaaatttgaagaacatgatccatgaaacaaatgaacatactcttcccaaatgtagagacacaatgcgggacagcctcagccaggttctccagagattgcaagcagctaatgactcagtctgtagactccaacagagggaacaggaacgaaaaaagattcatagtgaccacttagtagctagtgagaaacagcatatgctccagtgggacaacttcatgaaggagcaacccaacaaaagggctgaagtggatgaagagcacagaaaagccatggaaaggcttaaagaacaatatgctgagatggagaaggacctagcgaaattttcaaccttttaagaacttgaaccacaacaatcacaaactaatgagaagatgttcacctctctcctgaaaactattcccaccagaccgtttagcctctgcttcaagcttagcaatatattcagtggcactcttatatcagaagaaagaagtttctactggcattctgattggatatttaaagaagggtgccacatttttccagctttaagtgcctatatatgattatttgaatgaagaggagtaggaaggaaaatggaatcaatatactctttgttagtcagaattgatcatcttttccattgattagctcagagaactgtaggtatagacttcttagaaagataatttcattcatttctatacagggttaacaatagtttattattgtggcttaatgggaaggtatagaagctacctgtcatagcctccttggctgttggaaggatgtataaagtgttactgcatgagtaatgtagacaaaaaaaaaagccagctgtccttggagcagagatcacatttcagagaggtgagagtgaacacattgtctctgctgtggcaaagatggccacgctggtgtttgagctgcctcttgggaagcgttgcatattttacagtgcagcataatgccatgggcttccgtggatgggaagacacatgttaagttttgtggccttccagcacttactattttcagctttttaaagcatgcttagaaggaaaagcttaccaaaaatatattttgacatttagtttttccaagagctgtaatcttgcccatagtatttacctcatttttgtgtctgttttgctgtgggtaagctttataagataaataatgtctatacatgtttcgactgtttaatgagtaatcaacaaaatctgccagagagtccctctggaaccgtataaagttcctggctttgaatgaaccagaagtgtttgcccacacagcaaatggtccatgttaaatgtaaatcctttttagtgttaatgtctgttctcataagcaggtatattatgatgaaacatgtaccagttctgtcatcactgtgatctttaaaaacctgcatttaacagtctaatttgaggctgggtgcagtggctcacacctgtaatctcaacactttgggaggccgaggcaggcggatcatttgaagtcaggagttcaagcctagcctggccaacatggggaaaccccgtctctactaaaaatacaaaaattagcccggcatgttggtgcacgcttgtaatcccagctactcaggagtctgaggcacgagaatcacctgaactcaggaggcggaggttgcggtgagctgagatggcaccactgcactccagcttgggtgacagagtgagactccatctcaacaaaaaaaaaatctaactgaagaactaagttgattttttatttgccataaaccaagcaaaagtaaatgcaataatttcgagatttatggtaaacaaatttgaggtatggataaatctttcacatattttttattgctctttagtaaagaaaggcacaagaaagaaaatatccagctctcttgtgttatctcagtgtggcgactgcagaaaattgacaatgcctgcctgtgtaaatgtatggcttactgtcaaagcttcattcttggctgcatgttgaaaatgtgattaaagttaatagaggagatgaaataagtatttgagatttttttcaataacactgaacttctgccaactttctctatccgctactgtaggcttgacaggctcatcaatcatttgctggtacctggactaaaaagcgcacttgctgacaccaaggcatgttggaattttcttaattcagtggatggaaaaagaaatacttccaaaaatatcccacacatgaaaagggaggggagccttaaatgaaaattccctttgtaccgtagacactttttggaatgcgattaattgccaacacatcattgaacgaatgctgtaaccaagaaattaagattgtgtgtgtgaagggaatatattcttaactgtggctacccaacttgtatagcaaagatttctgatagtttgtgttcatctcatgtgaataataaatactttacccta

SEQ ID NO: 366602 - DNA, 2992 bp, Homo sapiens
ggacttctgtttccaccaatgcgggaggttcttgttctgcaggtctggcgtctgccaggagctacggccggaagatggcggcggccgcagagttgtcgctactggagaagtccctgggactgagtaaggggaataaatacagtgctcagggcgagcgacagattccagttcttcagacaaacaatggtccaagtctaacaggattgactactatagcagctcatctagtcaagcaagccaacaaagaatatttgctggggagtactgcagaagaaaaagcaatcgttcagcagtggttagaatacagggtcactcaagtagatgggcactccagtaaaaatgacatccacacactgttgaaggatcttaattcatatcttgaagataaagtctaccttacagggtataactttacattagcagatatactattgtactatggacttcatcgctttataatcttggagaaattcattcaaggcttttggatcacagaccagttattcaaggtgaaactcgttattttgtaaaagaatttgaagaaaaacgtggtcttcgagaaatgcgagttcttgaaaatttgaagaacatgatccatgaaacaaatgaacatactcttcccaaatgtagagacacaatgcgggacagcctcagccaggttctccagagattgcaagcagctaatgactcagtctgtagactccaacagagggaacaggaacgaaaaaagattcatagtgaccacttagtagctagtgagaaacagcatatgctccagtgggacaacttcatgaaggagcaacccaacaaaagggctgaagtggatgaagagcacagaaaagccatggaaaggcttaaagaacaatatgctgagatggagaaggacctagcgaaattttcaaccttttaagaacttgaaccacaacaatcacaaactaatgagaagatgttcacctctctcctgaaaactattcccaccagaccgtttagcctctgcttcaagcttagcaatatattcagtggcactcttatatcagaagaaagaagtttctactggcattctgattggatatttaaagaagggtgccacatttttccagctttaagtgcctatatatgattatttgaatgaagaggagtaggaaggaaaatggaatcaatatactctttgttagtcagaattgatcatcttttccattgattagctcagagaactgtaggtatagacttcttagaaagataatttcattcatttctatacagggttaacaatagtttattattgtggcttaatgggaaggtatagaagctacctgtcatagcctccttggctgttggaaggatgtataaagtgttactgcatgagtaatgtagacaaaaaaaaaagccagctgtccttggagcagagatcacatttcagagaggtgagagtgaacacattgtctctgctgtggcaaagatggccacgctggtgtttgagctgcctcttgggaagcgttgcatattttacagtgcagcataatgccatgggcttccgtggatgggaagacacatgttaagttttgtggccttccagcacttactattttcagctttttaaagcatgcttagaaggaaaagcttaccaaaaatatattttgacatttagtttttccaagagctgtaatcttgcccatagtatttacctcatttttgtgtctgttttgctgtgggtaagctttataagataaataatgtctatacatgtttcgactgtttaatgagtaatcaacaaaatctgccagagagtccctctggaaccgtataaagttcctggctttgaatgaaccagaagtgtttgcccacacagcaaatggtccatgttaaatgtaaatcctttttagtgttaatgtctgttctcataagcaggtatattatgatgaaacatgtaccagttctgtcatcactgtgatctttaaaaacctgcatttaacagtctaatttgaggctgggtgcagtggctcacacctgtaatctcaacactttgggaggccgaggcaggcggatcatttgaagtcaggagttcaagcctagcctggccaacatggggaaaccccgtctctactaaaaatacaaaaattagcccggcatgttggtgcacgcttgtaatcccagctactcaggagtctgaggcacgagaatcacctgaactcaggaggcggaggttgcggtgagctgagatggcaccactgcactccagcttgggtgacagagtgagactccatctcaacaaaaaaaaaatctaactgaagaactaagttgattttttatttgccataaaccaagcaaaagtaaatgcaataatttcgagatttatggtaaacaaatttgaggtatggataaatctttcacatattttttattgctctttagtaaagaaaggcacaagaaagaaaatatccagctctcttgtgttatctcagtgtggcgactgcagaaaattgacaatgcctgcctgtgtaaatgtatggcttactgtcaaagcttcattcttggctgcatgttgaaaatgtgattaaagttaatagaggagatgaaataagtatttgagatttttttcaataacactgaacttctgccaactttctctatccgctactgtaggcttgacaggctcatcaatcatttgctggtacctggactaaaaagcgcacttgctgacaccaaggcatgttggaattttcttaattcagtggatggaaaaagaaatacttccaaaaatatcccacacatgaaaagggaggggagccttaaatgaaaattccctttgtaccgtagacactttttggaatgcgattaattgccaacacatcattgaacgaatgctgtaaccaagaaattaagattgtgtgtgtgaagggaatatattcttaactgtggctacccaacttgtatagcaaagatttctgatagtttgtgttcatctcatgtgaataataaatactttacccta

SEQ ID NO: 366603 - DNA, 1783 bp, Homo sapiens
agaagcagtgaagattctccctggtaacaacttaagtaaatcaagccaacaaatacgagtccaaataaacatttaatgagaaaatactgcctactttttaattttattgttaatatccttttgtattctgtaataattactgcatgtggagtgatttatccttcacctttggtgatctggtaacttagcagaatgcttgtctgcagaacaggtatgtgctaaatgctgaaaagccaaggacattcatctcactaaaaatgtctcccaacaagcaggctgctggggggtttgtagcgcttgtagggtggctgagttatttctttctgcaaacactcctgtcagcattatagagacttgcactatctgttaagtaaatgtgacttaggagaaggaacgacaccacccattcatggggtcatggctgcaagttactgccctactggttttctctttacctgataactctcaataattctaaagtttatcttagagaaaagtctttgagtcacctattttggaatttgagcccagtgaaatgataagcacctgcagtttgtatcacgtctctctctaaccaaatctctgagcattcttgtagcttgatagcaaattgggtgaactgctccattcactaaaagattgagttcagctttattgcaaacagaattatgaaggtctgttctcatgcatttactcagcctccttcatctgagtcacacaccactggaagtagcccctccttatattaagcaatattgacttgaaatggatcatttcctttttttaggtttactaaagaataccagagaaagaactgtatcttaatctatcttcctttccaatgaagtaaaaaacaaattatttgacctccaaatcctcagttaatgtaaattttgcatttgttgaaaacttggtatttcgcaggaaggacatcaggttttgtactgaacataacattgaacacgaagaacctttataagtcagtgttcactgggctgaaacttttactcctatctgaatatgttggcttttgagagctcttgggggattgatgttgttttttcaacttctatctcctacttaagtgatattaacagttgtgcttatgtaacatctgtgttgtgtgtgtatgtttttaatctctacttagttgacctgacagttcaagaaaaggagaaatatcttaatgtgtctcgctggttttgtcacattcagcattatccaggcatcaggcaacatctgtctagtgttgtcttcatcaagaacagactatatactaattcccactagaagctgtccatgccatacagaagatctattaaaaatgttttaaatggaaaatgtactctagaccacaggactaatgtaaattaatatacagtcattcattatttgttgaagttgatagaatttttgaagtgtaaacttgtgtctgaatgttttatttgttctttagctgaagttttgcaatttttatgtcaaaattcaattgctattaaacaagttgagatccagttataaattaaccttgtttttagtagatgacatttatttcaataaaagttgcaaatcgggcttaatcttaaaattggtggtcatttcaatggttgacatatttggctatttattaacctctctttcatattctaaaattcattttccccttatggatatttatggtagtttgttaagaactgataaattgtgccaaggaagccaaaagggaagacagatggatttgttttaaaatatttatgtgagctagtaaatgtggttgaaaaaa

SEQ ID NO: 366604 - DNA, 690 bp, Homo sapiens
cactcctatatcctccactgcgcctgtagatgtgtgttcctccacgaataattattgttgacctgacagttcaagaaaaggagaaatatcttaatgtgtctcgctggttttgtcacattcagcattatccaggcatcaggcaacatctgtctagtgttgtcttcatcaagaacagactatatactaattcccactagaagctgtccatgccatacagaagatctattaaaaatgttttaaatggaaaatgtactctagaccacaggactaatgtaaattaatatacagtcattcattatttgttgaagttgatagaatttttgaagtgtaaacttgtgtctgaatgttttatttgttctttagctgaagttttgcaatttttatgtcaaaattcaattgctattaaacaagttgagatccagttataaattaaccttgtttttagtagatgacatttatttcaataaaagttgcaaatcgggcttaatcttaaaattggtggtcatttcaatggttgacatatttggctatttattaacctctctttcatattctaaaattcattttccccttatggatatttatggtagtttgttaagaactgataaattgtgccaaggaagccaaaagggaagacagatggatttgttttaaaatatttatgtgagctagtaaatgtggttgaaaaaa

SEQ ID NO: 366605 - DNA, 2598 bp, Homo sapiens
gtcgggatgagtggcggagggacagagacccctgtgggttgtgaggccgccccgggcggtggcagcaagaagagggactccctggggactgcgggctcagcgcacctcattatcaaggatcttggagaaattcattcaaggcttttggatcacagaccagttattcaaggtgaaactcgttattttgtaaaagaatttgaagaaaaacgtggtcttcgagaaatgcgagttcttgaaaatttgaagaacatgatccatgaaacaaatgaacatactcttcccaaatgtagagacacaatgcgggacagcctcagccaggttctccagagattgcaagcagctaatgactcagtctgtagactccaacagagggaacaggaacgaaaaaagattcatagtgaccacttagtagctagtgagaaacagcatatgctccagtgggacaacttcatgaaggagcaacccaacaaaagggctgaagtggatgaagagcacagaaaagccatggaaaggcttaaagaacaatatgctgagatggagaaggacctagcgaaattttcaaccttttaagaacttgaaccacaacaatcacaaactaatgagaagatgttcacctctctcctgaatggcactcttatatcagaagaaagaagtttctactggcattctgattggatatttaaagaagggtgccacatttttccagctttaagtgcctatatatgattatttgaatgaagaggagtaggaaggaaaatggaatcaatatactctttgttagtcagaattgatcatcttttccattgattagctcagagaactgtaggtatagacttcttagaaagataatttcattcatttctatacagggttaacaatagtttattattgtggcttaatgggaaggtatagaagctacctgtcatagcctccttggctgttggaaggatgtataaagtgttactgcatgagtaatgtagacaaaaaaaaaagccagctgtccttggagcagagatcacatttcagagaggtgagagtgaacacattgtctctgctgtggcaaagatggccacgctggtgtttgagctgcctcttgggaagcgttgcatattttacagtgcagcataatgccatgggcttccgtggatgggaagacacatgttaagttttgtggccttccagcacttactattttcagctttttaaagcatgcttagaaggaaaagcttaccaaaaatatattttgacatttagtttttccaagagctgtaatcttgcccatagtatttacctcatttttgtgtctgttttgctgtgggtaagctttataagataaataatgtctatacatgtttcgactgtttaatgagtaatcaacaaaatctgccagagagtccctctggaaccgtataaagttcctggctttgaatgaaccagaagtgtttgcccacacagcaaatggtccatgttaaatgtaaatcctttttagtgttaatgtctgttctcataagcaggtatattatgatgaaacatgtaccagttctgtcatcactgtgatctttaaaaacctgcatttaacagtctaatttgaggctgggtgcagtggctcacacctgtaatctcaacactttgggaggccgaggcaggcggatcatttgaagtcaggagttcaagcctagcctggccaacatggggaaaccccgtctctactaaaaatacaaaaattagcccggcatgttggtgcacgcttgtaatcccagctactcaggagtctgaggcacgagaatcacctgaactcaggaggcggaggttgcggtgagctgagatggcaccactgcactccagcttgggtgacagagtgagactccatctcaacaaaaaaaaaatctaactgaagaactaagttgattttttatttgccataaaccaagcaaaagtaaatgcaataatttcgagatttatggtaaacaaatttgaggtatggataaatctttcacatattttttattgctctttagtaaagaaaggcacaagaaagaaaatatccagctctcttgtgttatctcagtgtggcgactgcagaaaattgacaatgcctgcctgtgtaaatgtatggcttactgtcaaagcttcattcttggctgcatgttgaaaatgtgattaaagttaatagaggagatgaaataagtatttgagatttttttcaataacactgaacttctgccaactttctctatccgctactgtaggcttgacaggctcatcaatcatttgctggtacctggactaaaaagcgcacttgctgacaccaaggcatgttggaattttcttaattcagtggatggaaaaagaaatacttccaaaaatatcccacacatgaaaagggaggggagccttaaatgaaaattccctttgtaccgtagacactttttggaatgcgattaattgccaacacatcattgaacgaatgctgtaaccaagaaattaagattgtgtgtgtgaagggaatatattcttaactgtggctacccaacttgtatagcaaagatttctgatagtttgtgttcatctcatgtgaataataaatactttacccta

SEQ ID NO: 366606 - DNA, 610 bp, Homo sapiens
ggacttctgtttccaccaatgcgggaggttcttgttctgcaggtctggcgtctgccaggagctacggccggaagatggcggcggccgcagagttgtcgctactggagaagtccctgggactgagtaaggggaataaatacagtgctcagggcgagcgacagattccagttcttcagacaaacaatggtccaagtctaacaggattgactactatagcagctcatctagtcaagcaagccaacaaagaatatttgctggggagtactgcagaagaaaaagcaatcgttcagcagtggttagaatacagggtcactcaagtagatgggcactccagtaaaaatgacatccacacactgttgaaggatcttaattcatatcttgaagataaagtctaccttacagggtataactttacattagcagatatactattgtactatggacttcatcgctttataataaggaagctgaggcacacagaggtagggaactaacccaacatcatacaaggaactgagatcaaggaactgagattcaaacacaaatgtctggctcaaacttacctgtaaactactctacatggagtgccataaaattctgcttaattaac

SEQ ID NO: 366607 - DNA, 328 bp, Homo sapiens
aatatttatttgttttttcttttttctaggatcttaattcatatcttgaagataaagtctaccttacagggtataactttacattagcagatatactattgtactatggacttcatcgctttatagtgagtatttgtatagttactggctttttttctgtagtgttgagaatgatttttaaaactttgtcttgaatttaaatcagatttgcatttttggcttatcaaataaaaatgaaaggaattcctttatacaaggtgccttttgtaacaaccctgcacgttgtgcacatgtaccctaaaacttaaagtataataataataaaatt

SEQ ID NO: 366608 - DNA, 1092 bp, Homo sapiens
ggacttctgtttccaccaatgcgggaggttcttgttctgcaggtctggcgtctgccaggagctacggccggaagatggcggcggccgcagagttgtcgctactggagaagtccctgggactgagtaaggggaataaatacagtgctcagggcgagcgacagattccagttcttcagacaaacaatggtccaagtctaacaggattgactactatagcagctcatctagtcaagcaagccaacaaagaatatttgctggggagtactgcagaagaaaaagcaatcgttcagcagtggttagaatacagggtcactcaagtagatgggcactccagtaaaaatgacatccacacactgttgaaggatcttaattcatatcttgaagataaagtctaccttacagggtataactttacattagcagatatactattgtactatggacttcatcgctttatagttgacctgacagttcaagaaaaggagaaatatcttaatgtgtctcgctggttttgtcacattcagcattatccaggcatcaggcaacatctgtctagtgttgtcttcatcaagaacagactatatactaattcccactagaagctgtccatgccatacagaagatctattaaaaatgttttaaatggaaaatgtactctagaccacaggactaatgtaaattaatatacagtcattcattatttgttgaagttgatagaatttttgaagtgtaaacttgtgtctgaatgttttatttgttctttagctgaagttttgcaatttttatgtcaaaattcaattgctattaaacaagttgagatccagttataaattaaccttgtttttagtagatgacatttatttcaataaaagttgcaaatcgggcttaatcttaaaattggtggtcatttcaatggttgacatatttggctatttattaacctctctttcatattctaaaattcattttccccttatggatatttatggtagtttgttaagaactgataaattgtgccaaggaagccaaaagggaagacagatggatttgttttaaaatatttatgtgagctagtaaatgtggttgaaaaaa

SEQ ID NO: 366609 - DNA, 1175 bp, Homo sapiens
ggacttctgtttccaccaatgcgggaggttcttgttctgcaggtctggcgtctgccaggagctacggccggaagatggcggcggccgcagagttgtcgctactggagaagtccctgggactgagtaaggggaataaatacagtgctcagggcgagcgacagattccagttcttcagacaaacaatggtccaagtctaacaggattgactactatagcagctcatctagtcaagcaagccaacaaagaatatttgctggggagtactgcagaagaaaaagcaatcgttcagcagtggttagaatacagggtcactcaagtagatgggcactccagtaaaaatgacatccacacactgttgaaggatcttaattcatatcttgaagataaagtctaccttacagggtataactttacattagcagatatactattgtactatggacttcatcgctttatagttgacctgacagttcaagaaaaggagaaatatcttaatgtgtctcgctggttttgtcacattcagcattatccaggcatcaggcaacatctgtctagtgttgtcttcatcaagaacagactatatactaattcccactagaagctgtccatgccatacagaagatctattaaaaatgttttaaatggaaaatgtactctagaccacaggactaatgtaaattaatatacagtcattcattatttgttgaagttgatagaatttttgaagtgtaaacttgtgtctgaatgttttatttgttctttagctgaagttttgcaatttttatgtcaaaattcaattgctattaaacaagttgagatccagttataaattaaccttgtttttagtagatgacatttatttcaataaaagttgcaaatcgggcttaatcttaaaattggtggtcatttcaatggttgacatatttggctatttattaacctctctttcatattctaaaattcattttccccttatggatatttatggtagtttgttaagaactgataaattgtgccaaggaagccaaaagggaagacagatggatttgttttaaaatatttatgtgagctagtaaatgtggttgaaaaaaaaaacaccacgcagcaccgcccccccccgtaagctgaccaaacgggaactaccacaaaaggcctcggggcctaagggggaact

SEQ ID NO: 366610 - DNA, 1038 bp, Homo sapiens
ggacttctgtttccaccaatgcgggaggttcttgttctgcaggtctggcgtctgccaggagctacggccggaagatggcggcggccgcagagttgtcgctactggagaagtccctgggactgagtaaggggaataaatacagtgctcagggcgagcgacagattccagttcttcagacaaacaatggtccaagtctaacaggattgactactatagcagctcatctagtcaagcaagccaacaaagaatatttgctggggagtactgcagaagaaaaagcaatcgttcagcagtggttagaatacagggtcactcaagtagatgggcactccagtaaaaatgacatccacacactgttgaaggatcttaattcatatcttgaagataaagtctaccttacagggtataactttacattagcagatatactattgtactatggacttcatcgctttatagttgacctgacagttcaagaaaaggagaaatatcttaatgtgtctcgctggttttgtcacattcagcattatccaggcatcaggcaacatctgtctagtgttgtcttcatcaagaacagactatatactaattcccactagaagctgtccatgccatacagaagatctattaaaaatgttttaaatggtttgttgaagttgatagaatttttgaagtgtaaacttgtgtctgaatgttttatttgttctttagctgaagttttgcaatttttatgtcaaaattcaattgctattaaacaagttgagatccagttataaattaaccttgtttttagtagatgacatttatttcaataaaagttgcaaatcgggcttaatcttaaaattggtggtcatttcaatggttgacatatttggctatttattaacctctctttcatattctaaaattcattttccccttatggatatttatggtagtttgttaagaactgataaattgtgccaaggaagccaaaagggaagacagatggatttgttttaaaatatttatgtgagctagtaaatgtggttgaaaaaa

SEQ ID NO: 366611 - DNA, 1113 bp, Homo sapiens
ggccaggtggacaaacattgcaaccatttaaattggaagagtgccacgttgcaccataaatggcagagagaacacctaaggagtcttggcccaatctaggggattcggggaaggcgtttctaaagccttggattatcagtttaagtgttacgacccacagtgaatgcgggaaacatcacaagattccagttcttcagacaaacaatggtccaagtctaacaggattgactactatagcagctcatctagtcaagcaagccaacaaagaatatttgctggggagtactgcagaagaaaaagcaatcgttcagcagtggttagaatacagggtcactcaagtagatgggcactccagtaaaaatgacatccacacactgttgaaggatcttaattcatatcttgaagataaagtctaccttacagggtataactttacattagcagatatactattgtactatggacttcatcgctttatagttgacctgacagttcaagaaaaggagaaatatcttaatgtgtctcgctggttttgtcacattcagcattatccaggcatcaggcaacatctgtctagtgttgtcttcatcaagaacagactatatactaattcccactagaagctgtccatgccatacagaagatctattaaaaatgttttaaatggaaaatgtactctagaccacaggactaatgtaaattaatatacagtcattcattatttgttgaagttgatagaatttttgaagtgtaaacttgtgtctgaatgttttatttgttctttagctgaagttttgcaatttttatgtcaaaattcaattgctattaaacaagttgagatccagttataaattaaccttgtttttagtagatgacatttatttcaataaaagttgcaaatcgggcttaatcttaaaattggtggtcatttcaatggttgacatatttggctatttattaacctctctttcatattctaaaattcattttccccttatggatatttatggtagtttgttaagaactgataaattgtgccaaggaagccaaaagggaagacagatggatttgttttaaaatatttatgtgagctagtaaatgtggttgaaaaaa

SEQ ID NO: 366612 - DNA, 2830 bp, Homo sapiens
gtcgggatgagtggcggagggacagagacccctgtgggttgtgaggccgccccgggcggtggcagcaagaagagggactccctggggactgcgggctcagcgcacctcattatcaaggatcttggagaaattcattcaaggcttttggatcacagaccagttattcaaggtgaaactcgttattttgtaaaagaatttgaagaaaaacgtggtcttcgagaaatgcgagttcttgaaaatttgaagaacatgatccatgaaacaaatgaacatactcttcccaaatgtagagacacaatgcgggacagcctcagccaggttctccagagattgcaagcagctaatgactcagtctgtagactccaacagagggaacaggaacgaaaaaagattcatagtgaccacttagtagctagtgagaaacagcatatgctccagtgggacaacttcatgaaggagcaacccaacaaaagggctgaagtggatgaagagcacagaaaagccatggaaaggcttaaagaacaatatgctgagatggagaaggacctagcgaaattttcaaccttttaagaacttgaaccacaacaatcacaaactaatgagaagatgttcacctctctcctgaaaactattcccaccagaccgtttagcctctgcttcaagcttagcaatatattcagtggcactcttatatcagaagaaagaagtttctactggcattctgattggatatttaaagaagggtgccacatttttccagctttaagtgcctatatatgattatttgaatgaagaggagtaggaaggaaaatggaatcaatatactctttgttagtcagaattgatcatcttttccattgattagctcagagaactgtaggtatagacttcttagaaagataatttcattcatttctatacagggttaacaatagtttattattgtggcttaatgggaaggtatagaagctacctgtcatagcctccttggctgttggaaggatgtataaagtgttactgcatgagtaatgtagacaaaaaaaaaagccagctgtccttggagcagagatcacatttcagagaggtgagagtgaacacattgtctctgctgtggcaaagatggccacgctggtgtttgagctgcctcttgggaagcgttgcatattttacagtgcagcataatgccatgggcttccgtggatgggaagacacatgttaagttttgtggccttccagcacttactattttcagctttttaaagcatgcttagaaggaaaagcttaccaaaaatatattttgacatttagtttttccaagagctgtaatcttgcccatagtatttacctcatttttgtgtctgttttgctgtgggtaagctttataagataaataatgtctatacatgtttcgactgtttaatgagtaatcaacaaaatctgccagagagtccctctggaaccgtataaagttcctggctttgaatgaaccagaagtgtttgcccacacagcaaatggtccatgttaaatgtaaatcctttttagtgttaatgtctgttctcataagcaggtatattatgatgaaacatgtaccagttctgtcatcactgtgatctttaaaaacctgcatttaacagtctaatttgaggctgggtgcagtggctcacacctgtaatctcaacactttgggaggccgaggcaggcggatcatttgaagtcaggagttcaagcctagcctggccaacatggggaaaccccgtctctactaaaaatacaaaaattagcccggcatgttggtgcacgcttgtaatcccagctactcaggagtctgaggcacgagaatcacctgaactcaggaggcggaggttgcggtgagctgagatggcaccactgcactccagcttgggtgacagagtgagactccatctcaacaaaaaaaaaatctaactgaagaactaagttgattttttatttgccataaaccaagcaaaagtaaatgcaataatttcgagatttatggtaaacaaatttgaggtatggataaatctttcacatattttttattgctctttagtaaagaaaggcacaagaaagaaaatatccagctctcttgtgttatctcagtgtggcgactgcagaaaattgacaatgcctgcctgtgtaaatgtatggcttactgtcaaagcttcattcttggctgcatgttgaaaatgtgattaaagttaatagaggagatgaaataagtatttgagatttttttcaataacactgaacttctgccaactttctctatccgctactgtaggcttgacaggctcatcaatcatttgctggtacctggactaaaaagcgcacttgctgacaccaaggcatgttggaattttcttaattcagtggatggaaaaagaaatacttccaaaaatatcccacacatgaaaagggaggggagccttaaatgaaaattccctttgtaccgtagacactttttggaatgcgattaattgccaacacatcattgaacgaatgctgtaaccaagaaattaagattgtgtgtgtgaagggaatatattcttaactgtggctacccaacttgtatagcaaagatttctgatagtttgtgttcatctcatgtgaataataaatactttaccctataagtttgtttattattccataaatacctaagggacttcctaaaccaaaatgaattgatgggctttttgagctttagacattaagatactcaattgtttccttgtaacattttaactattcaacatagcttctataagagttggtttatttaccttccttttgatattcgacatagct

SEQ ID NO: 366613 - DNA, 967 bp, Homo sapiens
ggacttctgtttccaccaatgcgggaggttcttgttctgcaggtctggcgtctgccaggagctacggccggaagatggcggcggccgcagagttgtcgctactggagaagtccctgggactgagtaaggggaataaatacagtgctcagggcgagcgacagattccagttcttcagacaaacaatggtccaagtctaacaggattgactactatagcagctcatctagtcaagcaagccaacaaagaatatttgctggggagtactgcagaagaaaaagcaatcgttcagcagtggttagaatacagggtcactcaagtagatgggcactccagtaaaaatgacatccacacactgttgaaggatcttaattcatatcttgaagataaagtctaccttacagggtataactttacattagcagatatactattgtactatggacttcatcgctttataatcttggagaaattcattcaaggcttttggatcacagaccagttattcaaggtgaaactcgttattttgtaaaagaatttgaagaaaaacgtggtcttcgagaaatgcgagttcttgaaaatttgaagaacatgatccatgaaacaaatgaacatactcttcccaaatgtagagacacaatgcgggacagcctcagccaggttctccagagattgcaagcagctaatgactcagtctgtagactccaacagagggaacaggaacgaaaaaaggtgtggacactgccagcggctgcagccgacttggaatgacctgggagacaaatacaacagcatggaagatgccaaagtctatgtggctaaagtggactgcacggcccactccgacgtgtgctccgcccagggggtgcgaggataccccaccttaaagcttttcaagccaggccaagaagctgtgaagtaccagggtcctcgggacttccagacactggaaaactggatgctgcagac

SEQ ID NO: 366614 - DNA, 992 bp, Homo sapiens
ggacttctgtttccaccaatgcgggaggttcttgttctgcaggtctggcgtctgccaggagctacggccggaagatggcggcggccgcagagttgtcgctactggagaagtccctgggactgagtaaggggaataaatacagtgctcagggcgagcgacagattccagttcttcagacaaacaatggtccaagtctaacaggattgactactatagcagctcatctagtcaagcaagccaacaaagaatatttgctggggagtactgcagaagaaaaagcaatcgttcagcagtggttagaatacagggtcactcaagtagatgggcactccagtaaaaatgacatccacacactgttgaaggttctcactctgtcacccaggctggaatgcaatggcgtaatcttggctcactgcaacctccgcctcctgggttcaagtgattctcgtgcctcagcctcccgagtaaatgggattacaggatcttaattcatatcttgaagataaagtctaccttacagggtataactttacattagcagatatactattgtactatggacttcatcgctttatagtgagtatttgtatagttactggctttttttctgtagtgttgagaatgatttttaaaactttgtcttgaatttaaatcagatttgcatttttggcttatcaaataaaaatgaaaggaattcctttatacaaggtgccttttgtaacaaccctgcacgttgtgcacatgtaccctaaaacttaaagtataataataataaaattaaaaaaaactttgtcttgaatttaaatcagatttgcattttcagcttatcagataaaaatgaaaggaattcctttcagttgcttccttttccttgaccttgatttttttcctatgcttctgcccttcttcagcagtgacttctccagccacactttaggttttgtcatcatcccctgggccccatattcctaccattccacctctagatctta

SEQ ID NO: 366615 - DNA, 504 bp, Homo sapiens
agtgtgtcacagtttgtttatttaactcaacagaaaattaaaggtagaattcttttagagagtcgcttagggaaacgcttataccatctccacctccagagatgttttctgtgctggaacatcggatataaaggttaagtttcaattaaaagtgcacatgtggatgatgaactagatagtaaaatgaacagatgaccccgttatccaggtctgttagcagtacgccagcagcggaatcctgtctttcagggcccaaccatgaatttctcattcatgcccttagcgcgatgtttttctcagttactttaagaaacatggacaagtgtgtaaaggtgtttaaaggactcatagtggtagatagcttattggtcagggtagatagagatatgttttctgtgtaactgtctagtttttgtcctaccattcggagactagggaattaacaggaagtgagtttacataggaccttgctatttgaaaatgaagttcatattttccactaaa

SEQ ID NO: 366616 - DNA, 500 bp, Homo sapiens
acagcttgctttccaataagccaaatgtaccagcttctttgtttttcaacggattggtgtgtccatttgatacaagaaaatggaaactgaacagccagaggaaaccttccctaacatcgaaatcaacagtgactctggtaaacatcctgcagaagacatgaaagaggaaaaagcatttaaagatctagaaacactgatgagatggttgaattaggcattctgcttcagagcagaatgctggggcagtgactggaaaaggaagcaagaatatgaagtttctccgtacagaccacaatgccaatgctttagtcccagacagcaggggccccgagcagcatgtcccaacagtttatgcctcactgcctgattagaaaaagagaaatgtattttattacctaccttttatataattaagtagtatctcctttagatggtggaaaaaatttttagaagattttgaataggtggcaaggataataacgtaagctttattaaatatt

SEQ ID NO: 366617 - DNA, 796 bp, Homo sapiens
aatgaagtgccatgttcgttctgaggcacgatttgtatgccatttggaggagggagtccgttcaagagaatggattccctgacaagctagtttgccagaatattccaagacatgttttagaagctacctatggcattaacatcataacgcctagagaggatgaagatccccaccgacctccaacatcggaagaactgttgacagcttatggatgtaagttgtgattcatcagaaaatgtgaacaaaagtaacagtatacctaatgaatagaaataagaatagtaatagtactagaattgctgttctgcaaagatacacatttataatatttcttcagcatttttcaagccatctttcgtctctgtgggccttgcctacaaagtaacctaaagtgcaaaaagcttttaggacgtttgctgctttgatggtacccacgtgcagcacaggggttctcatcgtaggctgtgttggctctttctggagtcgtctcccaaacaagaagaaagcggatgtgtggaagaaaatgaatccgcacgccacagcgaggcaggagagttaggaggggagcaccagaagggagacccctcagagacggggacagagtggagcttggttaggataggggcacaaagcatcctccttcctctcccatcagcccctgtaaacttatttgacattaagatgagtccacagctctcccacctctgtgttttatcccaattccacgtgggaacctatgatttcttgccttaaatgtaaactttaaaggtggcctggagaaccttgtgtctaccta

SEQ ID NO: 366618 - DNA, 428 bp, Homo sapiens
aggaacaagagtttgtagctgagaaacttaatattaagtttgtgcctgctgaggctagaactggactactgtctttcgaggagagccagagaattaagaagctccatgaagaaaacaaacagttcttgtgtataccgaggagaccaaactggaaccaaaatactaccccagaagaactcaaactcttgacctcagataatctgcctgcctcgacctcccaaaatgctgggattacaggcgtgagccaccacgcctggccttttaagtttctctgtaaattaatagtgagacatgaatcatttattgcaggtagccttaggttaggtgctgtggaggatagggcataaatagagatggctcctgccctttacgaagcatcagtctgttggggcacatgaggcatgtacttgaataactctagtacaagg

SEQ ID NO: 366619 - DNA, 1931 bp, Homo sapiens
aatgaagtgccatgttcgttctgaggcacgatttgtatgccatttggaggagggagtccgttcaagagaatggattccctgacaagctagtttgccagaatattccaagacatgttttagaagctacctatggcattaacatcataacgcctagagaggatgaagatccccaccgacctccaacatcggaagaactgttgacagcttatggatacatgcgaggattcatgacagcgcatggacagccagaccagcctcgatctgcgcgctacatcctgaaggactatgtcagtggtaagctgctgtactgccatcctcctcctggaagagatcctgtaacttttcagcatcaacaccagcgactcctagagaacaaaatgaacagtgatgaaataaaaatgcagctaggcagaaataaaaaagcaaagcagattgaaaatatcgttgacaaaacttttttccatcaagagaatgtgagggctttgaccaaaggagtccaggctgtgatgggttacaagcccgggagtggtgtagtgactgcatccactgcgagctctgagaacggggcggggaagccctggaaaaaacatggcaacagaaataaaaaagaaaaaagtcgtagactctacaagcacctggatatgtgaggttgggctgcaacagaaatgtcatctgcattgtgcagatggaaaagagcagaagctgcctgttgcctgtggaactgtcccaagacactagcactgtagaacgggccctgctcttgcagagcacggctgcacccaacagtctccatgtcaagaccaagggcctcctggaaacaccaactctgacaaaaaggagtcatctgggagcccgagaatcctactcctggccgggcacagtggctcacgcaccaacatggagaaaccccgtctctactaaaaatacaaaaaaattagccaggcgtggtggcgcgcacctgtaatcccagctactcgggaggctgaggcaggagaatcacttgaaccagggaggcagagtttgcagtgaatggagattgcgccgctgcactccagcctgggcgacagagtgagactgcatcacaagaaaaaaaatttgcaagggatggttcacgagacacatttgggacgaaggtgaaagagaaattccccattctgagtgtcctagttgggttcctccgactctaaacaagggacttgggttcagttagtgtacagcgggggctcacgtccactaaggaacatgtagaatgtaaccaccgggtgacagggaagctgcggtatttactacctagcccccatcttcactggttattccacttatttaaaatgtccagaataagcaaatctccatatagaggaagtagattagtggttgcttcgggatgggaggaatgggaagattgaggtctttcttttgcagtgataaaaatgtcctaaaattgactgtagcgatggtcacacaactctgaatatgcttaagaccattgaattacacactttacgttggtgaattgtatggtatgtaaattatagttcaataacatagttacaaaagataatcaaaagcatgaaagcactattgatgtggtttggatctgtgtcctcaccgagtctcatgttgaaatgtaagccccctggtgggaggcgatgggattatggggcagagtcctcacaaacggtttagcaccacccgctcagtgctgttctcctgatattgagtcctcatcacatctggttgcttcaaagtgtgtggtgcctcccctctgtctccctcctgctctggccatataagatgtgcctgcttctccttcgccttctaacatgattgtaagtttcctgaggcctccctagaagcaaaagctgctgtgcttcctgtaccatctacaggaccgtgagccaattaaacctcttttctttataaaaaaaaat

SEQ ID NO: 366620 - DNA, 2295 bp, Homo sapiens
aataaccagttgtgaggatttggctttatttcctcctcttctcaagaccacatcggtggagctcttggagctcagtggcaaccatatgggcttgccttcagttcaggaagaaagcagttcatgctattggtatggataagtcatgtattcgtttaccacttactgtggaggatgtaaagatgaggtaaaaatagtcacagccttcagatcatttatgatggaaagaggcagacttgcacccagtgagcaactgcaaccccacatacaggagtcgaggaactctcctgactttaacagtctaacccggcattaccgtaactgtccagttatgtcttgagttttgttttggaaaatattcaccataagtatgatcatgtccgtatactgaagaatacttgagtgggaatgcaaacgagaaaagaagaaagagatttcatcctagtctggggcgccatgggaagagctaggtctctagaacactttgaccattgatgtattagaaaaaggactcttcagctgcagtagaccaaaactcaactcagctaacttaaccagaaggcagaaagctccatcagagtgtgactgggtggagctgtctcctctgaggccacagatggcacttaggctgcactgttgtcattcatgttgtctttgtagggtaagctgctgtactgccatcctcctcctggaagagatcctgtaacttttcagcatcaacaccagcgactcctagagaacaaaatgaacagtgatgaaataaaaatgcagctaggcagaaataaaaaagcaaagcagattgaaaatatcgttgacaaaacttttttccatcaagagaatgtgagggctttgaccaaaggagtccaggctgtgatgggttacaagcccgggagtggtgtagtgactgcatccactgcgagctctgagaacggggcggggaagccctggaaaaaacatggcaacagaaataaaaaagaaaaaagtcgtagactctacaagcacctggatatgtgaggttgggctgcaacagaaatgtcatctgcattgtgcagatggaaaagagcagaagctgcctgttgcctgtggaactgtcccaagacactagcactgtagaacgggccctgctcttgcagagcacggctgcacccaacagtctccatgtcaagaccaagggcctcctggaaacaccaactctgacaaaaaggagtcatctgggagcccgagaatcctactcctggccgggcacagtggctcacgcaccaacatggagaaaccccgtctctactaaaaatacaaaaaaattagccaggcgtggtggcgcgcacctgtaatcccagctactcgggaggctgaggcaggagaatcacttgaaccagggaggcagagtttgcagtgaatggagattgcgccgctgcactccagcctgggcgacagagtgagactgcatcacaagaaaaaaaatttgcaagggatggttcacgagacacatttgggacgaaggtgaaagagaaattccccattctgagtgtcctagttgggttcctccgactctaaacaagggacttgggttcagttagtgtacagcgggggctcacgtccactaaggaacatgtagaatgtaaccaccgggtgacagggaagctgcggtatttactacctagcccccatcttcactggttattccacttatttaaaatgtccagaataagcaaatctccatatagaggaagtagattagtggttgcttcgggatgggaggaatgggaagattgaggtctttcttttgcagtgataaaaatgtcctaaaattgactgtagcgatggtcacacaactctgaatatgcttaagaccattgaattacacactttacgttggtgaattgtatggtatgtaaattatagttcaataacatagttacaaaagataatcaaaagcatgaaagcactattgatgtggtttggatctgtgtcctcaccgagtctcatgttgaaatgtaagccccctggtgggaggcgatgggattatggggcagagtcctcacaaacggtttagcaccacccgctcagtgctgttctcctgatattgagtcctcatcacatctggttgcttcaaagtgtgtggtgcctcccctctgtctccctcctgctctggccatataagatgtgcctgcttctccttcgccttctaacatgattgtaagtttcctgaggcctccctagaagcaaaagctgctgtgcttcctgtaccatctacaggaccgtgagccaattaaacctcttttctttataaaaaaaaat

SEQ ID NO: 366621 - DNA, 1468 bp, Homo sapiens
ttttttttttgagacggagtctcgctctgtcgcccaggctgtgatgggttacaagcccgggagtggtgtagtgactgcatccactgcgagctctgagaacggggcggggaagccctggaaaaaacatggcaacagaaataaaaaagaaaaaagtcgtagactctacaagcacctggatatgtgaggttgggctgcaacagaaatgtcatctgcattgtgcagatggaaaagagcagaagctgcctgttgcctgtggaactgtcccaagacactagcactgtagaacgggccctgctcttgcagagcacggctgcacccaacagtctccatgtcaagaccaagggcctcctggaaacaccaactctgacaaaaaggagtcatctgggagcccgagaatcctactcctggccgggcacagtggctcacgcaccaacatggagaaaccccgtctctactaaaaatacaaaaaaattagccaggcgtggtggcgcgcacctgtaatcccagctactcgggaggctgaggcaggagaatcacttgaaccagggaggcagagtttgcagtgaatggagattgcgccgctgcactccagcctgggcgacagagtgagactgcatcacaagaaaaaaaatttgcaagggatggttcacgagacacatttgggacgaaggtgaaagagaaattccccattctgagtgtcctagttgggttcctccgactctaaacaagggacttgggttcagttagtgtacagcgggggctcacgtccactaaggaacatgtagaatgtaaccaccgggtgacagggaagctgcggtatttactacctagcccccatcttcactggttattccacttatttaaaatgtccagaataagcaaatctccatatagaggaagtagattagtggttgcttcgggatgggaggaatgggaagattgaggtctttcttttgcagtgataaaaatgtcctaaaattgactgtagcgatggtcacacaactctgaatatgcttaagaccattgaattacacactttacgttggtgaattgtatggtatgtaaattatagttcaataacatagttacaaaagataatcaaaagcatgaaagcactattgatgtggtttggatctgtgtcctcaccgagtctcatgttgaaatgtaagccccctggtgggaggcgatgggattatggggcagagtcctcacaaacggtttagcaccacccgctcagtgctgttctcctgatattgagtcctcatcacatctggttgcttcaaagtgtgtggtgcctcccctctgtctccctcctgctctggccatataagatgtgcctgcttctccttcgccttctaacatgattgtaagtttcctgaggcctccctagaagcaaaagctgctgtgcttcctgtaccatctacaggaccgtgagccaattaaacctcttttctttataaaaaaaaat

SEQ ID NO: 366622 - DNA, 1564 bp, Homo sapiens
aaactgcacgcgccgagccgggaagcttcgtccagcggtcgtgttgccatgggccggaggagagccccggccggtgggtcgctgggacgggcccttatgcgccatcagactcagcggagccgaagccatcgtcacactgactcctggttgcacacaagtgaactcaatgatggctatgattggggtcgtcttaatcttcagtcagtgactgaacagagctcccttgatgacttccttgctactgcagaacttgcaggaacagagtttgtagctgagaaacttaatattaagtttgtgcctgctgaggctagaactggactactgtctttcgaggagagccagagaattaagaagctccatgaagaaaacaaacagttcttgtgtataccgaggagaccaaactggaaccaaaatactaccccagaagaactcaaacaagcagagaaagataactttctagaatggagacgtcagcttgtccggctagaagaggaacagaagctgatattgactccatttgaacgaaatttggacttttggcgccagctctggagagtcattgagagaagtgatattgtggtccagatagtagatgctcgaaacccactcctgtttagatgtgaggatttggaatgttatgtgaaagaaatggatgccaataaggagaacgtcattctgatcaacaaggcagacttgctgactgctgagcagcggagtgcctgggccatgtacttcgaaaaagaagatgtgaaggttattttctggtcagctttggccggagccattcccctgaatggtgactctgaggaagaggcaaacagagatgatagacaaagcaacacaactgagtttggacattccagtttcgaccaggctgaaatttcccacagtgaatccgaacatctcccagctagggattctccttcacttagtgaaaatcccacaacggatgaagatgacagtgagtatgaggactgtccagaggaggaggaagacgactggcagacgtgctcagaagaagacggtcccaaggaagaggactgcagccaggactggaaggaaagctctactgcagattctgaggctcggagcaggaaaaccccacagaagaggcagatacacaattttagccatctggtatccaagcaggagttactggagctctttaaggagctacacactgggagaaaggtgaaagatgggcaacttacggtcggactggtgggctaccctaatgttggtaagagttcaacaatcaacaccatcatgggcaacaagaaagtatctgtgtctgccacacctggtcacacaaagcactttcagactctctatgtggagcctggcctctgcctgtgtgactgtcctggcttggtgatgccatcttttgtgtctaccaaggcagaaatgacttgcagcggaatcctcccaattgatcagatgagagatcatgttcctcctgtatcactaatatcctttctgctttggaaacactctagttattacgtgcatattagggcttcaggtttattttgggcatttgagggattcagatttgatgaagaat

SEQ ID NO: 366623 - DNA, 448 bp, Homo sapiens
ctaatgtggttgaaacaggttaagttttgatattaagacaaatttccagaacacagctggtattaagtctagttgtagatggcatttgaaagtatgggactaaacaaagttgacgagggaatgaggagggggaagagatgaactgaagacagaatgctggggggagaaagaggaccagtgaaggggaggggggcggaagttcacccagtgactgactcctttttatcttgaagtgatccactaatagtactgtgcatatcccttaaaggatagcctgctgacagctcagataatgttttctcttatttcctaggagaatgtgagggctttgaccaaaggagtccaggctgtgatgggttacaagcccgggagtggtgtagtgactgcatccactgcgagctctgagaacggggcggggaagccctggaaaaaacatggcaacagaaat

SEQ ID NO: 366624 - DNA, 375 bp, Homo sapiens
gtatacccagctcaaacctcttgcttgtcttccagactctctatgtggagcctggcctctgcctgtgtgactgtcctggcttggtgatgccatcttttgtgtctaccaaggcagaaatgacttgcagcggaatcctcccaattgatcagatgagagatcatgttcctcctgtatcactaatatcctttctgctttggaaacactctagttattacgtgcatattagggcttcaggtttattttgggcatttgagggattcagatttgatgaagaattgaaaatactagtgatctgcacaagtttatactgtgagatagcatgagaacttcagaatagaacctcatttcctgatttcagcagtgtagccttgaaga

SEQ ID NO: 366625 - DNA, 3309 bp, Homo sapiens
aaactgcacgcgccgagccgggaagcttcgtccagcggtcgtgttgccatgggccggaggagagccccggccggtgggtcgctgggacgggcccttatgcgccatcagactcagcggagccgaagccatcgtcacactgactcctggttgcacacaagtgaactcaatgatggctatgattggggtcgtcttaatcttcagtcagtgactgaacagagctcccttgatgacttccttgctactgcagaacttgcaggaacagagtttgtagctgagaaacttaatattaagtttgtgcctgctgaggctagaactggactactgtctttcgaggagagccagagaattaagaagctccatgaagaaaacaaacagttcttgtgtataccgaggagaccaaactggaaccaaaatactaccccagaagaactcaaacaagcagagaaagataactttctagaatggagacgtcagcttgtccggctagaagaggaacagaagctgatattgactccatttgaacgaaatttggacttttggcgccagctctggagagtcattgagagaagtgatattgtggtccagatagtagatgctcgaaacccactcctgtttagatgtgaggatttggaatgttatgtgaaagaaatggatgccaataaggagaacgtcattctgatcaacaaggcagacttgctgactgctgagcagcggagtgcctgggccatgtacttcgaaaaagaagatgtgaaggttattttctggtcagctttggccggagccattcccctgaatggtgactctgaggaagaggcaaacagagatgatagacaaagcaacacaactgagtttggacattccagtttcgaccaggctgaaatttcccacagtgaatccgaacatctcccagctagggattctccttcacttagtgaaaatcccacaacggatgaagatgacagtgagtatgaggactgtccagaggaggaggaagacgactggcagacgtgctcagaagaagacggtcccaaggaagaggactgcagccaggactggaaggaaagctctactgcagattctgaggctcggagcaggaaaaccccacagaagaggcagatacacaattttagccatctggtatccaagcaggagttactggagctctttaaggagctacacactgggagaaaggtgaaagatgggcaacttacggtcggactggtgggctaccctaatgttggtaagagttcaacaatcaacaccatcatgggcaacaagaaagtatctgtgtctgccacacctggtcacacaaagcactttcagactctctatgtggagcctggcctctgcctgtgtgactgtcctggcttggtgatgccatcttttgtgtctaccaaggcagaaatgacttgcagcggaatcctcccaattgatcagatgagagatcatgttcctcctgtatcactagtttgccagaatattccaagacatgttttagaagctacctatggcattaacatcataacgcctagagaggatgaagatccccaccgacctccaacatcggaagaactgttgacagcttatggatacatgcgaggattcatgacagcgcatggacagccagaccagcctcgatctgcgcgctacatcctgaaggactatgtcagtggtaagctgctgtactgccatcctcctcctggaagagatcctgtaacttttcagcatcaacaccagcgactcctagagaacaaaatgaacagtgatgaaataaaaatgcagctaggcagaaataaaaaagcaaagcagattgaaaatatcgttgacaaaacttttttccatcaagagaatgtgagggctttgaccaaaggagtccaggctgtgatgggttacaagcccgggagtggtgtagtgactgcatccactgcgagctctgagaacggggcggggaagccctggaaaaaacatggcaacagaaataaaaaagaaaaaagtcgtagactctacaagcacctggatatgtgaggttgggctgcaacagaaatgtcatctgcattgtgcagatggaaaagagcagaagctgcctgttgcctgtggaactgtcccaagacactagcactgtagaacgggccctgctcttgcagagcacggctgcacccaacagtctccatgtcaagaccaagggcctcctggaaacaccaactctgacaaaaaggagtcatctgggagcccgagaatcctactcctggccgggcacagtggctcacgcaccaacatggagaaaccccgtctctactaaaaatacaaaaaaattagccaggcgtggtggcgcgcacctgtaatcccagctactcgggaggctgaggcaggagaatcacttgaaccagggaggcagagtttgcagtgaatggagattgcgccgctgcactccagcctgggcgacagagtgagactgcatcacaagaaaaaaaatttgcaagggatggttcacgagacacatttgggacgaaggtgaaagagaaattccccattctgagtgtcctagttgggttcctccgactctaaacaagggacttgggttcagttagtgtacagcgggggctcacgtccactaaggaacatgtagaatgtaaccaccgggtgacagggaagctgcggtatttactacctagcccccatcttcactggttattccacttatttaaaatgtccagaataagcaaatctccatatagaggaagtagattagtggttgcttcgggatgggaggaatgggaagattgaggtctttcttttgcagtgataaaaatgtcctaaaattgactgtagcgatggtcacacaactctgaatatgcttaagaccattgaattacacactttacgttggtgaattgtatggtatgtaaattatagttcaataacatagttacaaaagataatcaaaagcatgaaagcactattgatgtggtttggatctgtgtcctcaccgagtctcatgttgaaatgtaagccccctggtgggaggcgatgggattatggggcagagtcctcacaaacggtttagcaccacccgctcagtgctgttctcctgatattgagtcctcatcacatctggttgcttcaaagtgtgtggtgcctcccctctgtctccctcctgctctggccatataagatgtgcctgcttctccttcgccttctaacatgattgtaagtttcctgaggcctccctagaagcaaaagctgctgtgcttcctgtaccatctacaggaccgtgagccaattaaacctcttttctttataaaaaaaaat

SEQ ID NO: 366626 - DNA, 2710 bp, Homo sapiens
aaactgcacgcgccgagccgggaagcttcgtccagcggtcgtgttgccatgggccggaggagagccccggccggtgggtcgctgggacgggcccttatgcgccatcagactcagcggagccgaagccatcgtcacactgactcctggttgcacacaagtgaactcaatgatggctatgattggggtcgtcttaatcttcagtcagtgactgaacagagctcccttgatgacttccttgctactgcagaacttgcaggaacagagtttgtagctgagaaacttaatattaagtttgtgcctgctgaggctagaactggactactgtctttcgaggagagccagagaattaagaagctccatgaagaaaacaaacagttcttgtgtataccgaggagaccaaactggaaccaaaatactaccccagaagaactcaaacaagcagagaaagataactttctagaatggagacgtcagcttgtccggctagaagaggaacagaagctgatattgactccatttgaacgaaatttggacttttggcgccagctctggagagtcattgagagaagtgatattgtggtccagatagtagatgctcgaaacccactcctgtttagatgtgaggatttggaatgttatgtgaaagaaatggatgccaataaggagaacgtcattctgatcaacaaggcagacttgctgactgctgagcagcggagtgcctgggccatgtacttcgaaaaagaagatgtgaaggttattttctggtcagctttggccggagccattcccctgaatggtgactctgaggaagaggcaaacagagatgatagacaaagcaacacaactgagtttggacattccagtttcgaccaggctgaaatttcccacagtgaatccgaacatctcccagctagggattctccttcacttagtgaaaatcccacaacggatgaagatgacagtgagtatgaggactgtccagaggaggaggaagacgactggcagacgtgctcagaagaagacggtcccaaggaagaggactgcagccaggactggaaggaaagctctactgcagattctgaggctcggagcaggaaaaccccacagaagaggcagatacacaattttagccatctggtatccaagcaggagttactggagctctttaaggagctacacactgggagaaaggtgaaagatgggcaacttacggtcggactggtgggctaccctaatgttggtaagagttcaacaatcaacaccatcatgggcaacaagaaagtatctgtgtctgccacacctggtcacacaaagcactttcagactctctatgtggagcctggcctctgcctgtgtgactgtcctggcttggtgatgccatcttttgtgtctaccaaggcagaaatgacttgcagcggaatcctcccaattgatcagatgagagatcatgttcctcctgtatcactagtttgccagaatattccaagacatgttttagaagctacctatggcattaacatcataacgcctagagaggatgaagatccccaccgacctccaacatcggaagaactgttgacagcttatggatacatgcgaggattcatgacagcgcatggacagccagaccagcctcgatctgcgcgctacatcctgaaggactatgtcagtggtaagctgctgtactgccatcctcctcctggaagagatcctgtaacttttcagcatcaacaccagcgactcctagagaacaaaatgaacagtgatgaaataaaaatgcagctaggcagaaataaaaaagcaaagcagattgaaaatatcgttgacaaaacttttttccatcaagagaatgtgagggctttgaccaaaggagtccaggctgtgatgggttacaagcccgggagtggtgtagtgactgcatccactgcgagctctgagaacggggcggggaagccctggaaaaaacatggcaacagaaataaaaaagaaaaaagtcgtagactctacaagcacctggatatgtgaggttgggctgcaacagaaatgtcatctgcattgtgcagatggaaaagagcagaagctgcctgttgcctgtggaactgtcccaagacactagcactgtagaacgggccctgctcttgcagagcacggctgcacccaacagtctccatgtcaagaccaagggcctcctggaaacaccaactctgacaaaaaggagtcatctgggagcccgagaatcctactcctggccgggcacagtggctcacgcaccaacatggagaaaccccgtctctactaaaaatacaaaaaaattagccaggcgtggtggcgcgcacctgtaatcccagctactcgggaggctgaggcaggagaatcacttgaaccagggaggcagagtttgcagtgaatggagattgcgccgctgcactccagcctgggcgacagagtgagactgcatcacaagaaaaaaaatttgcaagggatggttcacgagacacatttgggacgaaggtgaaagagaaattccccattctgagtgtcctagttgggttcctccgactctaaacaagggacttgggttcagttagtgtacagcgggggctcacgtccactaaggaacatgtagaattgttttcccagtcacaagcgtatgttcagtactgtacctagcgtacaacgcctatatgctttcatactacactcacagatc

SEQ ID NO: 366627 - DNA, 2174 bp, Homo sapiens
aaactgcacgcgccgagccgggaagcttcgtccagcggtcgtgttgccatgggccggaggagagccccggccggtgggtcgctgggacgggcccttatgcgccatcagactcagcggagccgaagccatcgtcacactgactcctggttgcacacaagtgaactcaatgatggctatgattggggtcgtcttaatcttcagtcagtgactgaacagagctcccttgatgacttccttgctactgcagaacttgcaggaacagagtttgtagctgagaaacttaatattaagtttgtgcctgctgaggctagaactggactactgtctttcgaggagagccagagaattaagaagctccatgaagaaaacaaacagttcttgtgtataccgaggagaccaaactggaaccaaaatactaccccagaagaactcaaacaagcagagaaagataactttctagaatggagacgtcagcttgtccggctagaagaggaacagaagctgatattgactccatttgaacgaaatttggacttttggcgccagctctggagagtcattgagagaagtgatattgtggtccagatagtagatgctcgaaacccactcctgtttagatgtgaggatttggaatgttatgtgaaagaaatggatgccaataaggagaacgtcattctgatcaacaaggcagacttgctgactgctgagcagcggagtgcctgggccatgtacttcgaaaaagaagatgtgaaggttattttctggtcagctttggccggagccattcccctgaatggtgactctgaggaagaggcaaacagagatgatagacaaagcaacacaactgagtttggacattccagtttcgaccaggctgaaatttcccacagtgaatccgaacatctcccagctagggattctccttcacttagtgaaaatcccacaacggatgaagatgacagtgagtatgaggactgtccagaggaggaggaagacgactggcagacgtgctcagaagaagacggtcccaaggaagaggactgcagccaggactggaaggaaagctctactgcagattctgaggctcggagcaggaaaaccccacagaagaggcagatacacaattttagccatctggtatccaagcaggagttactggagctctttaaggagctacacactgggagaaaggtgaaagatgggcaacttacggtcggactggtgggctaccctaatgttggtaagagttcaacaatcaacaccatcatgggcaacaagaaagtatctgtgtctgccacacctggtcacacaaagcactttcagactctctatgtggagcctggcctctgcctgtgtgactgtcctggcttggtgatgccatcttttgtgtctaccaaggcagaaatgacttgcagcggaatcctcccaattgatcagatgagagatcatgttcctcctgtatcactagtttgccagaatattccaagacatgttttagaagctacctatggcattaacatcataacgcctagagaggatgaagatccccaccgacctccaacatcggaagaactgttgacagcttatggatgtaagttgtgattcatcagaaaatgtgaacaaaagtaacagtatacctaatgaatagaaataagaatagtaatagtactagaattgctgttctgcaaagatacacatttataatatttcttcagcatttttcaagccatctttcgtctctgtgggccttgcctacaaagtaacctaaagtgcaaaaagcttttaggacgtttgctgctttgatggtacccacgtgcagcacaggggttctcatcgtaggctgtgttggctctttctggagtcgtctcccaaacaagaagaaagcggatgtgtggaagaaaatgaatccgcacgccacagcgaggcaggagagttaggaggggagcaccagaagggagacccctcagagacggggacagagtggagcttggttaggataggggcacaaagcatcctccttcctctcccatcagcccctgtaaacttatttgacattaagatgagtccacagctctcccacctctgtgttttatcccaattccacgtgggaacctatgatttcttgccttaaatgtaaactttaaaggtggcctggagaaccttgtgtctaccta

SEQ ID NO: 366628 - DNA, 417 bp, Homo sapiens
cttttattaccatggagaagaaagcttcaatgaaatgcctgtttcagcccatcttcagtattggttggttaataccatttgttaacaccaatcctttcctcttttactgctaacatgtgactgtgtttaaaattatagattgcagcagagtgttggccaaggattattgtagtaggataaagtttccctgtatttgaaatttacccaaactgtagcaaatacatctttccttctttatggaggtcacacgtgtgcatagtatgtgcctgaatacaggtaaactttgtgttttaaaattacatggccttttttagagtcgactgaaggctagactcttcttgcccatgttgctggataggctttcaaatctcaggccttggagagttaaatgactttctgatatttcttacggtggag

SEQ ID NO: 366629 - DNA, 1635 bp, Homo sapiens
agcctgcgcaccaccgttcttttaactgcgcaggcgcgccggaagcacctagagagcggcgcgtgcgcagcgggagtcgaagcggagatcccggggtcgcgcgagagccgcaagcggagttggtgggcgctatgctatcacccgaggcagagcgagtgctgcggtaccttgtagaagtggaggagctcgccgaggaggtgctggcggacaagcggcagattgtggacctggacactaaaaggaatcagaatcgagagggcctgagggccctgcagaaggatctcagcctctctgaagatgtgatggtttgcttcgggaacatgtttatcaagatgcctcaccctgagacaaaggaaatgattgaaaaagatcaagatcatctggataaagaaatagaaaaactgcggaagcaacttaaagtgaaggtcaaccgcctttttgaggcccaaggcaaaccggagctgaagggttttaacttgaaccccctcaaccaggatgagcttaaagctctcaaggtcatcttgaaaggatgagactcaagaaccaagatgggggaccagcaaccccccagggtcatggaggacccaggaccctccaaccttgacacctgtaaggacaggatctgccctgtaaggggccagccgtcaggaatctggccatgaaaacctctttgtagtgcttggctactctgtgatggcaggagggaaccttcagcctgtctggctgctggacctggacaccagggctcggtggacacaagatctattgacgggccttggtagccaccagtgggtgtgtggggcagtggctgtgggggtgtaagaatgactgcaacaggcacttcccaacaatggcctgctgttcacatggaccctgagcaaggaaggagggagggaggggcagagtggagtgtcattccagcattcctctcagaagggagagaggttttcaggctggtgccatgcgattggaataaagcaggaggctcatgggtggttgctgaatgaagaacagaatcttggtgctttgtggctcaccacagccatctgtggggcaggcacacacacctcccgccagctccaattttgcactttttccctgcttgattccaagagtaggtgctgcctagcagcccttcgtggccactctttactcaggagggccttgcagagtcctgcaccaggcctgggtgagtggatgcgcctcttaccatatgacacgtgtcaagatgcccttccgccccctctgaaagtggggcccggccagcactgctcgttactgtctgccttcagtggtctgaggtcccagtatgaactgccgtgaagtcaaaactcttatgtgttcattaagggctcaataaatgttagctgaatgaatgaaaaaaaaaaaaagaggggggctaaagaatcctgaggggcagttagcgtaccgtttttgttcaagtgggccttaagggaggattaacagggcggcggcttcacgtgtggatgggaaggtctggattgtaagaacacttgggggatggggacccaagaatagcggaataaatagtatgtgcacatcgggggatgtggttttatacatataaaatacaacacaaatactaagaaagagtgataatcatatgcaagttat

SEQ ID NO: 366630 - DNA, 942 bp, Homo sapiens
  misc_feature (884)..(884): n is a, c, g, or t
agcctgcgcaccaccgttcttttaactgcgcaggcgcgccggaagcacctagagagcggcgcgtgcgcagcgggagtcgaagcggagatcccggggtcgcgcgagagccgcaagcggagttggtgggcgctatgctatcacccgaggcagagcgagtgctgcggtaccttgtagaagtggaggagctcgccgaggaggtgctggcggacaagcggcagattgtggacctggacactaaaaggaatcagaatcgagagggcctgagggccctgcagaaggatctcagcctctctgaagatgtgatggtttgcttcgggaacatgtttatcaagatgcctcaccctgagacaaaggaaatgattgaaaaagatcaagatcatctggataaagaaatagaaaaactgcggaagcaacttaaagtgaaggtcaaccgcctttttgaggcccaaggcaaaccggagctgaagggttttaacttgaaccccctcaaccaggatgagcttaaagctctcaaggtcatcttgaaaggatgagactcaagaaccaagatgggggaccagcaaccccccagggtcatggaggacccaggaccctccaaccttgacacctgtaaggacaggatctgccctgtaaggggccagccgtcaggaatctggccatgaaaacctctttgtagtgcttggctactctgtgatggcaggagggaaccttcagcctgtctggctgctggacctggacaccagggctcggtggacacaagatctattgacgggccttggtagccaccagtgggtgtgtggggcagtggctgtgggggtgtaagaatgactgcaacaggcacttcccaacaatggcctgctgttcacatggaccctgagcaaggncagagggggggggggcggggggggttccgccccaggagaagggacgggggcggggaaa

SEQ ID NO: 366631 - DNA, 867 bp, Homo sapiens
agcctgcgcaccaccgttcttttaactgcgcaggcgcgccggaagcacctagagagcggcgcgtgcgcagcgggagtcgaagcggagatcccggggtcgcgcgagagccgcaagcggagttggtgggcgctatgctatcacccgaggcagagcgagtgctgcggtaccttgtagaagtggaggagctcgccgaggaggtgctggcggacaagcggcagattgtggacctggacactaaaaggaatcagaatcgagagggcctgagggccctgcagaaggatctcagcctctctgaagatgtgatggtttgcttcgggaacatgtttatcaagatgcctcaccctgagacaaaggaaatgattgaaaaaggaaggagggagggaggggcagagtggagtgtcattccagcattcctctcagaagggagagaggttttcaggctggtgccatgcgattggaataaagcaggaggctcatgggtggttgctgaatgaagaacagaatcttggtgctttgtggctcaccacagccatctgtggggcaggcacacacacctcccgccagctccaattttgcactttttccctgcttgattccaagagtaggtgctgcctagcagcccttcgtggccactctttactcaggagggccttgcagagtcctgcaccaggcctgggtgagtggatgcgcctcttaccatatgacacgtgtcaagatgcccttccgccccctctgaaagtggggcccggccagcactgctcgttactgtctgccttcagtggtctgaggtcccagtatgaactgccgtgaagtcaaaactcttatgtgttcattaagggctcaataaatgttagctgaatgaatgaa

SEQ ID NO: 366632 - DNA, 308 bp, Homo sapiens
tcccgccagctccaattttgcactttttccctgcttgattccaagagtaggtgctgcctagcagcccttcgtggccactctttactcaggagggccttgcagagtcctgcaccaggcctgggtgagtggatgcgcctcttaccatatgacacgtgtcaagatgcccttccgccccctctgaaagtggggcccggccagcactgctcgttactgtctgccttcagtggtctgaggtcccagtatgaactgccgtgaagtcaaaactcttatgtgttcattaagggctcaataaatgttagctgaatgaa

SEQ ID NO: 366633 - DNA, 1380 bp, Homo sapiens
agcctgcgcaccaccgttcttttaactgcgcaggcgcgccggaagcacctagagagcggcgcgtgcgcagcgggagtcgaagcggagatcccggggtcgcgcgagagccgcaagcggagttggtgggcgctatgctatcacccgaggcagagcgagtgctgcggtaccttgtagaagtggaggagctcgccgaggaggtgctggcggacaagcggcagattgtggacctggacactaaaaggaatcagaatcgagagggcctgagggccctgcagaaggatctcagcctctctgaagatgtgatggtttgcttcgggaacatgtttatcaagatgcctcaccctgagacaaaggaaatgattgaaaaagatcaagatcatctggataaagaaatagaaaaactgcggaagcaacttaaagtgaaggtcaaccgcctttttgaggcccaaggcaaaccggagctgaagggttttaacttgaaccccctcaaccaggatgagcttaaagctctcaaggtcatcttgaaaggatgagactcaagaaccaagatgggggaccagcaaccccccagggtcatggaggacccaggaccctccaaccttgacacctgtaaggacaggatctgccctgtaaggggccagccgtcaggaatctggccatgaaaacctctttgtagtgcttggctactctgtgatggcaggagggaaccttcagcctgtctggctgctggacctggacaccagggctcggtggacacaagatctattgacgggccttggtagccaccagtgggtgtgtggggcagtggctgtgggggtgtaagaatgactgcaacaggcacttcccaacaatggcctgctgttcacatggaccctgagcaaggaaggagggagggaggggcagagtggagtgtcattccagcattcctctcagaagggagagaggttttcaggctggtgccatgcgattggaataaagcaggaggctcatgggtggttgctgaatgaagaacagaatcttggtgctttgtggctcaccacagccatctgtggggcaggcacacacacctcccgccagctccaattttgcactttttccctgcttgattccaagagtaggtgctgcctagcagcccttcgtggccactctttactcaggagggccttgcagagtcctgcaccaggcctgggtgagtggatgcgcctcttaccatatgacacgtgtcaagatgcccttccgccccctctgaaagtggggcccggccagcactgctcgttactgtctgccttcagtggtctgaggtcccagtatgaactgccgtgaagtcaaaactcttatgtgttcattaagggctcaataaatgttagctgaatgaatgaa

SEQ ID NO: 366634 - DNA, 1039 bp, Homo sapiens
  misc_feature (886)..(886): n is a, c, g, or t
agcctgcgcaccaccgttcttttaactgcgcaggcgcgccggaagcacctagagagcggcgcgtgcgcagcgggagtcgaagcggagatcccggggtcgcgcgagagccgcaagcggagttggtgggcgctatgctatcacccgaggcagagcgagtgctgcggtaccttgtagaagtggaggagctcgccgaggaggtgctggcggacaagcggcagattgtggacctggacactaaaaggaatcagaatcgagagggcctgagggccctgcagaaggatctcagcctctctgaagatgtgatggtttgcttcgggaacatgtttatcaagatgcctcaccctgagacaaaggaaatgattgaaaaagatcaagatcatctggataaagaaatagaaaaactgcggaagcaacttaaagtgaaggtcaaccgcctttttgaggcccaaggcaaaccggagctgaagggttttaacttgaaccccctcaaccaggatgagcttaaagctctcaaggtcatcttgaaaggatgagactcaagaaccaagatgggggaccagcaaccccccagggtcatggaggacccaggaccctccaaccttgacacctgtaaggacaggatctgccctgtaaggggccagccgtcaggaatctggccatgaaaacctctttgtagtgcttggctactctgtgatggcaggagggaaccttcagcctgtctggctgctggacctggacaccagggctcggtggacacaagatctattgacgggccttggtagccaccagtgggtgtgtggggcagtggctgtgggggtgtaagaatgactgcaacaggcacttcccaacaatggcctgctgttcacatggaccctgagcaagagantcccttcttctttaccatgaattccaccctatcctggtcttatctcaatgatcccacatctagccttcaaaccctatcttctcccttagatttttccctttttttccccacgatacacatcttggattttccccctctcccattcccatttgg

SEQ ID NO: 366635 - DNA, 458 bp, Homo sapiens
tggtgacacaggagcagtggtgatgcctcatctggtgcattgcagaattggaggcccatccctgccagacctccaggctgagtttggcagcattagtgcagcgtcagcccctttcctgggcctggctccagagccagcaggaggcccgacgtgctgatggatcatcttctctcctaggcaaaccggagctgaagggttttaacttgaaccccctcaaccaggatgagcttaaagctctcaaggtcatcttgaaaggatgagactcaagaaccaagatgggggaccagcaaccccccagggtcatggaggacccaggaccctccaaccttgacacctgtaaggacaggatctgccctgtaaggggccagccgtcaggaatctggccatgaaaacctctttgtagtgcttggctactctgtgatggcaggagggaaccttcagcctgtctggctgctgga

SEQ ID NO: 366636 - DNA, 373 bp, Homo sapiens
atgggattagcactcttataaaagagactccagggagttagctagcacctgccatcttgtgaggacacagctggaggtgccatctgtgaaccagaaagtaggccctcaccaaataccaaatctgccagcacttagatcttaggcaacccagcctcaagaactatgaaaaataaattcctgttgtttaaaagctacctggtttatggtattttgttatagtagcctgaatgaactaagacaggacaccagtcattggatctagggcccattccactacagtgtgactgtatctaagctaattatatctgcaaagaccctatttccaaataaggataacattctgaggttgtgaatggacattaatatttgggag

SEQ ID NO: 366637 - DNA, 167 bp, Homo sapiens
  misc_feature (133)..(134): n is a, c, g, or t
atgggattagcactcttataaaagagactccagggagttagctagcacctgccatcttgtgaggacacagctggaggtgccatctgtgaaccagaaagtaggccctcaccaaataccaaatctgccagcactnnactgttgtttaaagctactggttatggtattat

SEQ ID NO: 366638 - DNA, 418 bp, Homo sapiens
ccccaaatatgagggtttctgaaagagctttaaaaaatgttgcctgccagtagcacatggattctcttttcagggtttgtatctacccagctgacacacccattcccccctcccttccccccagagcaagtgatttcttgttccaccctgcagcttactattggcaaggcatggcaggagtgaatctaggttccgtgtaccaccagggtaaattgccctctctattgcagtccttatggaaaggcactttttttcgggttcagcacgtccccatgcattcacaggtaccgaaagtgacatacacatacattgtaaacattgtgcccactgctctgcaaacgttcatttggcccttagcagttcacacatcacagccgattcatgtattcatgatgatgttcattctgttgttttctgg

SEQ ID NO: 366639 - DNA, 988 bp, Homo sapiens
gctcggtacccgagatacaccccactatagcagcctccgtggcctccagcagatagagcgagagtgtgagatggcagaggaggaacacaggataaaaatggaagttctcaataaaaagaagatgtattgggaaagaaaactacaaacttttaccaaggaatggcctgtttcctcatttaaccggccctttcccaattcgccctaagactttgggggtggctctcttgtaattaatctgtgttggcaaagaatgtctggaacatggacttggcggtcagtaacctgtaacagagctacaactaggaaaattagagtggtagtagtcacttatttaagaattcattcaggtaaacagctgcaccctctgtaccccttaagtggcaaagaagctgttatagtcttctgaaaattatcactatgagtgctataattctgaatataatgtctcttaattagaattcatacaagaaccacgtgtgagtgttgttgttgttgtttttttttttaatcaaatgcaagtgtgactataaaggagtgtggctgattttttttttttcttttttctttttaaacagacagcagaacttttctatccaaatgaatgccgtcccatggaaagtggctgtcctgggaggctacacgtttctccaatggtgatgctgttgctcagaacttgctagaggtctttagggaacctccgtgagagctgcagcacctttttaattttctcggtgtcatcctctgagtatggattttctgtttttaaacagcccaaagtttagaagggtattttctaatgtggctcataaaccaccttttaaggcctttcctcaaacaggagttctaaataagtctccaacaatagtagttttgttggagctaaggatgtaactactttgagggagaaatgttcgtttagatttctacattctgttatgttggttttattaaaaaaaaaaaaaagacttgcaattttatagtcacactg

SEQ ID NO: 366640 - DNA, 688 bp, Homo sapiens
ggcggcggcgtccgggctttgtggccgcggcgcgcgcggcggggcctggccggccgggggcgcgccgccgccgccgccgccgagcgggttctggagcccgcggccctcccggccgccctgcttgcgagaggagcccaggccgcccgccctcgcgcctcgccggcccctcccccggtcgccgcggctgccgcgccgccgctgcaggatagctagcggccaggagaaatacagtggaaaatgcaaaacaacgaaattataaagcctgccaaatacttctcagaattggaaaagagcatcctgctggctttagtagaaaagtataaatatgtgctggaatgtaagaaaagtgatgcgcgaactattgcccttaagcagcgtacctggcaggcgctggcccacgaatacaactctcagcccagcgtgtccctgcgggatttcaaacagctgaagaagtgctgggagaacatcaaggctcggaccaaaaaaattatggcccatgaaaggagagagaaagtgaaacggagcgtcagccctctcctgagtacccacgtcctagggaaggagaagatcgccagcatgctgccggagcagctctacttcctgcagagccccccggaggaggagcccgaataccaaaacacccggaacgcctcagccaaggcagaacgaaattcctgggagaagcaaa

SEQ ID NO: 366641 - DNA, 256 bp, Homo sapiens
ccaaatgctccttgctcctgtgtccaggtcccatctggagggtggtggagaaccttggtgctttgtcatttgggaagtgtgtccaaagttttctttcaagaaagaaaaagaagcctggaattgtcaatcatcctttctgggacttggtaggaaaaaggtggaaaatctgctatagagttatggccctcattacatcttgtgtatttgacataaggaatgtgtgtgtgtgatctttctatttctaacactgtgctgt

SEQ ID NO: 366642 - DNA, 1848 bp, Homo sapiens
ggcggcggcgtccgggctttgtggccgcggcgcgcgcggcggggcctggccggccgggggcgcgccgccgccgccgccgccgagcgggttctggagcccgcggccctcccggccgccctgcttgcgagaggagcccaggccgcccgccctcgcgcctcgccggcccctcccccggtcgccgcggctgccgcgccgccgctgcaggatagctagcggccaggagaaatacagtggaaaatgcaaaacaacgaaattataaagcctgccaaatacttctcagaattggaaaagagcatcctgctggctttagtagaaaagtataaatatgtgctggaatgtaagaaaagtgatgcgcgaactattgcccttaagcagcgtacctggcaggcgctggcccacgaatacaactctcagcccagcgtgtccctgcgggatttcaaacagctgaagaagtgctgggagaacatcaaggctcggaccaaaaaaattatggcccatgaaaggagagagaaagtgaaacggagcgtcagccctctcctgagtacccacgtcctagggaaggagaagatcgccagcatgctgccggagcagctctacttcctgcagagccccccggaggaggagcccgaataccaccccgacgcctcagcccaagaatcatttgctgtttcaaatagagaactgtgcgatgatgagaaagagttcatacattttccagtatgtgaggggacctctcaacctgaaccctcgtgttcagctgtcagaataacagccaataaaaactacaggagcaaaacctctcaggaaggtgctttaaaaaagatgcatgaggaagaacaccatcaacaaatgtccatcttacaactgcaactgatacaaatgaatgaggtgcatgtggccaaaatccagcagatagagcgagagtgtgagatggcagaggaggaacacaggataaaaatggaagttctcaataaaaagaagatgtattgggaaagaaaactacaaacttttaccaaggaatggcctgtttcctcatttaaccggccctttcccaattcgccctaagactttgggggtggctctcttgtaattaatctgtgttggcaaagaatgtctggaacatggacttggcggtcagtaacctgtaacagagctacaactaggaaaattagagtggtagtagtcacttatttaagaattcattcaggtaaacagctgcaccctctgtaccccttaagtggcaaagaagctgttatagtcttctgaaaattatcactatgagtgctataattctgaatataatgtctcttaattagaattcatacaagaaccacgtgtgagtgttgttgttgttgtttttttttttaatcaaatgcaagtgtgactataaaggagtgtggctgattttttttttttcttttttctttttaaacagacagcagaacttttctatccaaatgaatgccgtcccatggaaagtggctgtcctgggaggctacacgtttctccaatggtgatgctgttgctcagaacttgctagaggtctttagggaacctccgtgagagctgcagcacctttttaattttctcggtgtcatcctctgagtatggattttctgtttttaaacagcccaaagtttagaagggtattttctaatgtggctcataaaccaccttttaaggcctttcctcaaacaggagttctaaataagtctccaacaatagtagttttgttggagctaaggatgtaactactttgagggagaaatgttcgtttagatttctacattctgttatgttggttttattaaaaaaaaaaaaaagacttgcaattttatagtcacactg

SEQ ID NO: 366643 - DNA, 1832 bp, Homo sapiens
gcactgcacctgtggggaaaggcaggagaagaaggagctgaggacttcaccccaccatctgcagaatacccaacaggctgttcagttctcagctaccaagggggcaccctttcctctcccagttggtgatgatttgttaacgtattgtggaagatcaagggctggactcaggcactcctgtcctgaaggatagctagcggccaggagaaatacagtggaaaatgcaaaacaacgaaattataaagcctgccaaatacttctcagaattggaaaagagcatcctgctggctttagtagaaaagtataaatatgtgctggaatgtaagaaaagtgatgcgcgaactattgcccttaagcagcgtacctggcaggcgctggcccacgaatacaactctcagcccagcgtgtccctgcgggatttcaaacagctgaagaagtgctgggagaacatcaaggctcggaccaaaaaaattatggcccatgaaaggagagagaaagtgaaacggagcgtcagccctctcctgagtacccacgtcctagggaaggagaagatcgccagcatgctgccggagcagctctacttcctgcagagccccccggaggaggagcccgaataccaccccgacgcctcagcccaagaatcatttgctgtttcaaatagagaactgtgcgatgatgagaaagagttcatacattttccagtatgtgaggggacctctcaacctgaaccctcgtgttcagctgtcagaataacagccaataaaaactacaggagcaaaacctctcaggaaggtgctttaaaaaagatgcatgaggaagaacaccatcaacaaatgtccatcttacaactgcaactgatacaaatgaatgaggtgcatgtggccaaaatccagcagatagagcgagagtgtgagatggcagaggaggaacacaggataaaaatggaagttctcaataaaaagaagatgtattgggaaagaaaactacaaacttttaccaaggaatggcctgtttcctcatttaaccggccctttcccaattcgccctaagactttgggggtggctctcttgtaattaatctgtgttggcaaagaatgtctggaacatggacttggcggtcagtaacctgtaacagagctacaactaggaaaattagagtggtagtagtcacttatttaagaattcattcaggtaaacagctgcaccctctgtaccccttaagtggcaaagaagctgttatagtcttctgaaaattatcactatgagtgctataattctgaatataatgtctcttaattagaattcatacaagaaccacgtgtgagtgttgttgttgttgtttttttttttaatcaaatgcaagtgtgactataaaggagtgtggctgattttttttttttcttttttctttttaaacagacagcagaacttttctatccaaatgaatgccgtcccatggaaagtggctgtcctgggaggctacacgtttctccaatggtgatgctgttgctcagaacttgctagaggtctttagggaacctccgtgagagctgcagcacctttttaattttctcggtgtcatcctctgagtatggattttctgtttttaaacagcccaaagtttagaagggtattttctaatgtggctcataaaccaccttttaaggcctttcctcaaacaggagttctaaataagtctccaacaatagtagttttgttggagctaaggatgtaactactttgagggagaaatgttcgtttagatttctacattctgttatgttggttttattaaaaaaaaaaaaaagacttgcaattttatagtcacactg

SEQ ID NO: 366644 - DNA, 1245 bp, Homo sapiens
tttctctgcctgtaaaatctttgaacatatgttttctgctactgtttttcagaatcatttgctgtttcaaatagagaactgtgcgatgatgagaaagagttcatacattttccagtatgtgaggggacctctcaacctgaaccctcgtgttcagctgtcagaataacagccaataaaaactacaggagcaaaacctctcaggaaggtgctttaaaaaagatgcatgaggaagaacaccatcaacaaatgtccatcttacaactgcaactgatacaaatgaatgaggtgcatgtggccaaaatccagcagatagagcgagagtgtgagatggcagaggaggaacacaggataaaaatggaagttctcaataaaaagaagatgtattgggaaagaaaactacaaacttttaccaaggaatggcctgtttcctcatttaaccggccctttcccaattcgccctaagactttgggggtggctctcttgtaattaatctgtgttggcaaagaatgtctggaacatggacttggcggtcagtaacctgtaacagagctacaactaggaaaattagagtggtagtagtcacttatttaagaattcattcaggtaaacagctgcaccctctgtaccccttaagtggcaaagaagctgttatagtcttctgaaaattatcactatgagtgctataattctgaatataatgtctcttaattagaattcatacaagaaccacgtgtgagtgttgttgttgttgtttttttttttaatcaaatgcaagtgtgactataaaggagtgtggctgattttttttttttcttttttctttttaaacagacagcagaacttttctatccaaatgaatgccgtcccatggaaagtggctgtcctgggaggctacacgtttctccaatggtgatgctgttgctcagaacttgctagaggtctttagggaacctccgtgagagctgcagcacctttttaattttctcggtgtcatcctctgagtatggattttctgtttttaaacagcccaaagtttagaagggtattttctaatgtggctcataaaccaccttttaaggcctttcctcaaacaggagttctaaataagtctccaacaatagtagttttgttggagctaaggatgtaactactttgagggagaaatgttcgtttagatttctacattctgttatgttggttttattaaaaaaaaaaaaaagacttgcaattttatagtcacactg

SEQ ID NO: 366645 - DNA, 1732 bp, Homo sapiens
gggggcgggggtggggggcgcgggccgggcgtagagggggccgggggccggcatggagggttttcgggccgagccgctgcgaccccggccttgcaggctgggcgccgggcggccgcctctgcgcgccgcgatgggactcgaggatagctagcggccaggagaaatacagtggaaaatgcaaaacaacgaaattataaagcctgccaaatacttctcagaattggaaaagagcatcctgctggctttagtagaaaagtataaatatgtgctggaatgtaagaaaagtgatgcgcgaactattgcccttaagcagcgtacctggcaggcgctggcccacgaatacaactctcagcccagcgtgtccctgcgggatttcaaacagctgaagaagtgctgggagaacatcaaggctcggaccaaactgagtacccacgtcctagggaaggagaagatcgccagcatgctgccggagcagctctacttcctgcagagccccccggaggaggagcccgaataccaccccgacgcctcagcccaagaatcatttgctgtttcaaatagagaactgtgcgatgatgagaaagagttcatacattttccagtatgtgaggggacctctcaacctgaaccctcgtgttcagctgtcagaataacagccaataaaaactacaggagcaaaacctctcaggaaggtgctttaaaaaagatgcatgaggaagaacaccatcaacaaatgtccatcttacaactgcaactgatacaaatgaatgaggtgcatgtggccaaaatccagcagatagagcgagagtgtgagatggcagaggaggaacacaggataaaaatggaagttctcaataaaaagaagatgtattgggaaagaaaactacaaacttttaccaaggaatggcctgtttcctcatttaaccggccctttcccaattcgccctaagactttgggggtggctctcttgtaattaatctgtgttggcaaagaatgtctggaacatggacttggcggtcagtaacctgtaacagagctacaactaggaaaattagagtggtagtagtcacttatttaagaattcattcaggtaaacagctgcaccctctgtaccccttaagtggcaaagaagctgttatagtcttctgaaaattatcactatgagtgctataattctgaatataatgtctcttaattagaattcatacaagaaccacgtgtgagtgttgttgttgttgtttttttttttaatcaaatgcaagtgtgactataaaggagtgtggctgattttttttttttcttttttctttttaaacagacagcagaacttttctatccaaatgaatgccgtcccatggaaagtggctgtcctgggaggctacacgtttctccaatggtgatgctgttgctcagaacttgctagaggtctttagggaacctccgtgagagctgcagcacctttttaattttctcggtgtcatcctctgagtatggattttctgtttttaaacagcccaaagtttagaagggtattttctaatgtggctcataaaccaccttttaaggcctttcctcaaacaggagttctaaataagtctccaacaatagtagttttgttggagctaaggatgtaactactttgagggagaaatgttcgtttagatttctacattctgttatgttggttttattaaaaaaaaaaaaaagacttgcaattttatagtcacactg

SEQ ID NO: 366646 - DNA, 440 bp, Homo sapiens
cctgtggggaaaggcaggagaagaaggagctgaggacttcaccccaccatctgcagaatacccaacaggctgttcagttctcagctaccaagggggcaccctttcctctcccagttggtgatgatttgttaacgtattgtggaagatcaagggctggactcaggcactcctgtcctgagtgagtaggaaagacgtctgggagaagggtggtttattttgtttttaaccaggcattgaagcagagagtaggtgggtacgtagcgatggtgaaggtagggaacatcatgcatacttggaagagcaattgctttggagagatagacagtttggggtttgaatcctagctctgccatttcttagctttgtacattttttgtgaggataaaataatgttttttcacatatctggcgtgcagttcaacaagcactagtaccgtatt

SEQ ID NO: 366647 - DNA, 506 bp, Homo sapiens
aaccttggtgctttgtcatttgggaagtgtgtccaaaggtaatctgttaatactagtaggtagggtactggtactctttctatacagtaaaacaactttgagttcatttcactcattttgcatttcagttttctttcaagaaagaaaaagaagcctggaattgtcaatcatcctttctgggacttggtaggaaaaaggtggaaaatctgctatagagttatggccctcattacatcttgtgtatttgacataaggaatgtgtgtgtgtgatctttctatttctaacactgtgctgtctaatacagttgtcacaagccacatgaggctcataggcacttgaaatgtgggtagaccacattaggatgtgctataattgtgcacaccacattttgaagacttagtacctaaaaatgtaaaaaaactcattaaataatttttatattgttacatgttgaaacaataatattttagatatgttggattaaaaaatatattaccaaaataaa

SEQ ID NO: 366648 - DNA, 1328 bp, Homo sapiens
ggcggcggcgtccgggctttgtggccgcggcgcgcgcggcggggcctggccggccgggggcgcgccgccgccgccgccgccgagcgggttctggagcccgcggccctcccggccgccctgcttgcgagaggagcccaggccgcccgccctcgcgcctcgccggcccctcccccggtcgccgcggctgccgcgccgccgctgcaggatagctagcggccaggagaaatacagtggaaaatgcaaaacaacgaaattataaagcctgccaaatacttctcagaattggaaaagagcatcctgctggctttagtagaaaagtataaatatgtgctggaatgtaagaaaagtgatgcgcgaactattgcccttaagcagcgtacctggcaggcgctggcccacgaatacaactctcagcccagcgtgtccctgcgggatttcaaacagctgaagaagtgctgggagaacatcaaggctcggaccaaaaaaattatggcccatgaaaggagagagaaagtgaaacggagcgtcagccctctcctgagtacccacgtcctagggaaggagaagatcgccagcatgctgccggagcagctctacttcctgcagagccccccggaggaggagcccgaataccaccccgacgcctcagcccaagaatcatttgctgtttcaaatagagaactgtgcgatgatgagaaagagttcatacattttccagtatgtgaggggacctctcaacctgaaccctcgtgttcagctgtcagaataacagccaataaaaactacaggagcaaaacctctcaggaaggtgctttaaaaaagatgcatgaggaagaacaccatcaacaaatgtccatcttacaactgcaactgatacaaatgaatgaggtgcatgtggccaaaatccagcagatagagcgagagtgtgagatggcagaggaggaacacaggataaaaatggaagttctcaataaaaagaagatgtattgggaaagaaaactacaaacttttaccaaggaatggcctgtttcctcatttaaccggccctttcccaattcgccctaagactttgggggtggctctcttgtaattaatctgtgttggcaaagaatgtctggaacatggacttggcggtcagtaacctgtaacagagctacaactaggaaaattagagtggtagtagtcacttatttaagaattcattcaggtaaacagctgcaccctctgtaccccttaagtggcaaagaagctgttatagtcttctgaaaattatcactatgagtgctataattctgaatataatgtctcttaattagaattcatacaag

SEQ ID NO: 366649 - DNA, 674 bp, Homo sapiens
gggggcgggggtggggggcgcgggccgggcgtagagggggccgggggccggcatggagggttttcgggccgagccgctgcgaccccggccttgcaggctgggcgccgggcggccgcctctgcgcgccgcgatgggactcggtgagtagggccggcctgctgcctacaaagccccggggcgcgggcctctggggtactcagtggcgcgcccacggctgggagcggggtgggctttggactcccgggctcggggagctgctcggggggaatccaggtgacctgcagtaccgcggtcttcccatcccggcgtccccactgtgtgctgatcactgtgctcggcgcttttccatacttgtctcctttaagacctccagtgccccgcccgtccagagtgtaacgggagggatccctcacttgcaggatgaaggccgagcatcacatccttgcttgactgaccttgggaaagctcctttactccgagccggggctactgtttctgtaaattagaggcgggggtcgggggggcgtggtataatatctaccctcaggtactattgtgaaagataatgtatgtaaatgataacagctaaattttgagcactctgtatgtaccaggccctaggtactaaacagttggcatgaattatcattgaatcatcaccctggcgctgtgag

SEQ ID NO: 366650 - DNA, 1786 bp, Homo sapiens
gggggcgggggtggggggcgcgggccgggcgtagagggggccgggggccggcatggagggttttcgggccgagccgctgcgaccccggccttgcaggctgggcgccgggcggccgcctctgcgcgccgcgatgggactcgaggatagctagcggccaggagaaatacagtggaaaatgcaaaacaacgaaattataaagcctgccaaatacttctcagaattggaaaagagcatcctgctggctttagtagaaaagtataaatatgtgctggaatgtaagaaaagtgatgcgcgaactattgcccttaagcagcgtacctggcaggcgctggcccacgaatacaactctcagcccagcgtgtccctgcgggatttcaaacagctgaagaagtgctgggagaacatcaaggctcggaccaaaaaaattatggcccatgaaaggagagagaaagtgaaacggagcgtcagccctctcctgagtacccacgtcctagggaaggagaagatcgccagcatgctgccggagcagctctacttcctgcagagccccccggaggaggagcccgaataccaccccgacgcctcagcccaagaatcatttgctgtttcaaatagagaactgtgcgatgatgagaaagagttcatacattttccagtatgtgaggggacctctcaacctgaaccctcgtgttcagctgtcagaataacagccaataaaaactacaggagcaaaacctctcaggaaggtgctttaaaaaagatgcatgaggaagaacaccatcaacaaatgtccatcttacaactgcaactgatacaaatgaatgaggtgcatgtggccaaaatccagcagatagagcgagagtgtgagatggcagaggaggaacacaggataaaaatggaagttctcaataaaaagaagatgtattgggaaagaaaactacaaacttttaccaaggaatggcctgtttcctcatttaaccggccctttcccaattcgccctaagactttgggggtggctctcttgtaattaatctgtgttggcaaagaatgtctggaacatggacttggcggtcagtaacctgtaacagagctacaactaggaaaattagagtggtagtagtcacttatttaagaattcattcaggtaaacagctgcaccctctgtaccccttaagtggcaaagaagctgttatagtcttctgaaaattatcactatgagtgctataattctgaatataatgtctcttaattagaattcatacaagaaccacgtgtgagtgttgttgttgttgtttttttttttaatcaaatgcaagtgtgactataaaggagtgtggctgattttttttttttcttttttctttttaaacagacagcagaacttttctatccaaatgaatgccgtcccatggaaagtggctgtcctgggaggctacacgtttctccaatggtgatgctgttgctcagaacttgctagaggtctttagggaacctccgtgagagctgcagcacctttttaattttctcggtgtcatcctctgagtatggattttctgtttttaaacagcccaaagtttagaagggtattttctaatgtggctcataaaccaccttttaaggcctttcctcaaacaggagttctaaataagtctccaacaatagtagttttgttggagctaaggatgtaactactttgagggagaaatgttcgtttagatttctacattctgttatgttggttttattaaaaaaaaaaaaaagacttgcaattttatagtcacactg

SEQ ID NO: 366651 - DNA, 1917 bp, Homo sapiens
ggcggcggcgtccgggctttgtggccgcggcgcgcgcggcggggcctggccggccgggggcgcgccgccgccgccgccgccgagcgggttctggagcccgcggccctcccggccgccctgcttgcgagaggagcccaggccgcccgccctcgcgcctcgccggcccctcccccggtcgccgcggctgccgcgccgccgctgcaggatagctagcggccaggagaaatacagtggaaaatgcaaaacaacgaaattataaagcctgccaaatacttctcagaattggaaaagagcatcctgctggctttagtagaaaagtataaatatgtgctggaatgtaagaaaagtgatgcgcgaactattgcccttaagcagcgtacctggcaggcgctggcccacgaatacaactctcagcccagcgtgtccctgcgggatttcaaacagctgaagaagtgctgggagaacatcaaggctcggaccaaaaaaattatggcccatgaaaggagagagaaagtgaaacggagcgtcagccctctcctgagtacccacgtcctagggaaggagaagatcgccagcatgctgccggagcagctctacttcctgcagagccccccggaggaggagcccgaataccaccccgacgcctcagcccaagttttctttcaagaaagaaaaagaagcctggaattgtcaatcatcctttctgggacttggtaggaaaaagaatcatttgctgtttcaaatagagaactgtgcgatgatgagaaagagttcatacattttccagtatgtgaggggacctctcaacctgaaccctcgtgttcagctgtcagaataacagccaataaaaactacaggagcaaaacctctcaggaaggtgctttaaaaaagatgcatgaggaagaacaccatcaacaaatgtccatcttacaactgcaactgatacaaatgaatgaggtgcatgtggccaaaatccagcagatagagcgagagtgtgagatggcagaggaggaacacaggataaaaatggaagttctcaataaaaagaagatgtattgggaaagaaaactacaaacttttaccaaggaatggcctgtttcctcatttaaccggccctttcccaattcgccctaagactttgggggtggctctcttgtaattaatctgtgttggcaaagaatgtctggaacatggacttggcggtcagtaacctgtaacagagctacaactaggaaaattagagtggtagtagtcacttatttaagaattcattcaggtaaacagctgcaccctctgtaccccttaagtggcaaagaagctgttatagtcttctgaaaattatcactatgagtgctataattctgaatataatgtctcttaattagaattcatacaagaaccacgtgtgagtgttgttgttgttgtttttttttttaatcaaatgcaagtgtgactataaaggagtgtggctgattttttttttttcttttttctttttaaacagacagcagaacttttctatccaaatgaatgccgtcccatggaaagtggctgtcctgggaggctacacgtttctccaatggtgatgctgttgctcagaacttgctagaggtctttagggaacctccgtgagagctgcagcacctttttaattttctcggtgtcatcctctgagtatggattttctgtttttaaacagcccaaagtttagaagggtattttctaatgtggctcataaaccaccttttaaggcctttcctcaaacaggagttctaaataagtctccaacaatagtagttttgttggagctaaggatgtaactactttgagggagaaatgttcgtttagatttctacattctgttatgttggttttattaaaaaaaaaaaaaagacttgcaattttatagtcacactg

SEQ ID NO: 366652 - DNA, 421 bp, Homo sapiens
ctgcaacctccgcctcccaggttcaagcgattctcctgcctcaggctggactacaggcacgtgccaccacacctggctaatttctgtatttttttagtagagacggggtttcagtgagccgagatcacactactgcactcaagcctgggcaacagagtgagactctgtctcaaaaaacaaacaaacaaaaactgcacttcaatctaaaacttccttcctctctttctcttccacaggaatcagatctgcatcatggtctgaggttcctctcactctcgccttactttccctcacaggcattttccccaataaattatctcgtatgtttaatcccatcttcactgtatctcagtagatggaaactaacataccaggcttgagactttgctttacctccttttttccccctttcccatatttg

SEQ ID NO: 366653 - DNA, 330 bp, Homo sapiens
acacacacgcatgcatgcacacatacgcacactcctgacatgctctactgaaagctgcccagctacagagaggtgcgaatctaatccagggcacatggctgctttgcatttcactggctgtctagtgtcactctatgatataggcataaggtcatgactgtgagctatcattgtcacttatcttaatattaaaacccctctgatccaatctgtctgccttatctattacatcattcacatatctagattcttcaaacttaactactcattgcagcaaactcaggaatgccgagctctaaggcatctccatttacttcgttcatctcaatc

SEQ ID NO: 366654 - DNA, 721 bp, Homo sapiens
gttccctttgtctttgcaattaacagaaggacataccattgcgatggatctttaggatgcccatatttatagctgaacacactcactgggccctgctgtgtcccaaagggtagctctcttcttccttctcatggttttcctcttgctccttcaagctttggaaaaggctacattactgtagttcactggacttggttatgtaacaaaagtgagccaggtacctcaacaccattgatccttgtggacagccaaggtcacttttcatctttgaatggaggtcagcaggaaagacgagatggctgggctggcagagtctgctgcctgcccccccgctcacctccatcctgcactcctgtgctaacagccctccattgtggccactaaaacaccacatttctcagcctgctgtaagatgccaggagaagggtattgagacagtgcaataaagagtctgactacatttctgatgtctggctgcattcaaatctcattactccctcttctccttttgttccatatccaggaagctgaaaagaaggcccaggtgctccctcctttggaattggtgggaaatttaaaccccacaagcctctacccctgtgcaaaagccttcaccccagcctcatctctacccacaataaacgccaagccagtctctcttctctggattctaaagctatttttggatcattatgtaagcaataaacctttccatactttc

SEQ ID NO: 366655 - DNA, 287 bp, Homo sapiens
cagaaggtagagcttcccaactgactaaagactcaggtcctgcagggccgtgtagaacttgtggccatccctgagcaccctgccaccaggaagctgaaaagaaggcccaggtgctccctcctttggaattggtgggaaatttaaaccccacaagcctctacccctgtgcaaaagccttcaccccagcctcatctctacccacaataaacgccaagccagtctctcttctctggattctaaagctatttttggatcattatgtaagcaataaacctttccatactttc

SEQ ID NO: 366656 - DNA, 559 bp, Homo sapiens
gacctagtggttcatcagtcacttctctgcctgagtggtaggagcctagattttatagttgttttcaatgacaaaaatcatagtttataaaagagcataatctgacccagaggtgtcctttctgtcacgttatgattggggacaaagtagacatgctcttcagcttgatcatatagtagctaccagggtttagtacactgtctctataaagggcagatgataagtagttaaggcttatgagccatatggcttctgttgcaggcactcagctctgccattgtagtttgaaagcagccacaggctatacctaaagaaatgggcatgacagtgtgccaataaaactttatttacaagaacaggtgttgggccagatttggcccacaggccttatcttgccatccccttgatataaacatgactgaaaaatttatattctaatagaccataagacactgctctaaagtaaattgtatatttttaaatcatgtgtctgataaggagttaagatgcaaaatatataaggaactcctactattcaataacaacaacaacagcaaca

SEQ ID NO: 366657 - DNA, 476 bp, Homo sapiens
agagagaagctagactcgcctgtctctggtttttctcaccgcctgattgttcctttcagatgacccgcatctctcggagctgacctcagctcagcaagggtgcctgtgacccatggagcagtggccactatctctgcattgtgggagggtggtccgtgttgggtctgcagggtcgttgtcacagcgatgaatgtgtagatctgtgcttgctgaagctcaggctggtcgctgtcttgtcatcgtctcctgttacacagctttcaggctgcttttttggggaagttagactcgcctgctcttttttggggaagttccacctcactgcagccgggtatggtggtttgctcctgtagtcctagctacttgggaggctgaggcaggaggattgcttgagccaggagttcgaggctgcagtgagcagagatcacaccactgcactccagcttgggtgacagagtgagaccctgtctctaaaa

SEQ ID NO: 366658 - DNA, 388 bp, Homo sapiens
atcctaactcttatagtctgtttcccattctgtcactgagctgctgttagttcctttcacctgagtttattccatgtgaaaattgaagatattattcagacttcaacagagtgctccagaaatatttatcaactgctgtaaacttcactagaaatgctaaagaaatgttaaaaaaaatcttatcaatactttacaaagaaaataataccatcaacaaaaagtgtgcttacctattcacaaagatatagagccttactagcaaatataaaaataaaattgctgtttgtgactatgatcctaaagtgtaatgtgtttttttttttgttttttgagatggagtcttgctctgttccccggggttggagtgcagtggcataatctcggctca

SEQ ID NO: 366659 - DNA, 256 bp, Homo sapiens
gcctcggcagaagttaaatggatcttagagaatggctgtagactcccctaaacttaattattgggtgactccaaatgtagttgctgacccagatgtaatatctttatcaaaccacatggcccctggcatttggtatgtagctattgacttagttaatatctttttctgccaatttacaaggaccaccaaaaacaatttgtttttatctagcagagccaacaatatggcttcacagtcttgcctcagggctagatca

SEQ ID NO: 366660 - DNA, 377 bp, Homo sapiens
catgagccaccgcgcccagcctgcctctttttcctagcctgttgcattggcttgaatctagaataaagaacagtactaaagagagagaaggcatgcttgtcttgcaacagacattaaaaggaatgtgtcttagagcaacagtgcttcctagatgttatttggccctggaatgcttttttgatgcaatacccaggagcattctgtgttcctcaaacatactttggaaaatgctactagagcatttgactattaaggataaagtatctgagtgcggttgctcatgcctataatcctaccactttgggaggccgagggggatcacttaagctcaggcattcaagaccagcctagtaaacatggcgaaaccccatctctac

SEQ ID NO: 366661 - DNA, 719 bp, Homo sapiens
atgctcccttgcaaataattatgtctcccacccccagaggatttaaatgacttggggctcacgctgcttgtgataatagacaaaactccagcgttcccacaagattaataatgttcccttttcttcttttctatgcctttccatcgttacaggagatgttgctgagatgggtgcattaaagtttaggctttccagagtttatattgctaacaacttgaaaggaaaaaagctaactagagaactgactggtcttatttgttttagattctgggctttactaagacttcctactctcagaatctctggactataaacgctgggtggggtgggagctgggaatgttattctggaaaattaatcacaaatgaaaagaaaatcaactctaagactccagttagaagatttttgaaaatggcagaacatgactggccttcattcaagtcagaatatttaaagcaatccttgctaagaagaacttgattttgtataagcagtcccttaaatacagttgcttctcaagaaaaccacacacaaaagatgtttgaatggctttatttacaaacatctcactccgtaagcctctgcaggtatttctagcctcccaggggccactgtcccgtttcacctgtaatttggatcacaattctgtttgttgtcacacacatcatatgaactgcttttcatgctgcttttatccacaaagctttacaagctttaat

SEQ ID NO: 366662 - DNA, 1178 bp, Homo sapiens
ctcgctgggccggcgcctcccgaccaagtctctacggtcgccctcccctcggggtggccacgagggactcctcctcctcttcctcctcccctccctccccctcggtctccgcctcctccttctcctcctccttcactgccccgacctcccgccccaggttccacgcgctctgatgcccgccccgctcacccagagaagccctgggccagacgtccacaacccaaggggttatggggaggcctctgctccctggacacagtagttctcaaactggacagtgtcaatcagcatcctccgggaggtctggggtggccccggaaatacatgtgtcccacctatcccagcaggtaatgatgaaactcctgctctggtccgggctaccggtgaacagcgcccagcgggccgggcccccaacctcgctcctgagcctgaacatccccccaaccccaccgtgagaattcagcgaagagtaaaagctggaaaaagttgcgtgtcttaggctaagcagaacaaagtggggtgacggctccccggctaggaacagagatgcccttagggagccctctgatggaagagctctccgcttaagaaggtcaccactcccttacactgagatgttgctgagatgggtgcattaaagtttaggctttccagagtttatattgctaacaacttgaaaggaaaaaagctaactagagaactgactggtcttatttgttttagattctgggctttactaagacttcctactctcagaatctctggactataaacgctgggtggggtgggagctgggaatgttattctggaaaattaatcacaaatgaaaagaaaatcaactctaagactccagttagaagatttttgaaaatggcagaacatgactggccttcattcaagtcagaatatttaaagcaatccttgctaagaagaacttgattttgtataagcagtcccttaaatacagttgcttctcaagaaaaccacacacaaaagatgtttgaatggctttatttacaaacatctcactccgtaagcctctgcaggtatttctagcctcccaggggccactgtcccgtttcacctgtaatttggatcacaattctgtttgttgtcacacacatcatatgaactgcttttcatgctgcttttatccacaaagctttacaagctttaat

SEQ ID NO: 366663 - DNA, 914 bp, Homo sapiens
ctcgctgggccggcgcctcccgaccaagtctctacggtcgccctcccctcggggtggccacgagggactcctcctcctcttcctcctcccctccctccccctcggtctccgcctcctccttctcctcctccttcactgccccgacctcccgccccaggttccacgcgctctgatgcccgccccgctcacccagagaagccctgggccagacgtccacaacccaaggggttatggggaggcctctgctccctggacacagtagttctcaaactggacagtgtcaatcagcatcctccgggaggtctggggtggccccggaaatacatgtgtcccacctatcccagcaggagatgttgctgagatgggtgcattaaagtttaggctttccagagtttatattgctaacaacttgaaaggaaaaaagctaactagagaactgactggtcttatttgttttagattctgggctttactaagacttcctactctcagaatctctggactataaacgctgggtggggtgggagctgggaatgttattctggaaaattaatcacaaatgaaaagaaaatcaactctaagactccagttagaagatttttgaaaatggcagaacatgactggccttcattcaagtcagaatatttaaagcaatccttgctaagaagaacttgattttgtataagcagtcccttaaatacagttgcttctcaagaaaaccacacacaaaagatgtttgaatggctttatttacaaacatctcactccgtaagcctctgcaggtatttctagcctcccaggggccactgtcccgtttcacctgtaatttggatcacaattctgtttgttgtcacacacatcatatgaactgcttttcatgctgcttttatccacaaagctttacaagctttaat

SEQ ID NO: 366664 - DNA, 204 bp, Homo sapiens
aaaaaagatcattttttataaataatttataatttcgaattttggtaacaaacacataccttaaaatttaccatcataaccagttgtaagtatagagttttgtagagttaagaatatttacattgttgtgtagcagatttctagatttttttttatcttagaaaactctatacccattcaacaactattaatttccccttcctt

SEQ ID NO: 366665 - DNA, 353 bp, Homo sapiens
gggtaggatcctttaagaacagtctatcctcatagtaattttaaacacggcagctccttctcatttgatttgccctcctctacccaaattaaattgcctaattcatgagtaaacagctaataagagctcacggaagtcaatgagcccagcctcagaaaaacacaattttcaaattttggtagtcactgagtaaggctgcactaagtatagggtcccatttcaggtccaaagaaaaagagcatttcatccttctctgattgcatctgtccctgctgttgagcacctcacaaaccagggcaaacaatggctttgaggagatggggctgggccgacatccagaccccccaggacag

SEQ ID NO: 366666 - DNA, 220 bp, Homo sapiens
tagtccataaacagttagaactgatgcacacatccgtttctccttactcattttaaacagctatctgaaataggaagtgtaatataatctttaaagaatctgaaaacatgacagaaatgtttaaactataaacatatattgtatatgttagcatattgtatacattgcatattaacataagctagaatcattgacataaatttatataaacaaaaggtgt

SEQ ID NO: 366667 - DNA, 813 bp, Homo sapiens
gctagttcctggtgcgtcacgggggagttccttaaaggggaagcgagccgggctacggggcgagcgcggggtgcggtggtcggcggggaggcccccgcgctttaaaataatgcccgcggcgcccgcgcgaccatgcaatggcgagcgctcgtcctggggctggtgctcctccggcttggcctccatggagtattgtggctcgtcttcgggctggggcccagcatgggcttctaccagcgctttccgctcagcttcggcttccagcgtctgaggagccccgacggccccgcgtcgcccacctcggggcccgtgggccggcctgggggggtatccgggccgtcgtggctgcagccgccggggaccggggcagcgcagagcccgcgcaaggctccgcggcgtcctgggccggggatgtgcggcccagccaactggggctacgtgctgggcggccggggccgcggcccggacgagtacgagaagcgctacagcggcgccttccctccgcagctgcgtgcccagatgcgcgacctggcacggggcatgttcgtctttggctacgacaactacatggctcacgccttcccccaggacgagctcaaccccatccactgccgcggccgtgggcccgaccgcggggaccctttgagagcatgatttctaccgaagcaaggggacatcccaagctaaattcaaaggactgagccttttcaaaattctaggaaaccgatgagtttttcttgcttaaccatagcgtttatacgtataagtgtattttctatctcaatttttttgagaaaaaatattaaattttga

SEQ ID NO: 366668 - DNA, 650 bp, Homo sapiens
ttaaaaagatttctttttttgagttgtaaaaattactcataaaaatcctaataaattttaaagagcaagatattccttattacatttataaagaatatcttgctctttaaaatttattaggatttttatgagtaatttttattaaaagatttctttttttgaaaaaaaaaaaaaaaaaaaaaaaaaaaaaaaaaaaagataggaaaaaaaaaaaataaaaaaaaaaaaaagaaggggggcggcggcggctttgaattgattttctcccgggggggggcgccctatacattagcggcacctaccagtttttttttggtaaaaagggggctccccaattaagtagggtgattcgtattttaataacggaaggaggcgggggggcggtatttaccaaaccgcggtgctgcggtgggagaaacaacgtctggtaggtgggcaacttttggtgagagaggcccccctactttcttgggggggggcgaaacatattgggggaacgaaacttcacgagagagaattattagagacctgaaggggaataataaaaccctcagagcgggtagctggtggcacaccagacgagattatcggggaggaaaaatgtgtacacgaggaatactgtaagaattttcagggggtgtgaaaggggt

SEQ ID NO: 366669 - DNA, 6211 bp, Homo sapiens
gctagttcctggtgcgtcacgggggagttccttaaaggggaagcgagccgggctacggggcgagcgcggggtgcggtggtcggcggggaggcccccgcgctttaaaataatgcccgcggcgcccgcgcgaccatgcaatggcgagcgctcgtcctggggctggtgctcctccggcttggcctccatggagtattgtggctcgtcttcgggctggggcccagcatgggcttctaccagcgctttccgctcagcttcggcttccagcgtctgaggagccccgacggccccgcgtcgcccacctcggggcccgtgggccggcctgggggggtatccgggccgtcgtggctgcagccgccggggaccggggcagcgcagagcccgcgcaaggctccgcggcgtcctgggccggggatgtgcggcccagccaactggggctacgtgctgggcggccggggccgcggcccggacgagtacgagaagcgctacagcggcgccttccctccgcagctgcgtgcccagatgcgcgacctggcacggggcatgttcgtctttggctacgacaactacatggctcacgccttcccccaggacgagctcaaccccatccactgccgcggccgtgggcccgaccgcggggacccttcaaatctgaacatcaatgatgtactagggaactactcattgactcttgttgatgcattggatacacttgcaataatgggaaattcatccgagttccagaaagcagtcaagttagtgatcaacacagtttcatttgacaaagattccaccgtccaagtctttgaggccacgataagggtcctgggaagcctcctttctgctcacagaataataactgactccaagcagccctttggtgacatgacaattaaggactatgataatgagttgttatacatggcccatgacctggcggtgcggctcctccctgcttttgaaaacaccaagacagggattccatatcctcgggtgaatctaaagacaggagttcctcctgacaccaataatgagacatgcacagcgggagccggttccctcctggtggaatttgggattctgagtcgactcctgggggactccacatttgagtgggtggccagacgagcagtgaaagccctttggaacctccggagcaatgatacaggattactaggcaatgtcgtgaacattcagacgggccactgggttggaaagcagagtggcctgggtgccgggctggactccttctatgaatacctcttgaaatcttacattctctttggagaaaaagaagacctagaaatgtttaatgctgcatatcagagtattcagaactacttaagaagagggcgggaagcctgcaatgaaggagaaggagaccctccactctatgtcaacgtgaacatgttcagtgggcagctgatgaacacctggattgactctctgcaggcctttttccctggactgcaggtgctgataggagatgtggaagatgccatctgccttcatgccttctactatgccatatggaaacgatatggtgccctccctgagagatataactggcagctgcaggcccctgacgttctcttctacccactgagaccagagttagtggaatccacatatctcctctaccaggcaaccaagaatcccttctacctccatgtaggaatggatattctgcagagtctggaaaagtacacaaaagtcaagtgtgggtacgccacgctgcatcacgtcattgacaagtccacagaagaccggatggagagcttctttctcagtgagacctgtaaatatttgtatctgctgtttgatgaagacaatccagtacacaagtctggaaccagatacatgttcacaacagagggacacattgtatctgtggatgagcatcttcgggaattgccatggaaggaattcttctctgaagagggagggcaggaccaagggggaaagtctgtgcacaggccgaaacctcatgagttaaaagtcatcaactccagctccaactgcaatcgtgtacctgatgagaggaggtactccctgcccttaaagagcatctacatgcgacagattgaccagatggttggtttgatttgatctgctctctgtgaggcctcatcttgaaccagaccttaacgaccaaacccagaccatgccaaagtccagtctgaaatgaaaggggacagaagtcttgctgtccatggtggtgtaggaatttctgtgcaacacctcaccacgtctggttaatccttgcacacttcagtgtttctctcctgttcaataaaatgccctgttaaggatataatttgaagtgagaagatacatggaaattgccctcttatgacatgttgatgttataagcacaatagatggggcatctttggattgatgttcacagctttatacttcagaacctaagtctcttcactttgctggcacctgctatactggagtattgctatgtctttaaaaaatttttttttattatattttatttttttgagacagggtcttgatatttttttgggacagggttacctgggctcaagtgatccttctgcctcagcctcccgagtagctgggattacaggtgagcaccactgtacctggctagctacttctttgttagaggattgagaatgaaatttctgcaaaagggcccatggttcatttggtatccctatttaattgcattgaaaatgtcatcctttctgttgttagataattggggtcttcccctgatatccaaccgtgattttggatcacatgggagaaaaagtcatccagtttttcatgtttgcctcaagtaatctttacagtgttacaaattatttgcttaagaagaatggtcttaaccagaattcttaacagatagtctcttaggttattatgttatggtctaagaggttaactgacatcttttggatggtattttgcattttgaatatgaacttacctgaggaactcccatagttccagaatcaggtgccttttagggagagaacaatacctaagattgtctgagcttccatctttctcatatttcctaagcaaggattctcacttctgaccatatttgggttagagttctgttttgtttctgttttctgtgtctagtgccaattagctaaatcagggagaaagaaatgatcacatgacttttagcatccttgagccatttctctgtgtaatacaggctttagattagtgccttatattggttttggtttggggcactggatgtcgcagctactgctatggtttcaggaggcctgtttagccacatggtgagaccgtggtgaaagggggatggaaattgcttggccagtctttgcctttcatcctgtaaaagtaagcatgtagaaggaggaagttgtgctaaaatgcctttgtttttttgttattattttcttagccagaacatctctctttgaactcacactgatacacacctgctactcttacacagtgcagcagggctgactcttagtctggcttccatgaagcgtcatgggtggaaacgcattctagtaaaaaaggtaggaaatccctaaaacttccagcctcacatagcacggttctcacctgtcactgttttcccacctctaaggatttcatgtacatcttttcaaagctagaaataagcactgtctaagtttatgttgcatttttagtcaaaagggagaaatcttattccttcttgaaaattttaagtgttatggttttatatagttcagttctttgagatttttgaaaagagtattttcagtaataaacgtgccatctctatctcttaaacatttattacaacaattgttttaaaatagaaaaaataaaatgcttctattttaccttttttcatttcagaagcattattctgtttattaacagtgtcccatctactgaatagaaaactttgagaataatatatatatatattttaaatgttttcactgactcattgaaaatgttaattacacacacatgcatgcatgcacacacgagcatacttgtacctttgtctctgggcaaacaggtgggactgttagtgacccatttgggaaaatagagcatctcagagaaggaggtgagttcttcctgcctgtgatttctcttggcgctcccctcctctcccgctctggcttctgtggcggcagtggtgggtaagcactccagtgttctcttaatgaggcactttgcctgtcactcgagcaagcctgggtgttccttcctcctcatgctcctggaatagggaatagggatctcatgcttgcaaactacacaatgctgcaggtgcttcccaggggccacaggctgtcaggaaacgtgttttatgttaagtcacaaacccacttgacttctgggtactggaattaataccagtgggtgagactgagggtgagtgagttagtacatattaatcctggttgttgagcttccagactaccccgtccaaagtttgatgctatgtagtcagtggtttgtggggctggatgccagaaggttctttgagccagtttcaaaggttacttgttttttttttttttttttaaagtcagaatgttaacagctgtgatatatcctgcagggcttttgcagtttcttctgttctgtgttctgaaatcctgggtagagaatggctgaggaggagattaccagagaagttgctttgctcagtgctttgccccaggattgcctcaaatctgagtggacttcatcctttgcggcggctctgagcctggcccatcttcctattcccacgtgtagctagtgtctagtgtcagctttgctcaatgtggtggaaacattttgcagaactgttgtagaaagctgccttatagttggcttgacaaagcataattctctcataacaaactttcaaatcattacagtagcttagctactttagttgatgtgaccgaggaatcccttctagaatcataggtggcaagggagggtttgctagctctccatttgcactggccattgtgaaaaaccagcttctgtattcaaatctttccttcatttttttaaattttttttttggcagcgcttgtgctggaacttactcattgtaactgaatcctcagggcttttcttgttttagatcatggactgtgcacgtgacacttaaataattttctatgtatttaaagaaaaatgcaccaggatggtgtctgtgcacgtgactattagaggagcgtctgtagaagtacctggtttggtcagtgcagttgtgcaatctgagggccttgtttcctcctcccctttccccttctccccaccaaaggaaaatatccctcttaatgatttcgtagttcagtttactgaatgattaccacctgtaattcctctttggattgtgtagactcaacatgagacattcctttctgctttctggagggcaccaggggcctttctctttgataaattttttttgtctgttgacaaaaacaaaaatcttttttcaaatgtagtgctggtgaaaaggtagggctgagtgattaccttagccacagggtggctgagcaggaactttagaagaaaatcctgagctttcctgtccattcccagcatccagctcctattctagtgcctcttccctgcagggcagggaccccttgggaaatcgaggaggtgggacgggctgggccctgtgtcccaggtttcacagggctcagggttatgctcccgcttgaatctggacgtgaatctggtaaaaatatcaagtacctgtggaactccctgattctataccctcttccttctttctgcaaggcagaggaataatatttttaaaggttattttgttttagttttaaatagcaaaacacaagctgcatttttatttattttgcataagaaaggtaaatctttttacaaaaaaaagtatagagttggaaactctgggaaaacttacggaaatacacaaatgcttctctgtaatgtgcaatatgctttgcaactgtagatgatattttatgtttaatctgtaaataagaaatgtatttaaattaaaagggatctttttgtaaaaggaccaaatgttcttttataaatgtaataaggaatatcttgctctttaaaatttattaggatttttatgagtaatttttattaaaagatttctttttttgaacaaaaacaaaaaaaaacaaaaacaaaaaaaacaaaaacaaaaaaaacaaacaaaaaaaaaaca

SEQ ID NO: 366670 - DNA, 6157 bp, Homo sapiens
gctagttcctggtgcgtcacgggggagttccttaaaggggaagcgagccgggctacggggcgagcgcggggtgcggtggtcggcggggaggcccccgcgctttaaaataatgcccgcggcgcccgcgcgaccatgcaatggcgagcgctcgtcctggggctggtgctcctccggcttggcctccatggagtattgtggctcgtcttcgggctggggcccagcatgggcttctaccagcgctttccgctcagcttcggcttccagcgtctgaggagccccgacggccccgcgtcgcccacctcggggcccgtgggccggcctgggggggtatccgggccgtcgtggctgcagccgccggggaccggggcagcgcagagcccgcgcaaggctccgcggcgtcctgggccggggatgtgcggcccagccaactggggctacgtgctgggcggccggggccgcggcccggacgagtacgagaagcgctacagcggcgccttccctccgcagctgcgtgcccagatgcgcgacctggcacggggcatgttcgtctttggctacgacaactacatggctcacgccttcccccaggacgagctcaaccccatccactgccgcggccgtgggcccgaccgcggggacccttcaaatctgaacatcaatgatgtactagggaactactcattgactcttgttgatgcattggatacacttgcaataatgggaaattcatccgagttccagaaagcagtcaagttagtgatcaacacagtttcatttgacaaagattccaccgtccaagtctttgaggccacgataagggtcctgggaagcctcctttctgctcacagaataataactgactccaagcagccctttggtgacatgacaattaaggactatgataatgagttgttatacatggcccatgacctggcggtgcggctcctccctgcttttgaaaacaccaagacagggattccatatcctcgggtgaatctaaagacaggagttcctcctgacaccaataatgagacatgcacagcgggagccggttccctcctggtggaatttgggattctgagtcgactcctgggggactccacatttgagtgggtggccagacgagcagtgaaagccctttggaacctccggagcaatgatacaggattactaggcaatgtcgtgaacattcagacgggccactgggttggaaagcagagtggcctgggtgccgggctggactccttctatgaatacctcttgaaatcttacattctctttggagaaaaagaagacctagaaatgtttaatgctgcatatcagagtattcagaactacttaagaagagggcgggaagcctgcaatgaaggagaaggagaccctccactctatgtcaacgtgaacatgttcagtgggcagctgatgaacacctggattgactctctgcaggcctttttccctggactgcaggtgctgataggagatgtggaagatgccatctgccttcatgccttctactatgccatatggaaacgatatggtgccctccctgagagatataactggcagctgcaggcccctgacgttctcttctacccactgagaccagagttagtggaatccacatatctcctctaccaggcaaccaagaatcccttctacctccatgtaggaatggatattctgcagagtctggaaaagtacacaaaagtcaagtgtgggtacgccacgctgcatcacgtcattgacaagtccacagaagaccggatggagagcttctttctcagtgagacctgtaaatatttgtatctgctgtttgatgaagacaatccagtacacaagtctggaaccagatacatgttcacaacagagggacacattgtatctgtggatgagcatcttcgggaattgccatggaaggaattcttctctgaagagggagggcaggaccaagggggaaagtctgtgcacaggccgaaacctcatgagttaaaagtcatcaactccagctccaactgcaatcgtgtacctgatgagaggaggtactccctgcccttaaagagcatctacatgcgacagattgaccagatggttggtttgatttgatctgctctctgtgaggcctcatcttgaaccagaccttaacgaccaaacccagaccatgccaaagtccagtctgaaatgaaaggggacagaagtcttgctgtccatggtggtgtaggaatttctgtgcaacacctcaccacgtctggttaatccttgcacacttcagtgtttctctcctgttcaataaaatgccctgttaaggatataatttgaagtgagaagatacatggaaattgccctcttatgacatgttgatgttataagcacaatagatggggcatctttggattgatgttcacagctttatacttcagaacctaagtctcttcactttgctggcacctgctatactggagtattgctatgtctttaaaaaatttttttttattatattttatttttttgagacagggtcttgatatttttttgggacagggttacctgggctcaagtgatccttctgcctcagcctcccgagtagctgggattacaggtgagcaccactgtacctggctagctacttctttgttagaggattgagaatgaaatttctgcaaaagggcccatggttcatttggtatccctatttaattgcattgaaaatgtcatcctttctgttgttagataattggggtcttcccctgatatccaaccgtgattttggatcacatgggagaaaaagtcatccagtttttcatgtttgcctcaagtaatctttacagtgttacaaattatttgcttaagaagaatggtcttaaccagaattcttaacagatagtctcttaggttattatgttatggtctaagaggttaactgacatcttttggatggtattttgcattttgaatatgaacttacctgaggaactcccatagttccagaatcaggtgccttttagggagagaacaatacctaagattgtctgagcttccatctttctcatatttcctaagcaaggattctcacttctgaccatatttgggttagagttctgttttgtttctgttttctgtgtctagtgccaattagctaaatcagggagaaagaaatgatcacatgacttttagcatccttgagccatttctctgtgtaatacaggctttagattagtgccttatattggttttggtttggggcactggatgtcgcagctactgctatggtttcaggaggcctgtttagccacatggtgagaccgtggtgaaagggggatggaaattgcttggccagtctttgcctttcatcctgtaaaagtaagcatgtagaaggaggaagttgtgctaaaatgcctttgtttttttgttattattttcttagccagaacatctctctttgaactcacactgatacacacctgctactcttacacagtgcagcagggctgactcttagtctggcttccatgaagcgtcatgggtggaaacgcattctagtaaaaaaggtaggaaatccctaaaacttccagcctcacatagcacggttctcacctgtcactgttttcccacctctaaggatttcatgtacatcttttcaaagctagaaataagcactgtctaagtttatgttgcatttttagtcaaaagggagaaatcttattccttcttgaaaattttaagtgttatggttttatatagttcagttctttgagatttttgaaaagagtattttcagtaataaacgtgccatctctatctcttaaacatttattacaacaattgttttaaaatagaaaaaataaaatgcttctattttaccttttttcatttcagaagcattattctgtttattaacagtgtcccatctactgaatagaaaactttgagaataatatatatatatattttaaatgttttcactgactcattgaaaatgttaattacacacacatgcatgcatgcacacacgagcatacttgtacctttgtctctgggcaaacaggtgggactgttagtgacccatttgggaaaatagagcatctcagagaaggaggtgagttcttcctgcctgtgatttctcttggcgctcccctcctctcccgctctggcttctgtggcggcagtggtgggtaagcactccagtgttctcttaatgaggcactttgcctgtcactcgagcaagcctgggtgttccttcctcctcatgctcctggaatagggaatagggatctcatgcttgcaaactacacaatgctgcaggtgcttcccaggggccacaggctgtcaggaaacgtgttttatgttaagtcacaaacccacttgacttctgggtactggaattaataccagtgggtgagactgagggtgagtgagttagtacatattaatcctggttgttgagcttccagactaccccgtccaaagtttgatgctatgtagtcagtggtttgtggggctggatgccagaaggttctttgagccagtttcaaaggttacttgttttttttttttttttttaaagtcagaatgttaacagctgtgatatatcctgcagggcttttgcagtttcttctgttctgtgttctgaaatcctgggtagagaatggctgaggaggagattaccagagaagttgctttgctcagtgctttgccccaggattgcctcaaatctgagtggacttcatcctttgcggcggctctgagcctggcccatcttcctattcccacgtgtagctagtgtctagtgtcagctttgctcaatgtggtggaaacattttgcagaactgttgtagaaagctgccttatagttggcttgacaaagcataattctctcataacaaactttcaaatcattacagtagcttagctactttagttgatgtgaccgaggaatcccttctagaatcataggtggcaagggagggtttgctagctctccatttgcactggccattgtgaaaaaccagcttctgtattcaaatctttccttcatttttttaaattttttttttggcagcgcttgtgctggaacttactcattgtaactgaatcctcagggcttttcttgttttagatcatggactgtgcacgtgacacttaaataattttctatgtatttaaagaagtacctggtttggtcagtgcagttgtgcaatctgagggccttgtttcctcctcccctttccccttctccccaccaaaggaaaatatccctcttaatgatttcgtagttcagtttactgaatgattaccacctgtaattcctctttggattgtgtagactcaacatgagacattcctttctgctttctggagggcaccaggggcctttctctttgataaattttttttgtctgttgacaaaaacaaaaatcttttttcaaatgtagtgctggtgaaaaggtagggctgagtgattaccttagccacagggtggctgagcaggaactttagaagaaaatcctgagctttcctgtccattcccagcatccagctcctattctagtgcctcttccctgcagggcagggaccccttgggaaatcgaggaggtgggacgggctgggccctgtgtcccaggtttcacagggctcagggttatgctcccgcttgaatctggacgtgaatctggtaaaaatatcaagtacctgtggaactccctgattctataccctcttccttctttctgcaaggcagaggaataatatttttaaaggttattttgttttagttttaaatagcaaaacacaagctgcatttttatttattttgcataagaaaggtaaatctttttacaaaaaaaagtatagagttggaaactctgggaaaacttacggaaatacacaaatgcttctctgtaatgtgcaatatgctttgcaactgtagatgatattttatgtttaatctgtaaataagaaatgtatttaaattaaaagggatctttttgtaaaaggaccaaatgttcttttataaatgtaataaggaatatcttgctctttaaaatttattaggatttttatgagtaatttttattaaaagatttctttttttgaacaaaaacaaaaaaaaacaaaaacaaaaaaaacaaaaacaaaaaaaacaaacaaaaaaaaaaca

SEQ ID NO: 366671 - DNA, 3764 bp, Homo sapiens
ctccaccattatcttttttttttttttgagacggagtcccgctgtgttgcccaggctggagtgcagtggcatgatcttggctcactgcaacctctgcctcctgggctcaagtgatccttctgcctcagcctcccgagtagctgggattacaggtgagcaccactgtacctggctagctacttctttgttagaggattgagaatgaaatttctgcaaaagggcccatggttcatttggtatccctatttaattgcattgaaaatgtcatcctttctgttgttagataattggggtcttcccctgatatccaaccgtgattttggatcacatgggagaaaaagtcatccagtttttcatgtttgcctcaagtaatctttacagtgttacaaattatttgcttaagaagaatggtcttaaccagaattcttaacagatagtctcttaggttattatgttatggtctaagaggttaactgacatcttttggatggtattttgcattttgaatatgaacttacctgaggaactcccatagttccagaatcaggtgccttttagggagagaacaatacctaagattgtctgagcttccatctttctcatatttcctaagcaaggattctcacttctgaccatatttgggttagagttctgttttgtttctgttttctgtgtctagtgccaattagctaaatcagggagaaagaaatgatcacatgacttttagcatccttgagccatttctctgtgtaatacaggctttagattagtgccttatattggttttggtttggggcactggatgtcgcagctactgctatggtttcaggaggcctgtttagccacatggtgagaccgtggtgaaagggggatggaaattgcttggccagtctttgcctttcatcctgtaaaagtaagcatgtagaaggaggaagttgtgctaaaatgcctttgtttttttgttattattttcttagccagaacatctctctttgaactcacactgatacacacctgctactcttacacagtgcagcagggctgactcttagtctggcttccatgaagcgtcatgggtggaaacgcattctagtaaaaaaggtaggaaatccctaaaacttccagcctcacatagcacggttctcacctgtcactgttttcccacctctaaggatttcatgtacatcttttcaaagctagaaataagcactgtctaagtttatgttgcatttttagtcaaaagggagaaatcttattccttcttgaaaattttaagtgttatggttttatatagttcagttctttgagatttttgaaaagagtattttcagtaataaacgtgccatctctatctcttaaacatttattacaacaattgttttaaaatagaaaaaataaaatgcttctattttaccttttttcatttcagaagcattattctgtttattaacagtgtcccatctactgaatagaaaactttgagaataatatatatatatattttaaatgttttcactgactcattgaaaatgttaattacacacacatgcatgcatgcacacacgagcatacttgtacctttgtctctgggcaaacaggtgggactgttagtgacccatttgggaaaatagagcatctcagagaaggaggtgagttcttcctgcctgtgatttctcttggcgctcccctcctctcccgctctggcttctgtggcggcagtggtgggtaagcactccagtgttctcttaatgaggcactttgcctgtcactcgagcaagcctgggtgttccttcctcctcatgctcctggaatagggaatagggatctcatgcttgcaaactacacaatgctgcaggtgcttcccaggggccacaggctgtcaggaaacgtgttttatgttaagtcacaaacccacttgacttctgggtactggaattaataccagtgggtgagactgagggtgagtgagttagtacatattaatcctggttgttgagcttccagactaccccgtccaaagtttgatgctatgtagtcagtggtttgtggggctggatgccagaaggttctttgagccagtttcaaaggttacttgttttttttttttttttttaaagtcagaatgttaacagctgtgatatatcctgcagggcttttgcagtttcttctgttctgtgttctgaaatcctgggtagagaatggctgaggaggagattaccagagaagttgctttgctcagtgctttgccccaggattgcctcaaatctgagtggacttcatcctttgcggcggctctgagcctggcccatcttcctattcccacgtgtagctagtgtctagtgtcagctttgctcaatgtggtggaaacattttgcagaactgttgtagaaagctgccttatagttggcttgacaaagcataattctctcataacaaactttcaaatcattacagtagcttagctactttagttgatgtgaccgaggaatcccttctagaatcataggtggcaagggagggtttgctagctctccatttgcactggccattgtgaaaaaccagcttctgtattcaaatctttccttcatttttttaaattttttttttggcagcgcttgtgctggaacttactcattgtaactgaatcctcagggcttttcttgttttagatcatggactgtgcacgtgacacttaaataattttctatgtatttaaagaaaaatgcaccaggatggtgtctgtgcacgtgactattagaggagcgtctgtagaagtacctggtttggtcagtgcagttgtgcaatctgagggccttgtttcctcctcccctttccccttctccccaccaaaggaaaatatccctcttaatgatttcgtagttcagtttactgaatgattaccacctgtaattcctctttggattgtgtagactcaacatgagacattcctttctgctttctggagggcaccaggggcctttctctttgataaattttttttgtctgttgacaaaaacaaaaatcttttttcaaatgtagtgctggtgaaaaggtagggctgagtgattaccttagccacagggtggctgagcaggaactttagaagaaaatcctgagctttcctgtccattcccagcatccagctcctattctagtgcctcttccctgcagggcagggaccccttgggaaatcgaggaggtgggacgggctgggccctgtgtcccaggtttcacagggctcagggttatgctcccgcttgaatctggacgtgaatctggtaaaaatatcaagtacctgtggaactccctgattctataccctcttccttctttctgcaaggcagaggaataatatttttaaaggttattttgttttagttttaaatagcaaaacacaagctgcatttttatttattttgcataagaaaggtaaatctttttacaaaaaaaagtatagagttggaaactctgggaaaacttacggaaatacacaaatgcttctctgtaatgtgcaatatgctttgcaactgtagatgatattttatgtttaatctgtaaataagaaatgtatttaaattaaaagggatctttttgtaaaaggaccaaatgttcttttataaatgtaataaggaatatcttgctctttaaaatttattaggatttttatgagtaatttttattaaaagatttctttttttgaacaaaaacaaaaaaaaacaaaaacaaaaaaaacaaaaacaaaaaaaacaaacaaaaaaaaaaca

SEQ ID NO: 366672 - DNA, 388 bp, Homo sapiens
cccatactatatactgaattctcttatgtggcagggctcttaaacccaaagctcaaagtgctttctgcagaatactgtgaaatcctgacatattacaatggctgcgttaggaactttgatcctgtggaaaatattatcttctgctagagtctaatgtagataattaaaggcagtctgtctgcagaggtttaaggaatgagttaggagaaaaaattaatgttaattccgtttaaatgaaactaccagcagctgctggagaggtagagatctgtcagtgagctttcttttcaccactgaatgtgctgcttgggtttgcaggcgggaagcctgcaatgaaggagaaggagaccctccactctatgtcaacgtgaacatgttcagtgggcag

SEQ ID NO: 366673 - DNA, 147 bp, Homo sapiens
agcctgatgacctgtgtcctctccttaggtgctgataggagatgtggaagatgccatctgccttcatgccttctactatgccatatggaaacgatatggtgccctccctgagagatataactggcagctgcaggcccctgacgttct

SEQ ID NO: 366674 - DNA, 805 bp, Homo sapiens
  misc_feature (439)..(440): n is a, c, g, or t
  misc_feature (468)..(468): n is a, c, g, or t
  misc_feature (496)..(496): n is a, c, g, or t
  misc_feature (526)..(526): n is a, c, g, or t
  misc_feature (531)..(531): n is a, c, g, or t
  misc_feature (548)..(548): n is a, c, g, or t
  misc_feature (550)..(550): n is a, c, g, or t
  misc_feature (566)..(566): n is a, c, g, or t
  misc_feature (640)..(644): n is a, c, g, or t
  misc_feature (664)..(664): n is a, c, g, or t
  misc_feature (667)..(667): n is a, c, g, or t
  misc_feature (672)..(672): n is a, c, g, or t
  misc_feature (687)..(687): n is a, c, g, or t
  misc_feature (705)..(705): n is a, c, g, or t
  misc_feature (717)..(717): n is a, c, g, or t
  misc_feature (780)..(780): n is a, c, g, or t
gctagttcctggtgcgtcacgggggagttccttaaaggggaagcgagccgggctacggggcgagcgcggggtgcggtggtcggcggggaggcccccgcgctttaaaataatgcccgcggcgcccgcgcgaccatgcaatggcgagcgctcgtcctggggctggtgctcctccggcttggcctccatggagtattgtggctcgtcttcgggctggggcccagcatgggcttctaccagcgctttccgctcagcttcggcttccagcgtctgaggagccccgacggccccgcgtcgcccacctcggggcccgtgggccggcctgggggggtatccgggccgtcgtggctgcagccgccggggaccggggcagcgcagagcccgcgcaaggctccgcggcgtcctgggccggggatgtgcggcgcgcgagcgcgaacgtttnntacgtttcgttttcgttcgcgttttcgntcgttcgcgcgtttacgtatttacgtantaatcgtcgtacgatcgttcgtcgcgttcncgtcngtcgatcgttcgtttcncngattattcgtcgtacngttttcgacgtttttcgatttttcgttcgttttttcgtacgtacgaacgtacgatttcgtcgacgtcgcgttcnnnnngatttacgtatcgtcgaacncgngatcngacgttccgtcgttngcgttttttcgcgttacngtcgtttttacncgttcgaaaatcgtttaacgatcgaatttattttacgtattttaacgtacgtcgattttactngttttttttattcgattttttatac

SEQ ID NO: 366675 - DNA, 5675 bp, Homo sapiens
ataaataagagttgctggcaattatagtttctgatgggtgtttacttttattgtcttctcttttgaaataaagtctttttgttgaattttaattttctttttcagttcaaatctgaacatcaatgatgtactagggaactactcattgactcttgttgatgcattggatacacttgcaataatgggaaattcatccgagttccagaaagcagtcaagttagtgatcaacacagtttcatttgacaaagattccaccgtccaagtctttgaggccacgataagggtcctgggaagcctcctttctgctcacagaataataactgactccaagcagccctttggtgacatgacaattaaggactatgataatgagttgttatacatggcccatgacctggcggtgcggctcctccctgcttttgaaaacaccaagacagggattccatatcctcgggtgaatctaaagacaggagttcctcctgacaccaataatgagacatgcacagcgggagccggttccctcctggtggaatttgggattctgagtcgactcctgggggactccacatttgagtgggtggccagacgagcagtgaaagccctttggaacctccggagcaatgatacaggattactaggcaatgtcgtgaacattcagacgggccactgggttggaaagcagagtggcctgggtgccgggctggactccttctatgaatacctcttgaaatcttacattctctttggagaaaaagaagacctagaaatgtttaatgctgcatatcagagtattcagaactacttaagaagagggcgggaagcctgcaatgaaggagaaggagaccctccactctatgtcaacgtgaacatgttcagtgggcagctgatgaacacctggattgactctctgcaggcctttttccctggactgcaggtgctgataggagatgtggaagatgccatctgccttcatgccttctactatgccatatggaaacgatatggtgccctccctgagagatataactggcagctgcaggcccctgacgttctcttctacccactgagaccagagttagtggaatccacatatctcctctaccaggcaaccaagaatcccttctacctccatgtaggaatggatattctgcagagtctggaaaagtacacaaaagtcaagtgtgggtacgccacgctgcatcacgtcattgacaagtccacagaagaccggatggagagcttctttctcagtgagacctgtaaatatttgtatctgctgtttgatgaagacaatccagtacacaagtctggaaccagatacatgttcacaacagagggacacattgtatctgtggatgagcatcttcgggaattgccatggaaggaattcttctctgaagagggagggcaggaccaagggggaaagtctgtgcacaggccgaaacctcatgagttaaaagtcatcaactccagctccaactgcaatcgtgtacctgatgagaggaggtactccctgcccttaaagagcatctacatgcgacagattgaccagatggttggtttgatttgatctgctctctgtgaggcctcatcttgaaccagaccttaacgaccaaacccagaccatgccaaagtccagtctgaaatgaaaggggacagaagtcttgctgtccatggtggtgtaggaatttctgtgcaacacctcaccacgtctggttaatccttgcacacttcagtgtttctctcctgttcaataaaatgccctgttaaggatataatttgaagtgagaagatacatggaaattgccctcttatgacatgttgatgttataagcacaatagatggggcatctttggattgatgttcacagctttatacttcagaacctaagtctcttcactttgctggcacctgctatactggagtattgctatgtctttaaaaaatttttttttattatattttatttttttgagacagggtcttgatatttttttgggacagggttacctgggctcaagtgatccttctgcctcagcctcccgagtagctgggattacaggtgagcaccactgtacctggctagctacttctttgttagaggattgagaatgaaatttctgcaaaagggcccatggttcatttggtatccctatttaattgcattgaaaatgtcatcctttctgttgttagataattggggtcttcccctgatatccaaccgtgattttggatcacatgggagaaaaagtcatccagtttttcatgtttgcctcaagtaatctttacagtgttacaaattatttgcttaagaagaatggtcttaaccagaattcttaacagatagtctcttaggttattatgttatggtctaagaggttaactgacatcttttggatggtattttgcattttgaatatgaacttacctgaggaactcccatagttccagaatcaggtgccttttagggagagaacaatacctaagattgtctgagcttccatctttctcatatttcctaagcaaggattctcacttctgaccatatttgggttagagttctgttttgtttctgttttctgtgtctagtgccaattagctaaatcagggagaaagaaatgatcacatgacttttagcatccttgagccatttctctgtgtaatacaggctttagattagtgccttatattggttttggtttggggcactggatgtcgcagctactgctatggtttcaggaggcctgtttagccacatggtgagaccgtggtgaaagggggatggaaattgcttggccagtctttgcctttcatcctgtaaaagtaagcatgtagaaggaggaagttgtgctaaaatgcctttgtttttttgttattattttcttagccagaacatctctctttgaactcacactgatacacacctgctactcttacacagtgcagcagggctgactcttagtctggcttccatgaagcgtcatgggtggaaacgcattctagtaaaaaaggtaggaaatccctaaaacttccagcctcacatagcacggttctcacctgtcactgttttcccacctctaaggatttcatgtacatcttttcaaagctagaaataagcactgtctaagtttatgttgcatttttagtcaaaagggagaaatcttattccttcttgaaaattttaagtgttatggttttatatagttcagttctttgagatttttgaaaagagtattttcagtaataaacgtgccatctctatctcttaaacatttattacaacaattgttttaaaatagaaaaaataaaatgcttctattttaccttttttcatttcagaagcattattctgtttattaacagtgtcccatctactgaatagaaaactttgagaataatatatatatatattttaaatgttttcactgactcattgaaaatgttaattacacacacatgcatgcatgcacacacgagcatacttgtacctttgtctctgggcaaacaggtgggactgttagtgacccatttgggaaaatagagcatctcagagaaggaggtgagttcttcctgcctgtgatttctcttggcgctcccctcctctcccgctctggcttctgtggcggcagtggtgggtaagcactccagtgttctcttaatgaggcactttgcctgtcactcgagcaagcctgggtgttccttcctcctcatgctcctggaatagggaatagggatctcatgcttgcaaactacacaatgctgcaggtgcttcccaggggccacaggctgtcaggaaacgtgttttatgttaagtcacaaacccacttgacttctgggtactggaattaataccagtgggtgagactgagggtgagtgagttagtacatattaatcctggttgttgagcttccagactaccccgtccaaagtttgatgctatgtagtcagtggtttgtggggctggatgccagaaggttctttgagccagtttcaaaggttacttgttttttttttttttttttaaagtcagaatgttaacagctgtgatatatcctgcagggcttttgcagtttcttctgttctgtgttctgaaatcctgggtagagaatggctgaggaggagattaccagagaagttgctttgctcagtgctttgccccaggattgcctcaaatctgagtggacttcatcctttgcggcggctctgagcctggcccatcttcctattcccacgtgtagctagtgtctagtgtcagctttgctcaatgtggtggaaacattttgcagaactgttgtagaaagctgccttatagttggcttgacaaagcataattctctcataacaaactttcaaatcattacagtagcttagctactttagttgatgtgaccgaggaatcccttctagaatcataggtggcaagggagggtttgctagctctccatttgcactggccattgtgaaaaaccagcttctgtattcaaatctttccttcatttttttaaattttttttttggcagcgcttgtgctggaacttactcattgtaactgaatcctcagggcttttcttgttttagatcatggactgtgcacgtgacacttaaataattttctatgtatttaaagaaaaatgcaccaggatggtgtctgtgcacgtgactattagaggagcgtctgtagaagtacctggtttggtcagtgcagttgtgcaatctgagggccttgtttcctcctcccctttccccttctccccaccaaaggaaaatatccctcttaatgatttcgtagttcagtttactgaatgattaccacctgtaattcctctttggattgtgtagactcaacatgagacattcctttctgctttctggagggcaccaggggcctttctctttgataaattttttttgtctgttgacaaaaacaaaaatcttttttcaaatgtagtgctggtgaaaaggtagggctgagtgattaccttagccacagggtggctgagcaggaactttagaagaaaatcctgagctttcctgtccattcccagcatccagctcctattctagtgcctcttccctgcagggcagggaccccttgggaaatcgaggaggtgggacgggctgggccctgtgtcccaggtttcacagggctcagggttatgctcccgcttgaatctggacgtgaatctggtaaaaatatcaagtacctgtggaactccctgattctataccctcttccttctttctgcaaggcagaggaataatatttttaaaggttattttgttttagttttaaatagcaaaacacaagctgcatttttatttattttgcataagaaaggtaaatctttttacaaaaaaaagtatagagttggaaactctgggaaaacttacggaaatacacaaatgcttctctgtaatgtgcaatatgctttgcaactgtagatgatattttatgtttaatctgtaaataagaaatgtatttaaattaaaagggatctttttgtaaaaggaccaaatgttcttttataaatgtaataaggaatatcttgctctttaaaatttattaggatttttatgagtaatttttattaaaagatttctttttttgaacaaaaacaaaaaaaaacaaaaacaaaaaaaacaaaaacaaaaaaaacaaacaaaaaaaaaaca

SEQ ID NO: 366676 - DNA, 2156 bp, Homo sapiens
gctagttcctggtgcgtcacgggggagttccttaaaggggaagcgagccgggctacggggcgagcgcggggtgcggtggtcggcggggaggcccccgcgctttaaaataatgcccgcggcgcccgcgcgaccatgcaatggcgagcgctcgtcctggggctggtgctcctccggcttggcctccatggagtattgtggctcgtcttcgggctggggcccagcatgggcttctaccagcgctttccgctcagcttcggcttccagcgtctgaggagccccgacggccccgcgtcgcccacctcggggcccgtgggccggcctgggggggtatccgggccgtcgtggctgcagccgccggggaccggggcagcgcagagcccgcgcaaggctccgcggcgtcctgggccggggatgtgcggcccagccaactggggctacgtgctgggcggccggggccgcggcccggacgagtacgagaagcgctacagcggcgccttccctccgcagctgcgtgcccagatgcgcgacctggcacggggcatgttcgtctttggctacgacaactacatggctcacgccttcccccaggacgagctcaaccccatccactgccgcggccgtgggcccgaccgcggggacccttcaaatctgaacatcaatgatgtactagggaactactcattgactcttgttgatgcattggatacacttgcaataatgggaaattcatccgagttccagaaagcagtcaagttagtgatcaacacagtttcatttgacaaagattccaccgtccaagtctttgaggccacgataagggtcctgggaagcctcctttctgctcacagaataataactgactccaagcagccctttggtgacatgacaattaaggactatgataatgagttgttatacatggcccatgacctggcggtgcggctcctccctgcttttgaaaacaccaagacagggattccatatcctcgggtgaatctaaagacaggagttcctcctgacaccaataatgagacatgcacagcgggagccggttccctcctggtggaatttgggattctgagtcgactcctgggggactccacatttgagtgggtggccagacgagcagtgaaagccctttggaacctccggagcaatgatacaggattactaggcaatgtcgtgaacattcagacgggccactgggttggaaagcagagtggcctgggtgccgggctggactccttctatgaatacctcttgaaatcttacattctctttggagaaaaagaagacctagaaatgtttaatgctgcatatcagagtattcagaactacttaagaagagggcgggaagcctgcaatgaaggagaaggagaccctccactctatgtcaacgtgaacatgttcagtgggcagctgatgaacacctggattgactctctgcaggcctttttccctggactgcaggtgctgataggagatgtggaagatgccatctgccttcatgccttctactatgccatatggaaacgatatggtgccctccctgagagatataactggcagctgcaggcccctgacgttctcttctacccactgagaccagagttagtggaatccacatatctcctctaccaggcaaccaagaatcccttctacctccatgtaggaatggatattctgcagagtctggaaaagtacacaaaagtcaagtgtgggtacgccacgctgcatcacgtcattgacaagtccacagaagaccggatggagagcttctttctcagtgagacctgtaaatatttgtatctggtatgtgtgttgcaagatgaacccaggaatatttagtattgcttagagcaagcattcgcatagtcttccatctgacaggtacttactggctaaagctatgtgctggacattgtgcattcccaggatgcaaacgctgtcagaaccaaaggatattactatcttctttcatggtttccaaccttgttgaaaagtcatttgtcaagtaaaccaagaactgaacttatgattacaaactgcggcagatcttgcccagtacagacacagtaacagcgacggttacgtgtaccagattacatgcgttcaggtaaaactctagatgagcacgaggaccatagtctgatcga

SEQ ID NO: 366677 - DNA, 5484 bp, Homo sapiens
  misc_feature (7)..(7): n is a, c, g, or t
  misc_feature (316)..(317): n is a, c, g, or t
  misc_feature (348)..(348): n is a, c, g, or t
  misc_feature (657)..(657): n is a, c, g, or t
tctgtgncttgccccagagctgatccttgtctttgtccacttctcagcgaggatggcacttcagggagcccttcccttactatcgcagagagagcaggccctccccagtcatgtccaacccagaactctgttttgttttcttcatagccctagcatcacagaaaatcaccctgtgcattcatggatgtccacgggggcaagggctttgtgttgcttaacccagcatcctgaaccgtgtttgttgaatgaatacagaaccccgtttgctctgggagagcacagaaaacagtcttctatcatatatcatagccagctnnaaacagcagatggcttccatatccagagagnaagaaccagagagagagagaaagagagagagtttgggtctttctcctctgtgcctgctctctccagagaaactggaggggtagcagttagcattcccccgctggttccaccaagcacagtcaaggtctctaggacatggccacccctcacctgtggaagcggtcctgctggggtgggtgggtgttagttggttctggtttgggtcagagacacccagtggcccaggtgggcgtggggccagggcgcagacgagaaggggcacgagggctccgctccgaggacccagcggcaagcaccggtcccgggcgngccccagcccacccactcgcgtgcccacggcggcattattccctataaggatctgaacgatccgggggcggccccgccccgttaccccttgcccccggccccgccccctttttggagggccgatgaggtaatgcggctctgccattggtctgagggggcgggccccaacagcccgaggcggggtccccgggggcccagcgctatatcactcggccgcccaggcagcggcgcagagcgggcagcaggcaggcggcgggcgctcagacggcttctcctcctcctcttgctcctccagctcctgctccttcgccgggaggccgcccgccgagtcctgcgccagcgccgaggcagcctcgctgcgccccatcccgtcccgccgggcactcggagggcagcgcgccggaggccaaggttgccccgcacggcccggcgggcgagcgagctcgggctgcagcagccccgccggcggcgcgcacggcaactttggagaggcgagcagcagccccggcagcggcggcagcagcggcaatgaccccttggctcgggctcatcgtgctcctgggcagctggagcctgggggactggggcgccgaggcgtgcacatgctcgcccagccacccccaggacgccttctgcaactccgacatcgtgatccgggccaaggtggtggggaagaagctggtaaaggaggggcccttcggcacgctggtctacaccatcaagcagatgaagatgtaccgaggcttcaccaagatgccccatgtgcagtacatccatacggaagcttccgagagtctctgtggccttaagctggaggtcaacaagtaccagtacctgctgacaggtcgcgtctatgatggcaagatgtacacggggctgtgcaacttcgtggagaggtgggaccagctcaccctctcccagcgcaaggggctgaactatcggtatcacctgggttgtaactgcaagatcaagtcctgctactacctgccttgctttgtgacttccaagaacgagtgtctctggaccgacatgctctccaatttcggttaccctggctaccagtccaaacactacgcctgcatccggcagaagggcggctactgcagctggtaccgaggatgggcccccccggataaaagcatcatcaatgccacagacccctgagcgccagaccctgccccacctcacttccctcccttcccgctgagcttcccttggacactaactcttcccagatgatgacaatgaaattagtgcctgttttcttgcaaatttagcacttggaacatttaaagaaaggtctatgctgtcatatggggtttattgggaactatcctcctggccccaccctgccccttctttttggttttgacatcattcatttccacctgggaatttctggtgccatgccagaaagaatgaggaacctgtattcctcttcttcgtgataatataatctctatttttttaggaaaacaaaaatgaaaaactactccatttgaggattgtaattcccacccctcttgcttcttccccacctcaccatctcccagaccctcttccctttgcccttctcctccaatacataaaggacacagacaaggaacttgctgaaaggccaaccatttcaggatcagtcaaaggcagcaagcagatagactcaaggtgtgtgaaagatgttatacaccaggagctgccactgcatgtcccaaccagactgtgtctgtctgtgtctgcatgtaagagtgagggagggaaggaaggaactacaagagagtcggagatgatgcagcacacacacaattccccagcccagtgatgcttgtgttgaccagatgttcctgagtctggagcaagcacccaggccagaataacagagctttcttagttggtgaagacttaaacatctgcctgaggtcaggaggcaatttgcctgccttgtacaaaagctcaggtgaaagactgagatgaatgtctttcctctccctgcctcccaccagacttcctcctggaaaacgctttggtagatttggccaggagctttcttttatgtaaattggataaatacacacaccatacactatccacagatatagccaagtagatttgggtagaggatactatttccagaatagtgtttagctcacctagggggatatgtttgtatacacatttgcatatacccacatggggacataagctaatttttttacaggacacagaattctgttcaatgctgttaaatatgccaatagtttaatctcttctattttgttgtcgttgcttgtttgaagaaaatcatgacattccaagttgacatttttttttcattttaattaaaatttgaaattctgaacaccgtcagcaccctctcttccctatcatgggtcatctgacccctgtccgtctccttgtccctgcttcatgtttgggggcctttctttaactgccttcctggcttagctcagatggcagatgagagtgtagtcaagggcctgggcacaggagggagagctgcagagtgtcctgcctgccttggctggagggacacctctcctgggtgtggagacagcttggttccctttccctagctccctggtgggtgaatgccacctcctgagatcctcacctcttggaattaaaattgttggtcactggggaaagcctgagtttgcaaccagttgtagggtttctgttgtgttttttttttttttttgaaataaaactataatataaattctcctattaaataaaattattttaagttttagtgtcaaaagtgagatgctgagagtaggtgataatgtatattttacagagtgggggttggcaggatggtgacattgaacatgattgctctctgtctcttttttcagcttatgggtatttatcttctattagtatttgtatcttcagttcattccactttaggaaacagagctgccaattgaaacagaagaagaaaaaaaaaaaaagcagcagacaacacactgtagagtcttgcacacacacaagtgcccaggcaaggtgcttggcagaaccgcagagtgggaagagagtaccggcatcgggtttccttgggatcaatttcattaccgtgtacctttcccattgtggtcatgccatttggcagggggagaatgggaggcttggccttctttgtgaggcagtgtgagcagaagctgatgccagcatgtcactggttttgaagggatgagcccagacttgatgttttgggattgtccttattttaacctcaaggtctcgcatggtggggcccctgaccaacctacacaagttccctcccacaagtggacatcagtgtcttctctgtgaggcatctggccattcgcactccctggtgtggtcagcctctctcacacaaggaggaacttgggtgaaggctgagtgtgaggcacctgaagtttccctgcggagtcgataaattagcagaaccacatccccatctgttaggccttggtgaggaggccctgggcaaagaagggtctttcgcaaagcgatgtcagagggcggttttgagctttctataagctatagctttgtttatttcacccgttcacttactgtataatttaaaatcatttatgtagctgagacacttctgtatttcaatcatatcatgaacattttattttgctaaatcttgtgtcatgtgtaggctgtaatatgtgtacattgtgtttaagagaaaaatgaaacccacatgccgccattttcctgaatcaaattctgcagtggaatggagaggaaaatacttctaggcaagcagctagactggtgaattgggggaaatagaaggaactagtaactgagactcctccagcctcctccctattggaatcccaatggctcctggagtaggaaaaaagtttaaactacattcatgttcttgttctgtgtcactcggccctgggtagtctaccatttacttcaccccaagtcctgctgcccatccagttgggaagccatgattttcctaagaatccagggccatgggagatacaattccaagttctcgcttcctcctttgggcatctcttctgcctcccaatcaaggaagctccatgctcaggctctcagctctcgggccagtgctctgctctgtccagggtaggtaatactgggagactcctgtcttttaccctcccctcgttccagacctgcctcatggtggcaacatggttcttgaacaattaaagaaacaaatgactttttggaatagccctgtctagggcaaactgtggcccccaggagacactacccttccatgccccagacctctgtcttgcatgtgacaattgacaatctggactaccccaagatggcacccaagtgtttggcttctggctacctaaggttaacatgtcactagagtatttttatgagagacaaacattataaaaatctgatggcaaaagcaaaacaaaatggaaagtaggggaggtggatgtgacaacaacttccaaattggctctttggaggcgagaggaaggggagaacttggagaatagtttttgctttgggggtagaggcttcttagattctcccagcatccgcctttccctttagccagtctgctgtcctgaaacccagaagtgatggagagaaaccaacaagagatctcgaaccctgtctagaaggaatgtatttgttgctaaatttcgtagcactgtttacagttttcctccatgttatttatgaattttatattccgtgaatgtatattgtcttgtaatgttgcataatgttcactttttatagtgtgtcctttattctaaacagtaaagtggttttatttctatcaca

SEQ ID NO: 366678 - DNA, 3432 bp, Homo sapiens
  misc_feature (7)..(7): n is a, c, g, or t
  misc_feature (316)..(317): n is a, c, g, or t
  misc_feature (348)..(348): n is a, c, g, or t
  misc_feature (657)..(657): n is a, c, g, or t
tctgtgncttgccccagagctgatccttgtctttgtccacttctcagcgaggatggcacttcagggagcccttcccttactatcgcagagagagcaggccctccccagtcatgtccaacccagaactctgttttgttttcttcatagccctagcatcacagaaaatcaccctgtgcattcatggatgtccacgggggcaagggctttgtgttgcttaacccagcatcctgaaccgtgtttgttgaatgaatacagaaccccgtttgctctgggagagcacagaaaacagtcttctatcatatatcatagccagctnnaaacagcagatggcttccatatccagagagnaagaaccagagagagagagaaagagagagagtttgggtctttctcctctgtgcctgctctctccagagaaactggaggggtagcagttagcattcccccgctggttccaccaagcacagtcaaggtctctaggacatggccacccctcacctgtggaagcggtcctgctggggtgggtgggtgttagttggttctggtttgggtcagagacacccagtggcccaggtgggcgtggggccagggcgcagacgagaaggggcacgagggctccgctccgaggacccagcggcaagcaccggtcccgggcgngccccagcccacccactcgcgtgcccacggcggcattattccctataaggatctgaacgatccgggggcggccccgccccgttaccccttgcccccggccccgccccctttttggagggccgatgaggtaatgcggctctgccattggtctgagggggcgggccccaacagcccgaggcggggtccccgggggcccagcgctatatcactcggccgcccaggcagcggcgcagagcgggcagcaggcaggcggcgggcgctcagacggcttctcctcctcctcttgctcctccagctcctgctccttcgccgggaggccgcccgccgagtcctgcgccagcgccgaggcagcctcgctgcgccccatcccgtcccgccgggcactcggagggcagcgcgccggaggccaaggttgccccgcacggcccggcgggcgagcgagctcgggctgcagcagccccgccggcggcgcgcacggcaactttggagaggcgagcagcagccccggcagcggcggcagcagcggcaatgaccccttggctcgggctcatcgtgctcctgggcagctggagcctgggggactggggcgccgaggcgtgcacatgctcgcccagccacccccaggacgccttctgcaactccgacatcgtgatccgggccaaggtggtggggaagaagctggtaaaggaggggcccttcggcacgctggtctacaccatcaagcagatgaagatgtaccgaggcttcaccaagatgccccatgtgcagtacatccatacggaagcttccgagagtctctgtggccttaagctggaggtcaacaagtaccagtacctgctgacaggtcgcgtctatgatggcaagatgtacacggggctgtgcaacttcgtggagaggtgggaccagctcaccctctcccagcgcaaggggctgaactatcggtatcacctgggttgtaactgcaagatcaagtcctgctactacctgccttgctttgtgacttccaagaacgagtgtctctggaccgacatgctctccaatttcggttaccctggctaccagtccaaacactacgcctgcatccggcagaagggcggctactgcagctggtaccgaggatgggcccccccggataaaagcatcatcaatgccacagacccctgagcgccagaccctgccccacctcacttccctcccttcccgctgagcttcccttggacactaactcttcccagatgatgacaatgaaattagtgcctgttttcttgcaaatttagcacttggaacatttaaagaaaggtctatgctgtcatatggggtttattgggaactatcctcctggccccaccctgccccttctttttggttttgacatcattcatttccacctgggaatttctggtgccatgccagaaagaatgaggaacctgtattcctcttcttcgtgataatataatctctatttttttaggaaaacaaaaatgaaaaactactccatttgaggattgtaattcccacccctcttgcttcttccccacctcaccatctcccagaccctcttccctttgcccttctcctccaatacataaaggacacagacaaggaacttgctgaaaggccaaccatttcaggatcagtcaaaggcagcaagcagatagactcaaggtgtgtgaaagatgttatacaccaggagctgccactgcatgtcccaaccagactgtgtctgtctgtgtctgcatgtaagagtgagggagggaaggaaggaactacaagagagtcggagatgatgcagcacacacacaattccccagcccagtgatgcttgtgttgaccagatgttcctgagtctggagcaagcacccaggccagaataacagagctttcttagttggtgaagacttaaacatctgcctgaggtcaggaggcaatttgcctgccttgtacaaaagctcaggtgaaagactgagatgaatgtctttcctctccctgcctcccaccagacttcctcctggaaaacgctttggtagatttggccaggagctttcttttatgtaaattggataaatacacacaccatacactatccacagatatagccaagtagatttgggtagaggatactatttccagaatagtgtttagctcacctagggggatatgtttgtatacacatttgcatatacccacatggggacataagctaatttttttacaggacacagaattctgttcaatgctgttaaatatgccaatagtttaatctcttctattttgttgtcgttgcttgtttgaagaaaatcatgacattccaagttgacatttttttttcattttaattaaaatttgaaattctgaacaccgtcagcaccctctcttccctatcatgggtcatctgacccctgtccgtctccttgtccctgcttcatgtttgggggcctttctttaactgccttcctggcttagctcagatggcagatgagagtgtagtcaagggcctgggcacaggagggagagctgcagagtgtcctgcctgccttggctggagggacacctctcctgggtgtggagacagcttggttccctttccctagctccctggtgggtgaatgccacctcctgagatcctcacctcttggaattaaaattgttggtcactggggaaagcctgagtttgcaaccagttgtagggtttctgttgtgttttttttttttttttgaaataaaactataatataaattctcctattaaataaaattattttaagttttagtgtc

SEQ ID NO: 366679 - DNA, 1343 bp, Homo sapiens
ctcatgaatttgcaaatttattgactgaggcactggggttgggaggtagttgtacagaaaccaaagaggctaaacagcagaactagatgcagccggagagctcaatggcttcttccaggtaggttaagacatgaaggatttgcaaacctcgggtagcactatgagagctctaagcccatcggtgcccctggaaaacacctccaactccttcgcctccgtggtaccctgggggatctatttggacggccaggtaggcgcctgcttctgctgggtctggtggcagatcgggacgcccttgccactcccggagccacccacggaggagccgccgccgccgcctccagaggaaccacctccgcagacggagcccccgccactgatgatgcagccgctgccaatcccggaggagccgccgccgcagccggagctcccgccgcccccgccgctggagaagcagccgcttccgccgctgccgccgccgccggacgacccccctccgtaactcggctggggcgcgcacgaggtctgagtgacctgctgcgaggagacgtagccggagccgctgccgccagaggagcctccgccgcagccagagccgccgccagagccgccgccagagtagccgcagacagagccgccgcccccgccgctggagaagcagccggagccgcccccggaggagccgccgctagagacgcctccgtagctctggcactggaccgcctggcccgagaagccgccgccgccggaggagggaatccggaatccgggcaaactgtggcccccaggagacactacccttccatgccccagacctctgtcttgcatgtgacaattgacaatctggactaccccaagatggcacccaagtgtttggcttctggctacctaaggttaacatgtcactagagtatttttatgagagacaaacattataaaaatctgatggcaaaagcaaaacaaaatggaaagtaggggaggtggatgtgacaacaacttccaaattggctctttggaggcgagaggaaggggagaacttggagaatagtttttgctttgggggtagaggcttcttagattctcccagcatccgcctttccctttagccagtctgctgtcctgaaacccagaagtgatggagagaaaccaacaagagatctcgaaccctgtctagaaggaatgtatttgttgctaaatttcgtagcactgtttacagttttcctccatgttatttatgaattttatattccgtgaatgtatattgtcttgtaatgttgcataatgttcactttttatagtgtgtcctttattctaaacagtaaagtggttttatttctatcaca

SEQ ID NO: 366680 - DNA, 1877 bp, Homo sapiens
  misc_feature (7)..(7): n is a, c, g, or t
  misc_feature (316)..(317): n is a, c, g, or t
  misc_feature (348)..(348): n is a, c, g, or t
  misc_feature (657)..(657): n is a, c, g, or t
  misc_feature (1692)..(1693): n is a, c, g, or t
  misc_feature (1695)..(1696): n is a, c, g, or t
  misc_feature (1718)..(1718): n is a, c, g, or t
  misc_feature (1724)..(1724): n is a, c, g, or t
  misc_feature (1726)..(1726): n is a, c, g, or t
  misc_feature (1728)..(1728): n is a, c, g, or t
  misc_feature (1731)..(1731): n is a, c, g, or t
  misc_feature (1741)..(1741): n is a, c, g, or t
  misc_feature (1743)..(1743): n is a, c, g, or t
  misc_feature (1750)..(1750): n is a, c, g, or t
  misc_feature (1753)..(1754): n is a, c, g, or t
tctgtgncttgccccagagctgatccttgtctttgtccacttctcagcgaggatggcacttcagggagcccttcccttactatcgcagagagagcaggccctccccagtcatgtccaacccagaactctgttttgttttcttcatagccctagcatcacagaaaatcaccctgtgcattcatggatgtccacgggggcaagggctttgtgttgcttaacccagcatcctgaaccgtgtttgttgaatgaatacagaaccccgtttgctctgggagagcacagaaaacagtcttctatcatatatcatagccagctnnaaacagcagatggcttccatatccagagagnaagaaccagagagagagagaaagagagagagtttgggtctttctcctctgtgcctgctctctccagagaaactggaggggtagcagttagcattcccccgctggttccaccaagcacagtcaaggtctctaggacatggccacccctcacctgtggaagcggtcctgctggggtgggtgggtgttagttggttctggtttgggtcagagacacccagtggcccaggtgggcgtggggccagggcgcagacgagaaggggcacgagggctccgctccgaggacccagcggcaagcaccggtcccgggcgngccccagcccacccactcgcgtgcccacggcggcattattccctataaggatctgaacgatccgggggcggccccgccccgttaccccttgcccccggccccgccccctttttggagggccgatgaggtaatgcggctctgccattggtctgagggggcgggccccaacagcccgaggcggggtccccgggggcccagcgctatatcactcggccgcccaggcagcggcgcagagcgggcagcaggcaggcggcgggcgctcagacggcttctcctcctcctcttgctcctccagctcctgctccttcgccgggaggccgcccgccgagtcctgcgccagcgccgaggcagcctcgctgcgccccatcccgtcccgccgggcactcggagggcagcgcgccggaggccaaggttgccccgcacggcccggcgggcgagcgagctcgggctgcagcagccccgccggcggcgcgcacggcaactttggagaggcgagcagcagccccggcagcggcggcagcagcggcaatgaccccttggctcgggctcatcgtgctcctgggcagctggagcctgggggactggggcgccgaggcgtgcacatgctcgcccagccacccccaggacgccttctgcaactccgacatcgtgatccgggccaaggtggtggggaagaagctggtaaaggaggggcccttcggcacgctggtctacaccatcaagcagatgaagatgtaccgaggcttcaccaagatgccccatgtgcagtacatccatacggaagcttccgagagtctctgtggccttaagctggaggtcaacaagtaccagtacctgctgacaggtcgcgtctatgatggcaagatgtacacggggctgtgcaacttcgtggagaggtgggaccagctcaccctctcccagcgcaaggggctgaactatcggtatcacctgggttgtaactgcaagatcaagtcctgctactacctgccttgctttgtgacttccaagaacgagtgtctctggaccgacatgtcnncnnttcggtaccggtacagtccaanatagcngntncgnagaggggatngnggtacgngannggccccggtaaattaggccggaccgaggggaagcgcacatcccccccggggcgggaaaccagagagaaacgttgccacgcggaaagaggcgggggaccaccccctagaagcggaggagggata

SEQ ID NO: 366681 - DNA, 1052 bp, Homo sapiens
  misc_feature (23)..(23): n is a, c, g, or t
gatcgagctcgttaccggactgnagatgtctgagattatcatacctgctgagggtgaaggggagtgagcagacactcgggagggtgtcttgaggctcagggagttatcagttatagaatgttgttgagttggaggaggtggctggtggcccatcctgttttttaaagtttcagctgtgaggtagggccagtagggcaatcctgaagaatgacgatgctccgttgccggcattctgacccagttgcaaagagcctttcttgcagaaggggggattttgcatttgtggtagtcctctgctcgccgccgtaactcttgcgcacgttgaaacattttctgtattctggcggtcttcctctttccattgattttgtcatgatggttgattttcgttgtcaccttcctcttacggattttagctctaacttttgtttccacatgggactggagatgtctgagggcggttttgagctttctataagctatagctttgtttatttcacccgttcacttactgtataatttaaaatcatttatgtagctgagacacttctgtatttcaatcatatcatgaacattttattttgctaaatcttgtgtcatgtgtaggctgtaatatgtgtacattgtgtttaagagaaaaatgaaacccacatgccgccattttcctgaatcaaattctgcagtggaatggagaggaaaatacttctaggcaagcagctagactggtgaattgggggaaatagaaggaactagtaactgagactcctccagcctcctccctattggaatcccaatggctcctggagtaggaaaaaagtttaaactacattcatgttcttgttctgtgtcactcggccctgggtagtctaccatttacttcaccccaagtcctgctgcccatccagttgggaagccatgattttcctaagaatccagggccatgggagatacaattccaagttctcgcttcctcctttgggcatctcttctgcctcccaatcaaggaagctccatgctcagacatctccagtccgggatctctatatcgaggt

SEQ ID NO: 366682 - DNA, 355 bp, Homo sapiens
ccgaaaaagtttaactacattcatgttcttgttctgttccatcaccttcccctactttccattttgctttgggggtagaggcttcttagattctcccagcatccgcctttccctttagccagtctgctgtcctgaaacccagaagtgatggagagaaaccaacaagagatctcgaaccctgtctagaaggaatgtatttgttgctaaatttcgtagcactgtttacagttttcctccatgttatttatgaattttatattccgtgaatgtatattgtcttgtaatgttgcataatgttcactttttatagtgtgtcctttattctaaacagtaaagtggttttatttctatcaca

SEQ ID NO: 366683 - DNA, 430 bp, Homo sapiens
tcagtcggtacctcgcgaacgtgtatcccatgtgcagtacatccatacggaagcttccgagagtctctgtggccttaagctggaggtcaacaagtaccagtacctgctgacaggtcgcgtctatgatggcaagatgtacacggggctgtgcaacttcgtggagaggtgggaccagctcaccctctcccagcgcaaggggctgaactatcggtatcacctgggttgtaactgcaagatcaagtcctgctactacctgccttgctttgtgacttccaagaacgagtgtctctggaccgacatgctctccaatttcggttaccctggctaccagtccaaacactacgcctgcatccggcagaagggcggctactgcagctggtaccgaggatgggcccccccggataacacgttcgcgaggaccgactcgatg

SEQ ID NO: 366684 - DNA, 1652 bp, Homo sapiens
  misc_feature (7)..(7): n is a, c, g, or t
  misc_feature (316)..(317): n is a, c, g, or t
  misc_feature (348)..(348): n is a, c, g, or t
  misc_feature (657)..(657): n is a, c, g, or t
tctgtgncttgccccagagctgatccttgtctttgtccacttctcagcgaggatggcacttcagggagcccttcccttactatcgcagagagagcaggccctccccagtcatgtccaacccagaactctgttttgttttcttcatagccctagcatcacagaaaatcaccctgtgcattcatggatgtccacgggggcaagggctttgtgttgcttaacccagcatcctgaaccgtgtttgttgaatgaatacagaaccccgtttgctctgggagagcacagaaaacagtcttctatcatatatcatagccagctnnaaacagcagatggcttccatatccagagagnaagaaccagagagagagagaaagagagagagtttgggtctttctcctctgtgcctgctctctccagagaaactggaggggtagcagttagcattcccccgctggttccaccaagcacagtcaaggtctctaggacatggccacccctcacctgtggaagcggtcctgctggggtgggtgggtgttagttggttctggtttgggtcagagacacccagtggcccaggtgggcgtggggccagggcgcagacgagaaggggcacgagggctccgctccgaggacccagcggcaagcaccggtcccgggcgngccccagcccacccactcgcgtgcccacggcggcattattccctataaggatctgaacgatccgggggcggccccgccccgttaccccttgcccccggccccgccccctttttggagggccgatgaggtaatgcggctctgccattggtctgagggggcgggccccaacagcccgaggcggggtccccgggggcccagcgctatatcactcggccgcccaggcagcggcgcagagcgggcagcaggcaggcggcgggcgctcagacggcttctcctcctcctcttgctcctccagctcctgctccttcgccgggaggccgcccgccgagtcctgcgccagcgccgaggcagcctcgctgcgccccatcccgtcccgccgggcactcggagggcagcgcgccggaggccaaggttgccccgcacggcccggcgggcgagcgagctcgggctgcagcagccccgccggcggcgcgcacggcaactttggagaggcgagcagcagccccggcagcggcggcagcagcggcaatgaccccttggctcgggctcatcgtgctcctgggcagctggagcctgggggactggggcgctgccggagggcgttgcacaattgcttcggcccaaggcaaccccccagtggacgcccttctttgcaaacttcccgaacattcggtgattcccggggcccaaggttgtgtgggggcggacaagaaaacgcgcgtttaacaaggcgcacggcgcccttttccgggacaacggcttgggttcttaccacccattcaaagccaggagtgaaccgaatttgtacgcgggagggtttccacccaaagattgccccccaatggtttgcaggtaccttccaattacgggaaggctttccagaagaagtcctcgtggtgggccttttaagcgtggggtgtcaaccaaagtaccaagtaccgtgctggacagggtcggggtctatgatgggcaagattgccccgggggttggtgca

SEQ ID NO: 366685 - DNA, 5865 bp, Homo sapiens
  misc_feature (7)..(7): n is a, c, g, or t
  misc_feature (316)..(317): n is a, c, g, or t
  misc_feature (348)..(348): n is a, c, g, or t
  misc_feature (657)..(657): n is a, c, g, or t
tctgtgncttgccccagagctgatccttgtctttgtccacttctcagcgaggatggcacttcagggagcccttcccttactatcgcagagagagcaggccctccccagtcatgtccaacccagaactctgttttgttttcttcatagccctagcatcacagaaaatcaccctgtgcattcatggatgtccacgggggcaagggctttgtgttgcttaacccagcatcctgaaccgtgtttgttgaatgaatacagaaccccgtttgctctgggagagcacagaaaacagtcttctatcatatatcatagccagctnnaaacagcagatggcttccatatccagagagnaagaaccagagagagagagaaagagagagagtttgggtctttctcctctgtgcctgctctctccagagaaactggaggggtagcagttagcattcccccgctggttccaccaagcacagtcaaggtctctaggacatggccacccctcacctgtggaagcggtcctgctggggtgggtgggtgttagttggttctggtttgggtcagagacacccagtggcccaggtgggcgtggggccagggcgcagacgagaaggggcacgagggctccgctccgaggacccagcggcaagcaccggtcccgggcgngccccagcccacccactcgcgtgcccacggcggcattattccctataaggatctgaacgatccgggggcggccccgccccgttaccccttgcccccggccccgccccctttttggagggccgatgaggtaatgcggctctgccattggtctgagggggcgggccccaacagcccgaggcggggtccccgggggcccagcgctatatcactcggccgcccaggcagcggcgcagagcgggcagcaggcaggcggcgggcgctcagacggcttctcctcctcctcttgctcctccagctcctgctccttcgccgggaggccgcccgccgagtcctgcgccagcgccgaggcagcctcgctgcgccccatcccgtcccgccgggcactcggagggcagcgcgccggaggccaaggttgccccgcacggcccggcgggcgagcgagctcgggctgcagcagccccgccggcggcgcgcacggcaactttggagaggcgagcagcagccccggcagcggcggcagcagcggcaatgaccccttggctcgggctcatcgtgctcctgggcagctggagcctgggggactggggcgccgaggcgtgcacatgctcgcccagccacccccaggacgccttctgcaactccgacatcgtgatccgggccaaggtggtggggaagaagctggtaaaggaggggcccttcggcacgctggtctacaccatcaagcagatgaagatgtaccgaggcttcaccaagatgccccatgtgcagtacatccatacggaagcttccgagagtctctgtggccttaagctggaggtcaacaagtaccagtacctgctgacaggtcgcgtctatgatggcaagatgtacacggggctgtgcaacttcgtggagaggtgggaccagctcaccctctcccagcgcaaggggctgaactatcggtatcacctgggttgtaactgcaagatcaagtcctgctactacctgccttgctttgtgacttccaagaacgagtgtctctggaccgacatgctctccaatttcggttaccctggctaccagtccaaacactacgcctgcatccggcagaagggcggctactgcagctggtaccgaggatgggcccccccggataaaagcatcatcaatgccacagacccctgagcgccagaccctgccccacctcacttccctcccttcccgctgagcttcccttggacactaactcttcccagatgatgacaatgaaattagtgcctgttttcttgcaaatttagcacttggaacatttaaagaaaggtctatgctgtcatatggggtttattgggaactatcctcctggccccaccctgccccttctttttggttttgacatcattcatttccacctgggaatttctggtgccatgccagaaagaatgaggaacctgtattcctcttcttcgtgataatataatctctatttttttaggaaaacaaaaatgaaaaactactccatttgaggattgtaattcccacccctcttgcttcttccccacctcaccatctcccagaccctcttccctttgcccttctcctccaatacataaaggacacagacaaggaacttgctgaaaggccaaccatttcaggatcagtcaaaggcagcaagcagatagactcaaggtgtgtgaaagatgttatacaccaggagctgccactgcatgtcccaaccagactgtgtctgtctgtgtctgcatgtaagagtgagggagggaaggaaggaactacaagagagtcggagatgatgcagcacacacacaattccccagcccagtgatgcttgtgttgaccagatgttcctgagtctggagcaagcacccaggccagaataacagagctttcttagttggtgaagacttaaacatctgcctgaggtcaggaggcaatttgcctgccttgtacaaaagctcaggtgaaagactgagatgaatgtctttcctctccctgcctcccaccagacttcctcctggaaaacgctttggtagatttggccaggagctttcttttatgtaaattggataaatacacacaccatacactatccacagatatagccaagtagatttgggtagaggatactatttccagaatagtgtttagctcacctagggggatatgtttgtatacacatttgcatatacccacatggggacataagctaatttttttacaggacacagaattctgttcaatgctgttaaatatgccaatagtttaatctcttctattttgttgtcgttgcttgtttgaagaaaatcatgacattccaagttgacatttttttttcattttaattaaaatttgaaattctgaacaccgtcagcaccctctcttccctatcatgggtcatctgacccctgtccgtctccttgtccctgcttcatgtttgggggcctttctttaactgccttcctggcttagctcagatggcagatgagagtgtagtcaagggcctgggcacaggagggagagctgcagagtgtcctgcctgccttggctggagggacacctctcctgggtgtggagacagcttggttccctttccctagctccctggtgggtgaatgccacctcctgagatcctcacctcttggaattaaaattgttggtcactggggaaagcctgagtttgcaaccagttgtagggtttctgttgtgttttttttttttttttgaaataaaactataatataaattctcctattaaataaaattattttaagttttagtgtcaaaagtgagatgctgagagtaggtgataatgtatattttacagagtgggggttggcaggatggtgacattgaacatgattgctctctgtctcttttttcagcttatgggtatttatcttctattagtatttgtatcttcagttcattccactttaggaaacagagctgccaattgaaacagaagaagaaaaaaaaaaaaagcagcagacaacacactgtagagtcttgcacacacacaagtgcccaggcaaggtgcttggcagaaccgcagagtgggaagagagtaccggcatcgggtttccttgggatcaatttcattaccgtgtacctttcccattgtggtcatgccatttggcagggggagaatgggaggcttggccttctttgtgaggcagtgtgagcagaagctgatgccagcatgtcactggttttgaagggatgagcccagacttgatgttttgggattgtccttattttaacctcaaggtctcgcatggtggggcccctgaccaacctacacaagttccctcccacaagtggacatcagtgtcttctctgtgaggcatctggccattcgcactccctggtgtggtcagcctctctcacacaaggaggaacttgggtgaaggctgagtgtgaggcacctgaagtttccctgcggagtcgataaattagcagaaccacatccccatctgttaggccttggtgaggaggccctgggcaaagaagggtctttcgcaaagcgatgtcagagggcggttttgagctttctataagctatagctttgtttatttcacccgttcacttactgtataatttaaaatcatttatgtagctgagacacttctgtatttcaatcatatcatgaacattttattttgctaaatcttgtgtcatgtgtaggctgtaatatgtgtacattgtgtttaagagaaaaatgaaacccacatgccgccattttcctgaatcaaattctgcagtggaatggagaggaaaatacttctaggcaagcagctagactggtgaattgggggaaatagaaggaactagtaactgagactcctccagcctcctccctattggaatcccaatggctcctggagtaggaaaaaagtttaaactacattcatgttcttgttctgtgtcactcggccctgggtagtctaccatttacttcaccccaagtcctgctgcccatccagttgggaagccatgattttcctaagaatccagggccatgggagatacaattccaagttctcgcttcctcctttgggcatctcttctgcctcccaatcaaggaagctccatgctcaggctctcagctctcgggccagtgctctgctctgtccagggtaggtaatactgggagactcctgtcttttaccctcccctcgttccagacctgcctcatggtggcaacatggttcttgaacaattaaagaaacaaatgactttttggaatagccctgtctagggcaaactgtggcccccaggagacactacccttccatgccccagacctctgtcttgcatgtgacaattgacaatctggactaccccaagatggcacccaagtgtttggcttctggctacctaaggttaacatgtcactagagtatttttatgagagacaaacattataaaaatctgatggcaaaagcaaaacaaaatggaaagtaggggaggtggatgtgacaacaacttccaaattggctctttggaggcgagaggaaggggagaacttggagaatagtttttgctttgggggtagaggcttcttagattctcccagcatccgcctttccctttagccagtctgctgtcctgaaacccagaagtgatggagagaaaccaacaagagatctcgaaccctgtctagaaggaatgtatttgttgctaaatttcgtagcactgtttacagttttcctccatgttatttatgaattttatattccgtgaatgtatattgtcttgtaatgttgcataatgttcactttttatagtgtgtcctttattctaaacagtaaagtggttttatttctatcacaaaaaaaaaaaaaaaaaaaaaaaaaaaaaaaaaaaaaaaaaaaaaaaaaaaaaaaaaaaaaaaaaaaaaaaaacacaaaaaacaacaaaaaaaaaaaaaaaaagcagggcggcgccggcaccaccaaagagaaacacacacaacacaccggggtgggcaggagccaacgaggtgaaacacacaaggaacaaggagcacccaaaaagcgacgcgcaacaacaaacatggggggtaggcaacaccacgcagaacacaacacccgcggcgggcaacacggtgcttaaaaaaaaccaccaccgagaggggcccagcagaagacacaacggggcacaccaaacgcgcggtggccaacgagcccgcgcgaaataacaaaaagccgggg

SEQ ID NO: 366686 - DNA, 5412 bp, Homo sapiens
  misc_feature (7)..(7): n is a, c, g, or t
  misc_feature (316)..(317): n is a, c, g, or t
  misc_feature (348)..(348): n is a, c, g, or t
  misc_feature (657)..(657): n is a, c, g, or t
tctgtgncttgccccagagctgatccttgtctttgtccacttctcagcgaggatggcacttcagggagcccttcccttactatcgcagagagagcaggccctccccagtcatgtccaacccagaactctgttttgttttcttcatagccctagcatcacagaaaatcaccctgtgcattcatggatgtccacgggggcaagggctttgtgttgcttaacccagcatcctgaaccgtgtttgttgaatgaatacagaaccccgtttgctctgggagagcacagaaaacagtcttctatcatatatcatagccagctnnaaacagcagatggcttccatatccagagagnaagaaccagagagagagagaaagagagagagtttgggtctttctcctctgtgcctgctctctccagagaaactggaggggtagcagttagcattcccccgctggttccaccaagcacagtcaaggtctctaggacatggccacccctcacctgtggaagcggtcctgctggggtgggtgggtgttagttggttctggtttgggtcagagacacccagtggcccaggtgggcgtggggccagggcgcagacgagaaggggcacgagggctccgctccgaggacccagcggcaagcaccggtcccgggcgngccccagcccacccactcgcgtgcccacggcggcattattccctataaggatctgaacgatccgggggcggccccgccccgttaccccttgcccccggccccgccccctttttggagggccgatgaggtaatgcggctctgccattggtctgagggggcgggccccaacagcccgaggcggggtccccgggggcccagcgctatatcactcggccgcccaggcagcggcgcagagcgggcagcaggcaggcggcgggcgctcagacggcttctcctcctcctcttgctcctccagctcctgctccttcgccgggaggccgcccgccgagtcctgcgccagcgccgaggcagcctcgctgcgccccatcccgtcccgccgggcactcggagggcagcgcgccggaggccaaggttgccccgcacggcccggcgggcgagcgagctcgggctgcagcagccccgccggcggcgcgcacggcaactttggagaggcgagcagcagccccggcagcggcggcagcagcggcaatgaccccttggctcgggctcatcgtgctcctgggcagctggagcctgggggactggggcgccgaggcgtgcacatgctcgcccagccacccccaggacgccttctgcaactccgacatcgtgatccgggccaaggtggtggggaagaagctggtaaaggaggggcccttcggcacgctggtctacaccatcaagcagatgaagatgtaccgaggcttcaccaagatgccccatgtgcagtacatccatacggaagcttccgagagtctctgtggccttaagctggaggtcaacaagtaccagtacctgctgacaggtcgcgtctatgatggcaagatgtacacggggctgtgcaacttcgtggagaggtgggaccagctcaccctctcccagcgcaaggggctgaactatcggtatcacctgggttgtaactgcaagatcaagtcctgctactacctgccttgctttgtgacttccaagaacgagtgtctctggaccgacatgctctccaatttcggttaccctggctaccagtccaaacactacgcctgcatccggcagaagggcggctactgcagctggtaccgaggatgggcccccccggataaaagcatcatcaatgccacagacccctgagcgccagaccctgccccacctcacttccctcccttcccgctgagcttcccttggacactaactcttcccagatgatgacaatgaaattagtgcctgttttcttgcaaatttagcacttggaacatttaaagaaaggtctatgctgtcatatggggtttattgggaactatcctcctggccccaccctgccccttctttttggttttgacatcattcatttccacctgggaatttctggtgccatgccagaaagaatgaggaacctgtattcctcttcttcgtgataatataatctctatttttttaggaaaacaaaaatgaaaaactactccatttgaggattgtaattcccacccctcttgcttcttccccacctcaccatctcccagaccctcttccctttgcccttctcctccaatacataaaggacacagacaaggaacttgctgaaaggccaaccatttcaggatcagtcaaaggcagcaagcagatagactcaaggtgtgtgaaagatgttatacaccaggagctgccactgcatgtcccaaccagactgtgtctgtctgtgtctgcatgtaagagtgagggagggaaggaaggaactacaagagagtcggagatgatgcagcacacacacaattccccagcccagtgatgcttgtgttgaccagatgttcctgagtctggagcaagcacccaggccagaataacagagctttcttagttggtgaagacttaaacatctgcctgaggtcaggaggcaatttgcctgccttgtacaaaagctcaggtgaaagactgagatgaatgtctttcctctccctgcctcccaccagacttcctcctggaaaacgctttggtagatttggccaggagctttcttttatgtaaattggataaatacacacaccatacactatccacagatatagccaagtagatttgggtagaggatactatttccagaatagtgtttagctcacctagggggatatgtttgtatacacatttgcatatacccacatggggacataagctaatttttttacaggacacagaattctgttcaatgctgttaaatatgccaatagtttaatctcttctattttgttgtcgttgcttgtttgaagaaaatcatgacattccaagttgacatttttttttcattttaattaaaatttgaaattctgaacaccgtcagcaccctctcttccctatcatgggtcatctgacccctgtccgtctccttgtccctgcttcatgtttgggggcctttctttaactgccttcctggcttagctcagatggcagatgagagtgtagtcaagggcctgggcacaggagggagagctgcagagtgtcctgcctgccttggctggagggacacctctcctgggtgtggagacagcttggttccctttccctagctccctggtgggtgaatgccacctcctgagatcctcacctcttggaattaaaattgttggtcactggggaaagcctgagtttgcaaccagttgtagggtttctgttgtgttttttttttttttttgaaataaaactataatataaattctcctattaaataaaattattttaagttttagtgtcacatgattgctctctgtctcttttttcagcttatgggtatttatcttctattagtatttgtatcttcagttcattccactttaggaaacagagctgccaattgaaacagaagaagaaaaaaaaaaaaagcagcagacaacacactgtagagtcttgcacacacacaagtgcccaggcaaggtgcttggcagaaccgcagagtgggaagagagtaccggcatcgggtttccttgggatcaatttcattaccgtgtacctttcccattgtggtcatgccatttggcagggggagaatgggaggcttggccttctttgtgaggcagtgtgagcagaagctgatgccagcatgtcactggttttgaagggatgagcccagacttgatgttttgggattgtccttattttaacctcaaggtctcgcatggtggggcccctgaccaacctacacaagttccctcccacaagtggacatcagtgtcttctctgtgaggcatctggccattcgcactccctggtgtggtcagcctctctcacacaaggaggaacttgggtgaaggctgagtgtgaggcacctgaagtttccctgcggagtcgataaattagcagaaccacatccccatctgttaggccttggtgaggaggccctgggcaaagaagggtctttcgcaaagcgatgtcagagggcggttttgagctttctataagctatagctttgtttatttcacccgttcacttactgtataatttaaaatcatttatgtagctgagacacttctgtatttcaatcatatcatgaacattttattttgctaaatcttgtgtcatgtgtaggctgtaatatgtgtacattgtgtttaagagaaaaatgaaacccacatgccgccattttcctgaatcaaattctgcagtggaatggagaggaaaatacttctaggcaagcagctagactggtgaattgggggaaatagaaggaactagtaactgagactcctccagcctcctccctattggaatcccaatggctcctggagtaggaaaaaagtttaaactacattcatgttcttgttctgtgtcactcggccctgggtagtctaccatttacttcaccccaagtcctgctgcccatccagttgggaagccatgattttcctaagaatccagggccatgggagatacaattccaagttctcgcttcctcctttgggcatctcttctgcctcccaatcaaggaagctccatgctcaggctctcagctctcgggccagtgctctgctctgtccagggtaggtaatactgggagactcctgtcttttaccctcccctcgttccagacctgcctcatggtggcaacatggttcttgaacaattaaagaaacaaatgactttttggaatagccctgtctagggcaaactgtggcccccaggagacactacccttccatgccccagacctctgtcttgcatgtgacaattgacaatctggactaccccaagatggcacccaagtgtttggcttctggctacctaaggttaacatgtcactagagtatttttatgagagacaaacattataaaaatctgatggcaaaagcaaaacaaaatggaaagtaggggaggtggatgtgacaacaacttccaaattggctctttggaggcgagaggaaggggagaacttggagaatagtttttgctttgggggtagaggcttcttagattctcccagcatccgcctttccctttagccagtctgctgtcctgaaacccagaagtgatggagagaaaccaacaagagatctcgaaccctgtctagaaggaatgtatttgttgctaaatttcgtagcactgtttacagttttcctccatgttatttatgaattttatattccgtgaatgtatattgtcttgtaatgttgcataatgttcactttttatagtgtgtcctttattctaaacagtaaagtggttttatttctatcaca

SEQ ID NO: 366687 - DNA, 5834 bp, Homo sapiens
  misc_feature (7)..(7): n is a, c, g, or t
  misc_feature (316)..(317): n is a, c, g, or t
  misc_feature (348)..(348): n is a, c, g, or t
  misc_feature (657)..(657): n is a, c, g, or t
tctgtgncttgccccagagctgatccttgtctttgtccacttctcagcgaggatggcacttcagggagcccttcccttactatcgcagagagagcaggccctccccagtcatgtccaacccagaactctgttttgttttcttcatagccctagcatcacagaaaatcaccctgtgcattcatggatgtccacgggggcaagggctttgtgttgcttaacccagcatcctgaaccgtgtttgttgaatgaatacagaaccccgtttgctctgggagagcacagaaaacagtcttctatcatatatcatagccagctnnaaacagcagatggcttccatatccagagagnaagaaccagagagagagagaaagagagagagtttgggtctttctcctctgtgcctgctctctccagagaaactggaggggtagcagttagcattcccccgctggttccaccaagcacagtcaaggtctctaggacatggccacccctcacctgtggaagcggtcctgctggggtgggtgggtgttagttggttctggtttgggtcagagacacccagtggcccaggtgggcgtggggccagggcgcagacgagaaggggcacgagggctccgctccgaggacccagcggcaagcaccggtcccgggcgngccccagcccacccactcgcgtgcccacggcggcattattccctataaggatctgaacgatccgggggcggccccgccccgttaccccttgcccccggccccgccccctttttggagggccgatgaggtaatgcggctctgccattggtctgagggggcgggccccaacagcccgaggcggggtccccgggggcccagcgctatatcactcggccgcccaggcagcggcgcagagcgggcagcaggcaggcggcgggcgctcagacggcttctcctcctcctcttgctcctccagctcctgctccttcgccgggaggccgcccgccgagtcctgcgccagcgccgaggcagcctcgctgcgccccatcccgtcccgccgggcactcggagggcagcgcgccggaggccaaggttgccccgcacggcccggcgggcgagcgagctcgggctgcagcagccccgccggcggcgcgcacggcaactttggagaggcgagcagcagccccggcagcggcggcagcagcggcaatgaccccttggctcgggctcatcgtgctcctgggcagctggagcctgggggactggggcgccgaggcgtgcacatgctcgcccagccacccccaggacgccttctgcaactccgacatcgtgatccgggccaaggtggtggggaagaagctggtaaaggaggggcccttcggcacgctggtctacaccatcaagcagatgaagatgtaccgaggcttcaccaagatgccccatgtgcagtacatccatacggaagcttccgagagtctctgtggccttaagctggaggtcaacaagtaccagtacctgctgacaggtcgcgtctatgatggcaagatgtacacggggctgtgcaacttcgtggagaggtgggaccagctcaccctctcccagcgcaaggggctgaactatcggtatcacctgggttgtaactgcaagatcaagtcctgctactacctgccttgctttgtgacttccaagaacgagtgtctctggaccgacatgctctccaatttcggttaccctggctaccagtccaaacactacgcctgcatccggcagaagggcggctactgcagctggtaccgaggatgggcccccccggataaaagcatcatcaatgccacagacccctgagcgccagaccctgccccacctcacttccctcccttcccgctgagcttcccttggacactaactcttcccagatgatgacaatgaaattagtgcctgttttcttgcaaatttagcacttggaacatttaaagaaaggtctatgctgtcatatggggtttattgggaactatcctcctggccccaccctgccccttctttttggttttgacatcattcatttccacctgggaatttctggtgccatgccagaaagaatgaggaacctgtattcctcttcttcgtgataatataatctctatttttttaggaaaacaaaaatgaaaaactactccatttgaggattgtaattcccacccctcttgcttcttccccacctcaccatctcccagaccctcttccctttgcccttctcctccaatacataaaggacacagacaaggaacttgctgaaaggccaaccatttcaggatcagtcaaaggcagcaagcagatagactcaaggtgtgtgaaagatgttatacaccaggagctgccactgcatgtcccaaccagactgtgtctgtctgtgtctgcatgtaagagtgagggagggaaggaaggaactacaagagagtcggagatgatgcagcacacacacaattccccagcccagtgatgcttgtgttgaccagatgttcctgagtctggagcaagcacccaggccagaataacagagctttcttagttggtgaagacttaaacatctgcctgaggtcaggaggcaatttgcctgccttgtacaaaagctcaggtgaaagactgagatgaatgtctttcctctccctgcctcccaccagacttcctcctggaaaacgctttggtagatttggccaggagctttcttttatgtaaattggataaatacacacaccatacactatccacagatatagccaagtagatttgggtagaggatactatttccagaatagtgtttagctcacctagggggatatgtttgtatacacatttgcatatacccacatggggacataagctaatttttttacaggacacagaattctgttcaatgctgttaaatatgccaatagtttaatctcttctattttgttgtcgttgcttgtttgaagaaaatcatgacattccaagttgacatttttttttcattttaattaaaatttgaaattctgaacaccgtcagcaccctctcttccctatcatgggtcatctgacccctgtccgtctccttgtccctgcttcatgtttgggggcctttctttaactgccttcctggcttagctcagatggcagatgagagtgtagtcaagggcctgggcacaggagggagagctgcagagtgtcctgcctgccttggctggagggacacctctcctgggtgtggagacagcttggttccctttccctagctccctggtgggtgaatgccacctcctgagatcctcacctcttggaattaaaattgttggtcactggggaaagcctgagtttgcaaccagttgtagggtttctgttgtgttttttttttttttttgaaataaaactataatataaattctcctattaaataaaattattttaagttttagtgtcaaaagtgagatgctgagagtaggtgataatgtatattttacagagtgggggttggcaggatggtgacattgaacatgattgctctctgtctcttttttcagcttatgggtatttatcttctattagtatttgtatcttcagttcattccactttaggaaacagagctgccaattgaaacagaagaagaaaaaaaaaaaaagcagcagacaacacactgtagagtcttgcacacacacaagtgcccaggcaaggtgcttggcagaaccgcagagtgggaagagagtaccggcatcgggtttccttgggatcaatttcattaccgtgtacctttcccattgtggtcatgccatttggcagggggagaatgggaggcttggccttctttgtgaggcagtgtgagcagaagctgatgccagcatgtcactggttttgaagggatgagcccagacttgatgttttgggattgtccttattttaacctcaaggtctcgcatggtggggcccctgaccaacctacacaagttccctcccacaagtggacatcagtgtcttctctgtgaggcatctggccattcgcactccctggtgtggtcagcctctctcacacaaggaggaacttgggtgaaggctgagtgtgaggcacctgaagtttccctgcggagtcgataaattagcagaaccacatccccatctgttaggccttggtgaggaggccctgggcaaagaagggtctttcgcaaagcgatgtcagagggcggttttgagctttctataagctatagctttgtttatttcacccgttcacttactgtataatttaaaatcatttatgtagctgagacacttctgtatttcaatcatatcatgaacattttattttgctaaatcttgtgtcatgtgtaggctgtaatatgtgtacattgtgtttaagagaaaaatgaaacccacatgccgccattttcctgaatcaaattctgcagtggaatggagaggaaaatacttctaggcaagcagctagactggtgaattgggggaaatagaaggaactagtaactgagactcctccagcctcctccctattggaatcccaatggctcctggagtaggaaaaaagtttaaactacattcatgttcttgttctgtgtcactcggccctgggtagtctaccatttacttcaccccaagtcctgctgcccatccagttgggaagccatgattttcctaagaatccagggccatgggagatacaattccaagttctcgcttcctcctttgggcatctcttctgcctcccaatcaaggaagctccatgctcaggctctcagctctcgggccagtgctctgctctgtccagggtaggtaatactgggagactcctgtcttttaccctcccctcgttccagacctgcctcatggtggcaacatggttcttgaacaattaaagaaacaaatgactttttggaatagccctgtctagggcaaactgtggcccccaggagacactacccttccatgccccagacctctgtcttgcatgtgacaattgacaatctggactaccccaagatggcacccaagtgtttggcttctggctacctaaggttaacatgtcactagagtatttttatgagagacaaacattataaaaatctgatggcaaaagcaaaacaaaatggaaagtaggggaggtggatgtgacaacaacttccaaattggctctttggaggcgagaggaaggggagaacttggagaatagtttttgctttgggggtagaggcttcttagattctcccagcatccgcctttccctttagccagtctgctgtcctgaaacccagaagtgatggagagaaaccaacaagagatctcgaaccctgtctagaaggaatgtatttgttgctaaatttcgtagcactgtttacagttttcctccatgttatttatgaattttatattccgtgaatgtatattgtcttgtaatgttgcataatgttcactttttatagtgtgtcctttattctaaacagtaaagtggttttatttctatcacaaaaaaaaaaaaaaaaaaaaaaaaaaaaatttgtggggggcttgggcccttggaaaaaggtttttaaaacatgggtggggggcgcgcgggggccccaagttgggttaagggcacaggtggggccaaaagacgcgggctccctagaggagaaaccgcggcgccaggacataggggcggggagatcctctccccgagattaaaagagcgcgccggggggggaacaccgagaggcgtttctgggagacaaatctccagaggggggataccagagaggggccataacggggggggcgtcatatcaaaccggggggggctccagggggagagcctcagatgtctcagaattaggcg

SEQ ID NO: 366688 - DNA, 5934 bp, Homo sapiens
  misc_feature (7)..(7): n is a, c, g, or t
  misc_feature (316)..(317): n is a, c, g, or t
  misc_feature (348)..(348): n is a, c, g, or t
  misc_feature (657)..(657): n is a, c, g, or t
  misc_feature (5658)..(5658): n is a, c, g, or t
  misc_feature (5662)..(5662): n is a, c, g, or t
  misc_feature (5737)..(5737): n is a, c, g, or t
  misc_feature (5741)..(5742): n is a, c, g, or t
  misc_feature (5748)..(5748): n is a, c, g, or t
  misc_feature (5763)..(5763): n is a, c, g, or t
  misc_feature (5771)..(5772): n is a, c, g, or t
  misc_feature (5779)..(5779): n is a, c, g, or t
  misc_feature (5807)..(5807): n is a, c, g, or t
  misc_feature (5816)..(5816): n is a, c, g, or t
  misc_feature (5820)..(5820): n is a, c, g, or t
  misc_feature (5833)..(5833): n is a, c, g, or t
  misc_feature (5843)..(5843): n is a, c, g, or t
  misc_feature (5856)..(5856): n is a, c, g, or t
  misc_feature (5869)..(5869): n is a, c, g, or t
  misc_feature (5890)..(5892): n is a, c, g, or t
  misc_feature (5900)..(5900): n is a, c, g, or t
  misc_feature (5903)..(5904): n is a, c, g, or t
  misc_feature (5914)..(5914): n is a, c, g, or t
  misc_feature (5920)..(5920): n is a, c, g, or t
  misc_feature (5925)..(5926): n is a, c, g, or t
tctgtgncttgccccagagctgatccttgtctttgtccacttctcagcgaggatggcacttcagggagcccttcccttactatcgcagagagagcaggccctccccagtcatgtccaacccagaactctgttttgttttcttcatagccctagcatcacagaaaatcaccctgtgcattcatggatgtccacgggggcaagggctttgtgttgcttaacccagcatcctgaaccgtgtttgttgaatgaatacagaaccccgtttgctctgggagagcacagaaaacagtcttctatcatatatcatagccagctnnaaacagcagatggcttccatatccagagagnaagaaccagagagagagagaaagagagagagtttgggtctttctcctctgtgcctgctctctccagagaaactggaggggtagcagttagcattcccccgctggttccaccaagcacagtcaaggtctctaggacatggccacccctcacctgtggaagcggtcctgctggggtgggtgggtgttagttggttctggtttgggtcagagacacccagtggcccaggtgggcgtggggccagggcgcagacgagaaggggcacgagggctccgctccgaggacccagcggcaagcaccggtcccgggcgngccccagcccacccactcgcgtgcccacggcggcattattccctataaggatctgaacgatccgggggcggccccgccccgttaccccttgcccccggccccgccccctttttggagggccgatgaggtaatgcggctctgccattggtctgagggggcgggccccaacagcccgaggcggggtccccgggggcccagcgctatatcactcggccgcccaggcagcggcgcagagcgggcagcaggcaggcggcgggcgctcagacggcttctcctcctcctcttgctcctccagctcctgctccttcgccgggaggccgcccgccgagtcctgcgccagcgccgaggcagcctcgctgcgccccatcccgtcccgccgggcactcggagggcagcgcgccggaggccaaggttgccccgcacggcccggcgggcgagcgagctcgggctgcagcagccccgccggcggcgcgcacggcaactttggagaggcgagcagcagccccggcagcggcggcagcagcggcaatgaccccttggctcgggctcatcgtgctcctgggcagctggagcctgggggactggggcgccgaggcgtgcacatgctcgcccagccacccccaggacgccttctgcaactccgacatcgtgatccgggccaaggtggtggggaagaagctggtaaaggaggggcccttcggcacgctggtctacaccatcaagcagatgaagatgtaccgaggcttcaccaagatgccccatgtgcagtacatccatacggaagcttccgagagtctctgtggccttaagctggaggtcaacaagtaccagtacctgctgacaggtcgcgtctatgatggcaagatgtacacggggctgtgcaacttcgtggagaggtgggaccagctcaccctctcccagcgcaaggggctgaactatcggtatcacctgggttgtaactgcaagatcaagtcctgctactacctgccttgctttgtgacttccaagaacgagtgtctctggaccgacatgctctccaatttcggttaccctggctaccagtccaaacactacgcctgcatccggcagaagggcggctactgcagctggtaccgaggatgggcccccccggataaaagcatcatcaatgccacagacccctgagcgccagaccctgccccacctcacttccctcccttcccgctgagcttcccttggacactaactcttcccagatgatgacaatgaaattagtgcctgttttcttgcaaatttagcacttggaacatttaaagaaaggtctatgctgtcatatggggtttattgggaactatcctcctggccccaccctgccccttctttttggttttgacatcattcatttccacctgggaatttctggtgccatgccagaaagaatgaggaacctgtattcctcttcttcgtgataatataatctctatttttttaggaaaacaaaaatgaaaaactactccatttgaggattgtaattcccacccctcttgcttcttccccacctcaccatctcccagaccctcttccctttgcccttctcctccaatacataaaggacacagacaaggaacttgctgaaaggccaaccatttcaggatcagtcaaaggcagcaagcagatagactcaaggtgtgtgaaagatgttatacaccaggagctgccactgcatgtcccaaccagactgtgtctgtctgtgtctgcatgtaagagtgagggagggaaggaaggaactacaagagagtcggagatgatgcagcacacacacaattccccagcccagtgatgcttgtgttgaccagatgttcctgagtctggagcaagcacccaggccagaataacagagctttcttagttggtgaagacttaaacatctgcctgaggtcaggaggcaatttgcctgccttgtacaaaagctcaggtgaaagactgagatgaatgtctttcctctccctgcctcccaccagacttcctcctggaaaacgctttggtagatttggccaggagctttcttttatgtaaattggataaatacacacaccatacactatccacagatatagccaagtagatttgggtagaggatactatttccagaatagtgtttagctcacctagggggatatgtttgtatacacatttgcatatacccacatggggacataagctaatttttttacaggacacagaattctgttcaatgctgttaaatatgccaatagtttaatctcttctattttgttgtcgttgcttgtttgaagaaaatcatgacattccaagttgacatttttttttcattttaattaaaatttgaaattctgaacaccgtcagcaccctctcttccctatcatgggtcatctgacccctgtccgtctccttgtccctgcttcatgtttgggggcctttctttaactgccttcctggcttagctcagatggcagatgagagtgtagtcaagggcctgggcacaggagggagagctgcagagtgtcctgcctgccttggctggagggacacctctcctgggtgtggagacagcttggttccctttccctagctccctggtgggtgaatgccacctcctgagatcctcacctcttggaattaaaattgttggtcactggggaaagcctgagtttgcaaccagttgtagggtttctgttgtgttttttttttttttttgaaataaaactataatataaattctcctattaaataaaattattttaagttttagtgtcaaaagtgagatgctgagagtaggtgataatgtatattttacagagtgggggttggcaggatggtgacattgaacatgattgctctctgtctcttttttcagcttatgggtatttatcttctattagtatttgtatcttcagttcattccactttaggaaacagagctgccaattgaaacagaagaagaaaaaaaaaaaaagcagcagacaacacactgtagagtcttgcacacacacaagtgcccaggcaaggtgcttggcagaaccgcagagtgggaagagagtaccggcatcgggtttccttgggatcaatttcattaccgtgtacctttcccattgtggtcatgccatttggcagggggagaatgggaggcttggccttctttgtgaggcagtgtgagcagaagctgatgccagcatgtcactggttttgaagggatgagcccagacttgatgttttgggattgtccttattttaacctcaaggtctcgcatggtggggcccctgaccaacctacacaagttccctcccacaagtggacatcagtgtcttctctgtgaggcatctggccattcgcactccctggtgtggtcagcctctctcacacaaggaggaacttgggtgaaggctgagtgtgaggcacctgaagtttccctgcggagtcgataaattagcagaaccacatccccatctgttaggccttggtgaggaggccctgggcaaagaagggtctttcgcaaagcgatgtcagagggcggttttgagctttctataagctatagctttgtttatttcacccgttcacttactgtataatttaaaatcatttatgtagctgagacacttctgtatttcaatcatatcatgaacattttattttgctaaatcttgtgtcatgtgtaggctgtaatatgtgtacattgtgtttaagagaaaaatgaaacccacatgccgccattttcctgaatcaaattctgcagtggaatggagaggaaaatacttctaggcaagcagctagactggtgaattgggggaaatagaaggaactagtaactgagactcctccagcctcctccctattggaatcccaatggctcctggagtaggaaaaaagtttaaactacattcatgttcttgttctgtgtcactcggccctgggtagtctaccatttacttcaccccaagtcctgctgcccatccagttgggaagccatgattttcctaagaatccagggccatgggagatacaattccaagttctcgcttcctcctttgggcatctcttctgcctcccaatcaaggaagctccatgctcaggctctcagctctcgggccagtgctctgctctgtccagggtaggtaatactgggagactcctgtcttttaccctcccctcgttccagacctgcctcatggtggcaacatggttcttgaacaattaaagaaacaaatgactttttggaatagccctgtctagggcaaactgtggcccccaggagacactacccttccatgccccagacctctgtcttgcatgtgacaattgacaatctggactaccccaagatggcacccaagtgtttggcttctggctacctaaggttaacatgtcactagagtatttttatgagagacaaacattataaaaatctgatggcaaaagcaaaacaaaatggaaagtaggggaggtggatgtgacaacaacttccaaattggctctttggaggcgagaggaaggggagaacttggagaatagtttttgctttgggggtagaggcttcttagattctcccagcatccgcctttccctttagccagtctgctgtcctgaaacccagaagtgatggagagaaaccaacaagagatctcgaaccctgtctagaaggaatgtatttgttgctaaatttcgtagcactgtttacagttttcctccatgttatttatgaattttatattccgtgaatgtatattgtcttgtaatgttgcataatgttcactttttatagtgtgtcctttattctaaacagtaaagtggttttatttctatcacagagcacagaattaaaagccaaagcctcggaaaggagacaaagtaaaggctcactatggaggattcactgtacagaatgaagccaacaaataccagatctcagtgaacaaatacagaggaacagccggtaatgccctcatggatggagcatctcagctgatgggagacaatgacngctngttaacatcagatcccagaagacagcgttctaaagaagaccgtggtggatggtggtattatagatgtcatgcagnccanncaaacngcagatactacttgngtggacannacacctnggacatggaaagcatggcacaaatgatngtgagtatngatnaattggaaggggncatggtcctnaatgaggaagatnagtttgaagatcnggcccttttttccacagaatnnnccccaatncgnnaattttgctntctgtntggannacattttt

SEQ ID NO: 366689 - DNA, 5526 bp, Homo sapiens
  misc_feature (7)..(7): n is a, c, g, or t
  misc_feature (316)..(317): n is a, c, g, or t
  misc_feature (348)..(348): n is a, c, g, or t
  misc_feature (657)..(657): n is a, c, g, or t
tctgtgncttgccccagagctgatccttgtctttgtccacttctcagcgaggatggcacttcagggagcccttcccttactatcgcagagagagcaggccctccccagtcatgtccaacccagaactctgttttgttttcttcatagccctagcatcacagaaaatcaccctgtgcattcatggatgtccacgggggcaagggctttgtgttgcttaacccagcatcctgaaccgtgtttgttgaatgaatacagaaccccgtttgctctgggagagcacagaaaacagtcttctatcatatatcatagccagctnnaaacagcagatggcttccatatccagagagnaagaaccagagagagagagaaagagagagagtttgggtctttctcctctgtgcctgctctctccagagaaactggaggggtagcagttagcattcccccgctggttccaccaagcacagtcaaggtctctaggacatggccacccctcacctgtggaagcggtcctgctggggtgggtgggtgttagttggttctggtttgggtcagagacacccagtggcccaggtgggcgtggggccagggcgcagacgagaaggggcacgagggctccgctccgaggacccagcggcaagcaccggtcccgggcgngccccagcccacccactcgcgtgcccacggcggcattattccctataaggatctgaacgatccgggggcggccccgccccgttaccccttgcccccggccccgccccctttttggagggccgatgaggtaatgcggctctgccattggtctgagggggcgggccccaacagcccgaggcggggtccccgggggcccagcgctatatcactcggccgcccaggcagcggcgcagagcgggcagcaggcaggcggcgggcgctcagacggcttctcctcctcctcttgctcctccagctcctgctccttcgccgggaggccgcccgccgagtcctgcgccagcgccgaggcagcctcgctgcgccccatcccgtcccgccgggcactcggagggcagcgcgccggaggccaaggttgccccgcacggcccggcgggcgagcgagctcgggctgcagcagccccgccggcggcgcgcacggcaactttggagaggcgagcagcagccccggcagcggcggcagcagcggcaatgaccccttggctcgggctcatcgtgctcctgggcagctggagcctgggggactggggcgccgaggcgtgcacatgctcgcccagccacccccaggacgccttctgcaactccgacatcgtgatccgggccaaggtggtggggaagaagctggtaaaggaggggcccttcggcacgctggtctacaccatcaagcagatgaagatgtaccgaggcttcaccaagatgccccatgtgcagtacatccatacggaagcttccgagagtctctgtggccttaagctggaggtcaacaagtaccagtacctgctgacaggtcgcgtctatgatggcaagatgtacacggggctgtgcaacttcgtggagaggtgggaccagctcaccctctcccagcgcaaggggctgaactatcggtatcacctgggttgtaactgcaagatcaagtcctgctactacctgccttgctttgtgacttccaagaacgagtgtctctggaccgacatgctctccaatttcggttaccctggctaccagtccaaacactacgcctgcatccggcagaagggcggctactgcagctggtaccgaggatgggcccccccggataaaagcatcatcaatgccacagacccctgagcgccagaccctgccccacctcacttccctcccttcccgctgagcttcccttggacactaactcttcccagatgatgacaatgaaattagtgcctgttttcttgcaaatttagcacttggaacatttaaagaaaggtctatgctgtcatatggggtttattgggaactatcctcctggccccaccctgccccttctttttggttttgacatcattcatttccacctgggaatttctggtgccatgccagaaagaatgaggaacctgtattcctcttcttcgtgataatataatctctatttttttaggaaaacaaaaatgaaaaactactccatttgaggattgtaattcccacccctcttgcttcttccccacctcaccatctcccagaccctcttccctttgcccttctcctccaatacataaaggacacagacaaggaacttgctgaaaggccaaccatttcaggatcagtcaaaggcagcaagcagatagactcaaggtgtgtgaaagatgttatacaccaggagctgccactgcatgtcccaaccagactgtgtctgtctgtgtctgcatgtaagagtgagggagggaaggaaggaactacaagagagtcggagatgatgcagcacacacacaattccccagcccagtgatgcttgtgttgaccagatgttcctgagtctggagcaagcacccaggccagaataacagagctttcttagttggtgaagacttaaacatctgcctgaggtcaggaggcaatttgcctgccttgtacaaaagctcaggtgaaagactgagatgaatgtctttcctctccctgcctcccaccagacttcctcctggaaaacgctttggtagatttggccaggagctttcttttatgtaaattggataaatacacacaccatacactatccacagatatagccaagtagatttgggtagaggatactatttccagaatagtgtttagctcacctagggggatatgtttgtatacacatttgcatatacccacatggggacataagctaatttttttacaggacacagaattctgttcaatgctgttaaatatgccaatagtttaatctcttctattttgttgtcgttgcttgtttgaagaaaatcatgacattccaagttgacatttttttttcattttaattaaaatttgaaattctgaacaccgtcagcaccctctcttccctatcatgggtcatctgacccctgtccgtctccttgtccctgcttcatgtttgggggcctttctttaactgccttcctggcttagctcagatggcagatgagagtgtagtcaagggcctgggcacaggagggagagctgcagagtgtcctgcctgccttggctggagggacacctctcctgggtgtggagacagcttggttccctttccctagctccctggtgggtgaatgccacctcctgagatcctcacctcttggaattaaaattgttggtcactggggaaagcctgagtttgcaaccagttgtagggtttctgttgtgttttttttttttttttgaaataaaactataatataaattctcctattaaataaaattattttaagttttagtgtcaaaagtgagatgctgagagtaggtgataatgtatattttacagagtgggggttggcaggatggtgacattgaacatgattgctctctgtctcttttttcagcttatgggtatttatcttctattagtatttgtatcttcagttcattccactttaggaaacagagctgccaattgaaacagaagaagaaaaaaaaaaaaagcagcagacaacacactgtagagtcttgcacacacacaagtgcccaggcaaggtgcttggcagaaccgcagagtgggaagagagtaccggcatcgggtttccttgggatcaatttcattaccgtgtacctttcccattgtggtcatgccatttggcagggggagaatgggaggcttggccttctttgtgaggcagtgtgagcagaagctgatgccagcatgtcactggttttgaagggatgagcccagacttgatgttttgggattgtccttattttaacctcaaggtctcgcatggtggggcccctgaccaacctacacaagttccctcccacaagtggacatcagtgtcttctctgtgaggcatctggccattcgcactccctggtgtggtcagcctctctcacacaaggaggaacttgggtgaaggctgagtgtgaggcacctgaagtttccctgcggagtcgataaattagcagaaccacatccccatctgttaggccttggtgaggaggccctgggcaaagaagggtctttcgcaaagcgatgtcagagggcggttttgagctttctataagctatagctttgtttatttcacccgttcacttactgtataatttaaaatcatttatgtagctgagacacttctgtatttcaatcatatcatgaacattttattttgctaaatcttgtgtcatgtgtaggctgtaatatgtgtacattgtgtttaagagaaaaatgaaacccacatgccgccattttcctgaatcaaattctgcagtggaatggagaggaaaatacttctaggcaagcagctagactggtgaattgggggaaatagaaggaactagtaactgagactcctccagcctcctccctattggaatcccaatggctcctggagtaggaaaaaagtttaaactacattcatgttcttgttctgtgtcactcggccctgggtagtctaccatttacttcaccccaagtcctgctgcccatccagttgggaagccatgattttcctaagaatccagggccatgggagatacaattccaagttctcgcttcctcctttgggcatctcttctgcctcccaatcaaggaagctccatgctcaggctctcagctctcgggccagtgctctgctctgtccagggtaggtaatactgggagactcctgtcttttaccctcccctcgttccagacctgcctcatggtggcaacatggttcttgaacaattaaagaaacaaatgactttttggaatagccctgtctagggcaaactgtggcccccaggagacactacccttccatgccccagacctctgtcttgcatgtgacaattgacaatctggactaccccaagatggcacccaagtgtttggcttctggctacctaaggttaacatgtcactagagtatttttatgagagacaaacattataaaaatctgatggcaaaagcaaaacaaaatggaaagtaggggaggtggatgtgacaacaacttccaaattggctctttggaggcgagaggaaggggagaacttggagaatagtttttgctttgggggtagaggcttcttagattctcccagcatccgcctttccctttagccagtctgctgtcctgaaacccagaagtgatggagagaaaccaacaagagatctcgaaccctgtctagaaggaatgtatttgttgctaaatttcgtagcactgtttacagttttcctccatgttatttatgaattttatattccgtgaatgtatattgtcttgtaatgttgcagtgtgcttcccggaagcacactgcaacaaacgagggtgcataagctggttttaatatgtacctgggagtgttaagcttagaggaaatcacagtctgcaatccggcc

SEQ ID NO: 366690 - DNA, 5427 bp, Homo sapiens
  misc_feature (7)..(7): n is a, c, g, or t
  misc_feature (316)..(317): n is a, c, g, or t
  misc_feature (348)..(348): n is a, c, g, or t
  misc_feature (657)..(657): n is a, c, g, or t
tctgtgncttgccccagagctgatccttgtctttgtccacttctcagcgaggatggcacttcagggagcccttcccttactatcgcagagagagcaggccctccccagtcatgtccaacccagaactctgttttgttttcttcatagccctagcatcacagaaaatcaccctgtgcattcatggatgtccacgggggcaagggctttgtgttgcttaacccagcatcctgaaccgtgtttgttgaatgaatacagaaccccgtttgctctgggagagcacagaaaacagtcttctatcatatatcatagccagctnnaaacagcagatggcttccatatccagagagnaagaaccagagagagagagaaagagagagagtttgggtctttctcctctgtgcctgctctctccagagaaactggaggggtagcagttagcattcccccgctggttccaccaagcacagtcaaggtctctaggacatggccacccctcacctgtggaagcggtcctgctggggtgggtgggtgttagttggttctggtttgggtcagagacacccagtggcccaggtgggcgtggggccagggcgcagacgagaaggggcacgagggctccgctccgaggacccagcggcaagcaccggtcccgggcgngccccagcccacccactcgcgtgcccacggcggcattattccctataaggatctgaacgatccgggggcggccccgccccgttaccccttgcccccggccccgccccctttttggagggccgatgaggtaatgcggctctgccattggtctgagggggcgggccccaacagcccgaggcggggtccccgggggcccagcgctatatcactcggccgcccaggcagcggcgcagagcgggcagcaggcaggcggcgggcgctcagacggcttctcctcctcctcttgctcctccagctcctgctccttcgccgggaggccgcccgccgagtcctgcgccagcgccgaggcagcctcgctgcgccccatcccgtcccgccgggcactcggagggcagcgcgccggaggccaaggttgccccgcacggcccggcgggcgagcgagctcgggctgcagcagccccgccggcggcgcgcacggcaactttggagaggcgagcagcagccccggcagcggcggcagcagcggcaatgaccccttggctcgggctcatcgtgctcctgggcagctggagcctgggggactggggcgccgaggcgtgcacatgctcgcccagccacccccaggacgccttctgcaactccgacatcgtgatccgggccaaggtggtggggaagaagctggtaaaggaggggcccttcggcacgctggtctacaccatcaagcagatgaagatgtaccgaggcttcaccaagatgccccatgtgcagtacatccatacggaagcttccgagagtctctgtggccttaagctggaggtcaacaagtaccagtacctgctgacaggtcgcgtctatgatggcaagatgtacacggggctgtgcaacttcgtggagaggtgggaccagctcaccctctcccagcgcaaggggctgaactatcggtatcacctgggttgtaactgcaagatcaagtcctgctactacctgccttgctttgtgacttccaagaacgagtgtctctggaccgacatgctctccaatttcggttaccctggctaccagtccaaacactacgcctgcatccggcagaagggcggctactgcagctggtaccgaggatgggcccccccggataaaagcatcatcaatgccacagacccctgagcgccagaccctgccccacctcacttccctcccttcccgctgagcttcccttggacactaactcttcccagatgatgacaatgaaattagtgcctgttttcttgcaaatttagcacttggaacatttaaagaaaggtctatgctgtcatatggggtttattgggaactatcctcctggccccaccctgccccttctttttggttttgacatcattcatttccacctgggaatttctggtgccatgccagaaagaatgaggaacctgtattcctcttcttcgtgataatataatctctatttttttaggaaaacaaaaatgaaaaactactccatttgaggattgtaattcccacccctcttgcttcttccccacctcaccatctcccagaccctcttccctttgcccttctcctccaatacataaaggacacagacaaggaacttgctgaaaggccaaccatttcaggatcagtcaaaggcagcaagcagatagactcaaggtgtgtgaaagatgttatacaccaggagctgccactgcatgtcccaaccagactgtgtctgtctgtgtctgcatgtaagagtgagggagggaaggaaggaactacaagagagtcggagatgatgcagcacacacacaattccccagcccagtgatgcttgtgttgaccagatgttcctgagtctggagcaagcacccaggccagaataacagagctttcttagttggtgaagacttaaacatctgcctgaggtcaggaggcaatttgcctgccttgtacaaaagctcaggtgaaagactgagatgaatgtctttcctctccctgcctcccaccagacttcctcctggaaaacgctttggtagatttggccaggagctttcttttatgtaaattggataaatacacacaccatacactatccacagatatagccaagtagatttgggtagaggatactatttccagaatagtgtttagctcacctagggggatatgtttgtatacacatttgcatatacccacatggggacataagctaatttttttacaggacacagaattctgttcaatgctgttaaatatgccaatagtttaatctcttctattttgttgtcgttgcttgtttgaagaaaatcatgacattccaagttgacatttttttttcattttaattaaaatttgaaattctgaacaccgtcagcaccctctcttccctatcatgggtcatctgacccctgtccgtctccttgtccctgcttcatgtttgggggcctttctttaactgccttcctggcttagctcagatggcagatgagagtgtagtcaagggcctgggcacaggagggagagctgcagagtgtcctgcctgccttggctggagggacacctctcctgggtgtggagacagcttggttccctttccctagctccctggtgggtgaatgccacctcctgagatcctcacctcttggaattaaaattgttggtcactggggaaagcctgagtttgcaaccagttgtagggtttctgttgtgttttttttttttttttgaaataaaactataatataaattctcctattaaataaaattattttaagttttagtgtcaaaagtgagatgctgagagtaggtgataatgtatattttacagagtgggggttggcaggatggtgacattgaacatgattgctctctgtctcttttttcagcttatgggtatttatcttctattagtatttgtatcttcagttcattccactttaggaaacagagctgccaattgaaacagaagaagaaaaaaaaaaaaagcagcagacaacacactgtagagtcttgcacacacacaagtgcccaggcaaggtgcttggcagaaccgcagagtgggaagagagtaccggcatcgggtttccttgggatcaatttcattaccgtgtacctttcccattgtggtcatgccatttggcagggggagaatgggaggcttggccttctttgtgaggcagtgtgagcagaagctgatgccagcatgtcactggttttgaagggatgagcccagacttgatgttttgggattgtccttattttaacctcaaggtctcgcatggtggggcccctgaccaacctacacaagttccctcccacaagtggacatcagtgtcttctctgtgaggcatctggccattcgcactccctggtgtggtcagcctctctcacacaaggaggaacttgggtgaaggctgagtgtgaggcacctgaagtttccctgcggagtcgataaattagcagaaccacatccccatctgttaggccttggtgaggaggccctgggcaaagaagggtctttcgcaaagcgatgtcagagggcggttttgagctttctataagctatagctttgtttatttcacccgttcacttactgtataatttaaaatcatttatgtagctgagacacttctgtatttcaatcatatcatgaacattttattttgctaaatcttgtgtcatgtgtaggctgtaatatgtgtacattgtgtttaagagaaaaatgaaacccacatgccgccattttcctgaatcaaattctgcagtggaatggagaggaaaatacttctaggcaagcagctagactggtgaattgggggaaatagaaggaactagtaactgagactcctccagcctcctccctattggaatcccaatggctcctggagtaggaaaaaagtttaaactacattcatgttcttgttctgtgtcactcggccctgggtagtctaccatttacttcaccccaagtcctgctgcccatccagttgggaagccatgattttcctaagaatccagggccatgggagatacaattccaagttctcgcttcctcctttgggcatctcttctgcctcccaatcaaggaagctccatgctcaggctctcagctctcgggccagtgctctgctctgtccagggtaggtaatactgggagactcctgtcttttaccctcccctcgttccagacctgcctcatggtggcaacatggttcttgaacaattaaagaaacaaatgactttttggaatagccctgtctagggcaaactgtggcccccaggagacactacccttccatgccccagacctctgtcttgcatgtgacaattgacaatctggactaccccaagatggcacccaagtgtttggcttctggctacctaaggttaacatgtcactagagtatttttatgagagacaaacattataaaaatctgatggcaaaagcaggaggcgagaggaaggggagaacttggagaatagtttttgctttgggggtagaggcttcttagattctcccagcatccgcctttccctttagccagtctgctgtcctgaaacccagaagtgatggagagaaaccaacaagagatctcgaaccctgtctagaaggaatgtatttgttgctaaatttcgtagcactgtttacagttttcctccatgttatttatgaattttatattccgtgaatgtatattgtcttgtaatgttgcataatgttcactttttatagtgtgtcctttattctaaacagtaaagtggttttatttctatcaca

SEQ ID NO: 366691 - DNA, 3265 bp, Homo sapiens
agagaaatctaaatttgagaaaattagagaatgtaataaactgatgtcgtgatggattgatcatggacagagatgttaaggaaactcttagatgtagaaatggcataacaggatcactatggttcatcatgtaagtatttcatgggatgaggaatggtgaaaaccaaaacagattgttgagagatttggttgggaaggaaggaactacaagagagtcggagatgatgcagcacacacacaattccccagcccagtgatgcttgtgttgaccagatgttcctgagtctggagcaagcacccaggccagaataacagagctttcttagttggtgaagacttaaacatctgcctgaggtcaggaggcaatttgcctgccttgtacaaaagctcaggtgaaagactgagatgaatgtctttcctctccctgcctcccaccagacttcctcctggaaaacgctttggtagatttggccaggagctttcttttatgtaaattggataaatacacacaccatacactatccacagatatagccaagtagatttgggtagaggatactatttccagaatagtgtttagctcacctagggggatatgtttgtatacacatttgcatatacccacatggggacataagctaatttttttacaggacacagaattctgttcaatgctgttaaatatgccaatagtttaatctcttctattttgttgtcgttgcttgtttgaagaaaatcatgacattccaagttgacatttttttttcattttaattaaaatttgaaattctgaacaccgtcagcaccctctcttccctatcatgggtcatctgacccctgtccgtctccttgtccctgcttcatgtttgggggcctttctttaactgccttcctggcttagctcagatggcagatgagagtgtagtcaagggcctgggcacaggagggagagctgcagagtgtcctgcctgccttggctggagggacacctctcctgggtgtggagacagcttggttccctttccctagctccctggtgggtgaatgccacctcctgagatcctcacctcttggaattaaaattgttggtcactggggaaagcctgagtttgcaaccagttgtagggtttctgttgtgttttttttttttttttgaaataaaactataatataaattctcctattaaataaaattattttaagttttagtgtcaaaagtgagatgctgagagtaggtgataatgtatattttacagagtgggggttggcaggatggtgacattgaacatgattgctctctgtctcttttttcagcttatgggtatttatcttctattagtatttgtatcttcagttcattccactttaggaaacagagctgccaattgaaacagaagaagaaaaaaaaaaaaagcagcagacaacacactgtagagtcttgcacacacacaagtgcccaggcaaggtgcttggcagaaccgcagagtgggaagagagtaccggcatcgggtttccttgggatcaatttcattaccgtgtacctttcccattgtggtcatgccatttggcagggggagaatgggaggcttggccttctttgtgaggcagtgtgagcagaagctgatgccagcatgtcactggttttgaagggatgagcccagacttgatgttttgggattgtccttattttaacctcaaggtctcgcatggtggggcccctgaccaacctacacaagttccctcccacaagtggacatcagtgtcttctctgtgaggcatctggccattcgcactccctggtgtggtcagcctctctcacacaaggaggaacttgggtgaaggctgagtgtgaggcacctgaagtttccctgcggagtcgataaattagcagaaccacatccccatctgttaggccttggtgaggaggccctgggcaaagaagggtctttcgcaaagcgatgtcagagggcggttttgagctttctataagctatagctttgtttatttcacccgttcacttactgtataatttaaaatcatttatgtagctgagacacttctgtatttcaatcatatcatgaacattttattttgctaaatcttgtgtcatgtgtaggctgtaatatgtgtacattgtgtttaagagaaaaatgaaacccacatgccgccattttcctgaatcaaattctgcagtggaatggagaggaaaatacttctaggcaagcagctagactggtgaattgggggaaatagaaggaactagtaactgagactcctccagcctcctccctattggaatcccaatggctcctggagtaggaaaaaagtttaaactacattcatgttcttgttctgtgtcactcggccctgggtagtctaccatttacttcaccccaagtcctgctgcccatccagttgggaagccatgattttcctaagaatccagggccatgggagatacaattccaagttctcgcttcctcctttgggcatctcttctgcctcccaatcaaggaagctccatgctcaggctctcagctctcgggccagtgctctgctctgtccagggtaggtaatactgggagactcctgtcttttaccctcccctcgttccagacctgcctcatggtggcaacatggttcttgaacaattaaagaaacaaatgactttttggaatagccctgtctagggcaaactgtggcccccaggagacactacccttccatgccccagacctctgtcttgcatgtgacaattgacaatctggactaccccaagatggcacccaagtgtttggcttctggctacctaaggttaacatgtcactagagtatttttatgagagacaaacattataaaaatctgatggcaaaagcaaaacaaaatggaaagtaggggaggtggatgtgacaacaacttccaaattggctctttggaggcgagaggaaggggagaacttggagaatagtttttgctttgggggtagaggcttcttagattctcccagcatccgcctttccctttagccagtctgctgtcctgaaacccagaagtgatggagagaaaccaacaagagatctcgaaccctgtctagaaggaatgtatttgttgctaaatttcgtagcactgtttacagttttcctccatgttatttatgaattttatattccgtgaatgtatattgtcttgtaatgttgcataatgttcactttttatagtgtgtcctttattctaaacagtaaagtggttttatttctatcaca

SEQ ID NO: 366692 - DNA, 4958 bp, Homo sapiens
  misc_feature (7)..(7): n is a, c, g, or t
  misc_feature (316)..(317): n is a, c, g, or t
  misc_feature (348)..(348): n is a, c, g, or t
  misc_feature (657)..(657): n is a, c, g, or t
  misc_feature (4910)..(4910): n is a, c, g, or t
  misc_feature (4914)..(4914): n is a, c, g, or t
tctgtgncttgccccagagctgatccttgtctttgtccacttctcagcgaggatggcacttcagggagcccttcccttactatcgcagagagagcaggccctccccagtcatgtccaacccagaactctgttttgttttcttcatagccctagcatcacagaaaatcaccctgtgcattcatggatgtccacgggggcaagggctttgtgttgcttaacccagcatcctgaaccgtgtttgttgaatgaatacagaaccccgtttgctctgggagagcacagaaaacagtcttctatcatatatcatagccagctnnaaacagcagatggcttccatatccagagagnaagaaccagagagagagagaaagagagagagtttgggtctttctcctctgtgcctgctctctccagagaaactggaggggtagcagttagcattcccccgctggttccaccaagcacagtcaaggtctctaggacatggccacccctcacctgtggaagcggtcctgctggggtgggtgggtgttagttggttctggtttgggtcagagacacccagtggcccaggtgggcgtggggccagggcgcagacgagaaggggcacgagggctccgctccgaggacccagcggcaagcaccggtcccgggcgngccccagcccacccactcgcgtgcccacggcggcattattccctataaggatctgaacgatccgggggcggccccgccccgttaccccttgcccccggccccgccccctttttggagggccgatgaggtaatgcggctctgccattggtctgagggggcgggccccaacagcccgaggcggggtccccgggggcccagcgctatatcactcggccgcccaggcagcggcgcagagcgggcagcaggcaggcggcgggcgctcagacggcttctcctcctcctcttgctcctccagctcctgctccttcgccgggaggccgcccgccgagtcctgcgccagcgccgaggcagcctcgctgcgccccatcccgtcccgccgggcactcggagggcagcgcgccggaggccaaggttgccccgcacggcccggcgggcgagcgagctcgggctgcagcagccccgccggcggcgcgcacggcaactttggagaggcgagcagcagccccggcagcggcggcagcagcggcaatgaccccttggctcgggctcatcgtgctcctgggcagctggagcctgggggactggggcgccgaggcgtgcacatgctcgcccagccacccccaggacgccttctgcaactccgacatcgtgatccgggccaaggtggtggggaagaagctggtaaaggaggggcccttcggcacgctggtctacaccatcaagcagatgaagatgtaccgaggcttcaccaagatgccccatgtgcagtacatccatacggaagcttccgagagtctctgtggccttaagctggaggtcaacaagtaccagtacctgctgacaggtcgcgtctatgatggcaagatgtacacggggctgtgcaacttcgtggagaggtgggaccagctcaccctctcccagcgcaaggggctgaactatcggtatcacctgggttgtaactgcaagatcaagtcctgctactacctgccttgctttgtgacttccaagaacgagtgtctctggaccgacatgctctccaatttcggttaccctggctaccagtccaaacactacgcctgcatccggcagaagggcggctactgcagctggtaccgaggatgggcccccccggataaaagcatcatcaatgccacagacccctgagcgccagaccctgccccacctcacttccctcccttcccgctgagcttcccttggacactaactcttcccagatgatgacaatgaaattagtgcctgttttcttgcaaatttagcacttggaacatttaaagaaaggtctatgctgtcatatggggtttattgggaactatcctcctggccccaccctgccccttctttttggttttgacatcattcatttccacctgggaatttctggtgccatgccagaaagaatgaggaacctgtattcctcttcttcgtgataatataatctctatttttttaggaaaacaaaaatgaaaaactactccatttgaggattgtaattcccacccctcttgcttcttccccacctcaccatctcccagaccctcttccctttgcccttctcctccaatacataaaggacacagacaaggaacttgctgaaaggccaaccatttcaggatcagtcaaaggcagcaagcagatagactcaaggtgtgtgaaagatgttatacaccaggagctgccactgcatgtcccaaccagactgtgtctgtctgtgtctgcatgtaagagtgagggagggaaggaaggaactacaagagagtcggagatgatgcagcacacacacaattccccagcccagtgatgcttgtgttgaccagatgttcctgagtctggagcaagcacccaggccagaataacagagctttcttagttggtgaagacttaaacatctgcctgaggtcaggaggcaatttgcctgccttgtacaaaagctcaggtgaaagactgagatgaatgtctttcctctccctgcctcccaccagacttcctcctggaaaacgctttggtagatttggccaggagctttcttttatgtaaattggataaatacacacaccatacactatccacagatatagccaagtagatttgggtagaggatactatttccagaatagtgtttagctcacctagggggatatgtttgtatacacatttgcatatacccacatggggacataagctaatttttttacaggacacagaattctgttcaatgctgttaaatatgccaatagtttaatctcttctattttgttgtcgttgcttgtttgaagaaaatcatgacattccaagttgacatttttttttcattttaattaaaatttgaaattctgaacaccgtcagcaccctctcttccctatcatgggtcatctgacccctgtccgtctccttgtccctgcttcatgtttgggggcctttctttaactgccttcctggcttagctcagatggcagatgagagtgtagtcaagggcctgggcacaggagggagagctgcagagtgtcctgcctgccttggctggagggacacctctcctgggtgtggagacagcttggttccctttccctagctccctggtgggtgaatgccacctcctgagatcctcacctcttggaattaaaattgttggtcactggggaaagcctgagtttgcaaccagttgtagggtttctgttgtgttttttttttttttttgaaataaaactataatataaattctcctattaaataaaattattttaagttttagtgtcaaaagtgagatgctgagagtaggtgataatgtatattttacagagtgggggttggcaggatggtgacattgaacatgattgctctctgtctcttttttcagcttatgggtatttatcttctattagtatttgtatcttcagttcattccactttaggaaacagagctgccaattgaaacagaagaagaaaaaaaaaaaaagcagcagacaacacactgtagagtcttgcacacacacaagtgcccaggcaaggtgcttggcagaaccgcagagtgggaagagagtaccggcatcgggtttccttgggatcaatttcattaccgtgtacctttcccattgtggtcatgccatttggcagggggagaatgggaggcttggccttctttgtgaggcagtgtgagcagaagctgatgccagcatgtcactggttttgaagggatgagcccagacttgatgttttgggattgtccttattttaacctcaaggtctcgcatggtggggcccctgaccaacctacacaagttccctcccacaagtggacatcagtgtcttctctgtgaggcatctggccattcgcactccctggtgtggtcagcctctctcacacaaggaggaacttgggtgaaggctgagtgtgaggcacctgaagtttccctgcggagtcgataaattagcagaaccacatccccatctgttaggccttggtgaggaggccctgggcaaagaagggtctttcgcaaagcgatgtcagagggcggttttgagctttctataagctatagctttgtttatttcacccgttcacttactgtataatttaaaatcatttatgtagctgagacacttctgtatttcaatcatatcatgaacattttattttgctaaatcttgtgtcatgtgtaggctgtaatatgtgtacattgtgtttaagagaaaaatgaaacccacatgccgccattttcctgaatcaaattctgcagtggaatggagaggaaaatacttctaggcaagcagctagactggtgaattgggggaaatagaaggaactagtaactgagactcctccagcctcctccctattggaatcccaatggctcctggagtaggaaaaaagtttaaactacattcatgttcttgttctgtgtcactcggccctgggtagtctaccatttacttcaccccaagtcctgctgcccatccagttgggaagccatgattttcctaagaatccagggccatgggagatacaattccaagttctcgcttcctcctttgggcatctcttctgcctcccaatcaaggaagctccatgctcaggctctcagctctcgggccagtgctctgctctgtccagggtaggtaatactgggagactcctgtcttttaccctcccctcgttccagacctgcctcatggtggcaacatggttcttgaacaattaaagaaacaaatgactttttggaatagccctgtctanggcnaactgtgtacccagaccggggataagatcgttagatcaccacaa

SEQ ID NO: 366693 - DNA, 4177 bp, Homo sapiens
  misc_feature (7)..(7): n is a, c, g, or t
  misc_feature (316)..(317): n is a, c, g, or t
  misc_feature (348)..(348): n is a, c, g, or t
  misc_feature (657)..(657): n is a, c, g, or t
tctgtgncttgccccagagctgatccttgtctttgtccacttctcagcgaggatggcacttcagggagcccttcccttactatcgcagagagagcaggccctccccagtcatgtccaacccagaactctgttttgttttcttcatagccctagcatcacagaaaatcaccctgtgcattcatggatgtccacgggggcaagggctttgtgttgcttaacccagcatcctgaaccgtgtttgttgaatgaatacagaaccccgtttgctctgggagagcacagaaaacagtcttctatcatatatcatagccagctnnaaacagcagatggcttccatatccagagagnaagaaccagagagagagagaaagagagagagtttgggtctttctcctctgtgcctgctctctccagagaaactggaggggtagcagttagcattcccccgctggttccaccaagcacagtcaaggtctctaggacatggccacccctcacctgtggaagcggtcctgctggggtgggtgggtgttagttggttctggtttgggtcagagacacccagtggcccaggtgggcgtggggccagggcgcagacgagaaggggcacgagggctccgctccgaggacccagcggcaagcaccggtcccgggcgngccccagcccacccactcgcgtgcccacggcggcattattccctataaggatctgaacgatccgggggcggccccgccccgttaccccttgcccccggccccgccccctttttggagggccgatgaggtaatgcggctctgccattggtctgagggggcgggccccaacagcccgaggcggggtccccgggggcccagcgctatatcactcggccgcccaggcagcggcgcagagcgggcagcaggcaggcggcgggcgctcagacggcttctcctcctcctcttgctcctccagctcctgctccttcgccgggaggccgcccgccgagtcctgcgccagcgccgaggcagcctcgctgcgccccatcccgtcccgccgggcactcggagggcagcgcgccggaggccaaggttgccccgcacggcccggcgggcgagcgagctcgggctgcagcagccccgccggcggcgcgcacggcaactttggagaggcgagcagcagccccggcagcggcggcagcagcggcaatgaccccttggctcgggctcatcgtgctcctgggcagctggagcctgggggactggggcgccgaggcgtgcacatgctcgcccagccacccccaggacgccttctgcaactccgacatcgtgatccgggccaaggtggtggggaagaagctggtaaaggaggggcccttcggcacgctggtctacaccatcaagcagatgaagatgtaccgaggcttcaccaagatgccccatgtgcagtacatccatacggaagcttccgagagtctctgtggccttaagctggaggtcaacaagtaccagtacctgctgacaggtcgcgtctatgatggcaagatgtacacggggctgtgcaacttcgtggagaggtgggaccagctcaccctctcccagcgcaaggggctgaactatcggtatcacctgggttgtaactgcaagatcaagtcctgctactacctgccttgctttgtgacttccaagaacgagtgtctctggaccgacatgctctccaatttcggttaccctggctaccagtccaaacactacgcctgcatccggcagaagggcggctactgcagctggtaccgaggatgggcccccccggataaaagcatcatcaatgccacagacccctgagcgccagaccctgccccacctcacttccctcccttcccgctgagcttcccttggacactaactcttcccagatgatgacaatgaaattagtgcctgttttcttgcaaatttagcacttggaacatttaaagaaaggtctatgctgtcatatggggtttattgggaactatcctcctggccccaccctgccccttctttttggttttgacatcattcatttccacctgggaatttctggtgccatgccagaaagaatgaggaacctgtattcctcttcttcgtgataatataatctctatttttttaggaaaacaaaaatgaaaaactactccatttgaggattgtaattcccacccctcttgcttcttccccacctcaccatctcccagaccctcttccctttgcccttctcctccaatacataaaggacacagacaaggaacttgctgaaaggccaaccatttcaggatcagtcaaaggcagcaagcagatagactcaaggtgtgtgaaagatgttatacaccaggagctgccactgcatgtcccaaccagactgtgtctgtctgtgtctgcatgtaagagtgagggagggaaggaaggaactacaagagagtcggagatgatgcagcacacacacaattccccagcccagtgatgcttgtgttgaccagatgttcctgagtctggagcaagcacccaggccagaataacagagctttcttagttggtgaagacttaaacatctgcctgaggtcaggaggcaatttgcctgccttgtacaaaagctcaggtgaaagactgagatgaatgtctttcctctccctgcctcccaccagacttcctcctggaaaacgctttggtagatttggccaggagctttcttttatgtaaattggataaatacacacaccatacactatccacagatatagccaagtagatttgggtagaggatactatttccagaatagtgtttagctcacctagggggatatgtttgtatacacatttgcatatacccacatggggacataagctaatttttttacaggacacagaattctgttcaatgctgttaaatatgccaatagtttaatctcttctattttgttgtcgttgcttgtttgaagaaaatcatgacattccaagttgacatttttttttcattttaattaaaatttgaaattctgaacaccgtcagcaccctctcttccctatcatgggtcatctgacccctgtccgtctccttgtccctgcttcatgtttgggggcctttctttaactgccttcctggcttagctcagatggcagatgagagtgtagtcaagggcctgggcacaggagggagagctgcagagtgtcctgcctgccttggctggagggacacctctcctgggtgtggagacagcttggttccctttccctagctccctggtgggtgaatgccacctcctgagatcctcacctcttggaattaaaattgttggtcactggggaaagcctgagtttgcaaccagttgtagggtttctgttgtgttttttttttttttttgaaataaaactataatataaattctcctattaaataaaattattttaagttttagtgtcaaaagtgagatgctgagagtaggtgataatgtatattttacagagtgggggttggcaggatggtgacattgaacatgattgctctctgtctcttttttcagcttatgggtatttatcttctattagtatttgtatcttcagttcattccactttaggaaacagagctgccaattgaaacagaagaagaaaaaaaaaaaaagcagcagacaacacactgtagagtcttgcacacacacaagtgcccaggcaaggtgcttggcagaaccgcagagtgggaagagagtaccggcatcgggtttccttgggatcaatttcattaccgtgtacctttcccattgtggtcatgccatttggcagggggagaatgggaggcttggccttctttgtgaggcagtgtgagcagaagctgatgccagcatgtcactggttttgaagggatgagcccagacttgatgttttgggattgtccttattttaacctcaaggtctcgcatggtggggcccctgaccaacctacacaagttccctcccacaagtggacatcagtgtcttctctgtgaggcatctggccattcgcactccctggtgtggtcagcctctctcacacaaggaggaacttgggtgaaggctgagtgtgaggcacctgaagtttccctgcgaacctatgaggcgggcagcctcacgctggccggacagcaggcaccgtgggtggtggaatagtacttgcgtcctagcgacctatga

SEQ ID NO: 366694 - DNA, 2031 bp, Homo sapiens
gcggccgactactactactgctcgaattcaagcttctaacgatgtacggggacatgattgctctctgtctcttttttcagcttatgggtatttatcttctattagtatttgtatcttcagttcattccactttaggaaacagagctgccaattgaaacagaagaagaaaaaaaaaaaaagcagcagacaacacactgtagagtcttgcacacacacaagtgcccaggcaaggtgcttggcagaaccgcagagtgggaagagagtaccggcatcgggtttccttgggatcaatttcattaccgtgtacctttcccattgtggtcatgccatttggcagggggagaatgggaggcttggccttctttgtgaggcagtgtgagcagaagctgatgccagcatgtcactggttttgaagggatgagcccagacttgatgttttgggattgtccttattttaacctcaaggtctcgcatggtggggcccctgaccaacctacacaagttccctcccacaagtggacatcagtgtcttctctgtgaggcatctggccattcgcactccctggtgtggtcagcctctctcacacaaggaggaacttgggtgaaggctgagtgtgaggcacctgaagtttccctgcggagtcgataaattagcagaaccacatccccatctgttaggccttggtgaggaggccctgggcaaagaagggtctttcgcaaagcgatgtcagagggcggttttgagctttctataagctatagctttgtttatttcacccgttcacttactgtataatttaaaatcatttatgtagctgagacacttctgtatttcaatcatatcatgaacattttattttgctaaatcttgtgtcatgtgtaggctgtaatatgtgtacattgtgtttaagagaaaaatgaaacccacatgccgccattttcctgaatcaaattctgcagtggaatggagaggaaaatacttctaggcaagcagctagactggtgaattgggggaaatagaaggaactagtaactgagactcctccagcctcctccctattggaatcccaatggctcctggagtaggaaaaaagtttaaactacattcatgttcttgttctgtgtcactcggccctgggtagtctaccatttacttcaccccaagtcctgctgcccatccagttgggaagccatgattttcctaagaatccagggccatgggagatacaattccaagttctcgcttcctcctttgggcatctcttctgcctcccaatcaaggaagctccatgctcaggctctcagctctcgggccagtgctctgctctgtccagggtaggtaatactgggagactcctgtcttttaccctcccctcgttccagacctgcctcatggtggcaacatggttcttgaacaattaaagaaacaaatgactttttggaatagccctgtctagggcaaactgtggcccccaggagacactacccttccatgccccagacctctgtcttgcatgtgacaattgacaatctggactaccccaagatggcacccaagtgtttggcttctggctacctaaggttaacatgtcactagagtatttttatgagagacaaacattataaaaatctgatggcaaaagcaaaacaaaatggaaagtaggggaggtggatgtgacaacaacttccaaattggctctttggaggcgagaggaaggggagaacttggagaatagtttttgctttgggggtagaggcttcttagattctcccagcatccgcctttccctttagccagtctgctgtcctgaaacccagaagtgatggagagaaaccaacaagagatctcgaaccctgtctagaaggaatgtatttgttgctaaatttcgtagcactgtttacagttttcctccatgttatttatgaattttatattccgtgaatgtatattgtcttgtaatgttgcataatgttcactttttatagtgtgtcctttattctaaacagtaaagtggttttatttctatcaca

SEQ ID NO: 366695 - DNA, 3478 bp, Homo sapiens
  misc_feature (7)..(7): n is a, c, g, or t
  misc_feature (316)..(317): n is a, c, g, or t
  misc_feature (348)..(348): n is a, c, g, or t
  misc_feature (657)..(657): n is a, c, g, or t
tctgtgncttgccccagagctgatccttgtctttgtccacttctcagcgaggatggcacttcagggagcccttcccttactatcgcagagagagcaggccctccccagtcatgtccaacccagaactctgttttgttttcttcatagccctagcatcacagaaaatcaccctgtgcattcatggatgtccacgggggcaagggctttgtgttgcttaacccagcatcctgaaccgtgtttgttgaatgaatacagaaccccgtttgctctgggagagcacagaaaacagtcttctatcatatatcatagccagctnnaaacagcagatggcttccatatccagagagnaagaaccagagagagagagaaagagagagagtttgggtctttctcctctgtgcctgctctctccagagaaactggaggggtagcagttagcattcccccgctggttccaccaagcacagtcaaggtctctaggacatggccacccctcacctgtggaagcggtcctgctggggtgggtgggtgttagttggttctggtttgggtcagagacacccagtggcccaggtgggcgtggggccagggcgcagacgagaaggggcacgagggctccgctccgaggacccagcggcaagcaccggtcccgggcgngccccagcccacccactcgcgtgcccacggcggcattattccctataaggatctgaacgatccgggggcggccccgccccgttaccccttgcccccggccccgccccctttttggagggccgatgaggtaatgcggctctgccattggtctgagggggcgggccccaacagcccgaggcggggtccccgggggcccagcgctatatcactcggccgcccaggcagcggcgcagagcgggcagcaggcaggcggcgggcgctcagacggcttctcctcctcctcttgctcctccagctcctgctccttcgccgggaggccgcccgccgagtcctgcgccagcgccgaggcagcctcgctgcgccccatcccgtcccgccgggcactcggagggcagcgcgccggaggccaaggttgccccgcacggcccggcgggcgagcgagctcgggctgcagcagccccgccggcggcgcgcacggcaactttggagaggcgagcagcagccccggcagcggcggcagcagcggcaatgaccccttggctcgggctcatcgtgctcctgggcagctggagcctgggggactggggcgccgaggcgtgcacatgctcgcccagccacccccaggacgccttctgcaactccgacatcgtgatccgggccaaggtggtggggaagaagctggtaaaggaggggcccttcggcacgctggtctacaccatcaagcagatgaagatgtaccgaggcttcaccaagatgccccatgtgcagtacatccatacggaagcttccgagagtctctgtggccttaagctggaggtcaacaagtaccagtacctgctgacaggtcgcgtctatgatggcaagatgtacacggggctgtgcaacttcgtggagaggtgggaccagctcaccctctcccagcgcaaggggctgaactatcggtatcacctgggttgtaactgcaagatcaagtcctgctactacctgccttgctttgtgacttccaagaacgagtgtctctggaccgacatgctctccaatttcggttaccctggctaccagtccaaacactacgcctgcatccggcagaagggcggctactgcagctggtaccgaggatgggcccccccggataaaagcatcatcaatgccacagacccctgagcgccagaccctgccccacctcacttccctcccttcccgctgagcttcccttggacactaactcttcccagatgatgacaatgaaattagtgcctgttttcttgcaaatttagcacttggaacatttaaagaaaggtctatgctgtcatatggggtttattgggaactatcctcctggccccaccctgccccttctttttggttttgacatcattcatttccacctgggaatttctggtgccatgccagaaagaatgaggaacctgtattcctcttcttcgtgataatataatctctatttttttaggaaaacaaaaatgaaaaactactccatttgaggattgtaattcccacccctcttgcttcttccccacctcaccatctcccagaccctcttccctttgcccttctcctccaatacataaaggacacagacaaggaacttgctgaaaggccaaccatttcaggatcagtcaaaggcagcaagcagatagactcaaggtgtgtgaaagatgttatacaccaggagctgccactgcatgtcccaaccagactgtgtctgtctgtgtctgcatgtaagagtgagggagggaaggaaggaactacaagagagtcggagatgatgcagcacacacacaattccccagcccagtgatgcttgtgttgaccagatgttcctgagtctggagcaagcacccaggccagaataacagagctttcttagttggtgaagacttaaacatctgcctgaggtcaggaggcaatttgcctgccttgtacaaaagctcaggtgaaagactgagatgaatgtctttcctctccctgcctcccaccagacttcctcctggaaaacgctttggtagatttggccaggagctttcttttatgtaaattggataaatacacacaccatacactatccacagatatagccaagtagatttgggtagaggatactatttccagaatagtgtttagctcacctagggggatatgtttgtatacacatttgcatatacccacatggggacataagctaatttttttacaggacacagaattctgttcaatgctgttaaatatgccaatagtttaatctcttctattttgttgtcgttgcttgtttgaagaaaatcatgacattccaagttgacatttttttttcattttaattaaaatttgaaattctgaacaccgtcagcaccctctcttccctatcatgggtcatctgacccctgtccgtctccttgtccctgcttcatgtttgggggcctttctttaactgccttcctggcttagctcagatggcagatgagagtgtagtcaagggcctgggcacaggagggagagctgcagagtgtcctgcctgccttggctggagggacacctctcctgggtgtggagacagcttggttccctttccctagctccctggtgggtgaatgccacctcctgagatcctcacctcttggaattaaaattgttggtcactggggaaagcctgagtttgcaaccagttgtagggtttctgttgtgttttttttttttttggaaaaaaacctttaataaaatttttcttttaaaaaaaatttttttaaggttttggggccaaaggggaatccctgaaggagggtattattttttttttaacagaggg

SEQ ID NO: 366696 - DNA, 3013 bp, Homo sapiens
  misc_feature (7)..(7): n is a, c, g, or t
  misc_feature (316)..(317): n is a, c, g, or t
  misc_feature (348)..(348): n is a, c, g, or t
  misc_feature (657)..(657): n is a, c, g, or t
tctgtgncttgccccagagctgatccttgtctttgtccacttctcagcgaggatggcacttcagggagcccttcccttactatcgcagagagagcaggccctccccagtcatgtccaacccagaactctgttttgttttcttcatagccctagcatcacagaaaatcaccctgtgcattcatggatgtccacgggggcaagggctttgtgttgcttaacccagcatcctgaaccgtgtttgttgaatgaatacagaaccccgtttgctctgggagagcacagaaaacagtcttctatcatatatcatagccagctnnaaacagcagatggcttccatatccagagagnaagaaccagagagagagagaaagagagagagtttgggtctttctcctctgtgcctgctctctccagagaaactggaggggtagcagttagcattcccccgctggttccaccaagcacagtcaaggtctctaggacatggccacccctcacctgtggaagcggtcctgctggggtgggtgggtgttagttggttctggtttgggtcagagacacccagtggcccaggtgggcgtggggccagggcgcagacgagaaggggcacgagggctccgctccgaggacccagcggcaagcaccggtcccgggcgngccccagcccacccactcgcgtgcccacggcggcattattccctataaggatctgaacgatccgggggcggccccgccccgttaccccttgcccccggccccgccccctttttggagggccgatgaggtaatgcggctctgccattggtctgagggggcgggccccaacagcccgaggcggggtccccgggggcccagcgctatatcactcggccgcccaggcagcggcgcagagcgggcagcaggcaggcggcgggcgctcagacggcttctcctcctcctcttgctcctccagctcctgctccttcgccgggaggccgcccgccgagtcctgcgccagcgccgaggcagcctcgctgcgccccatcccgtcccgccgggcactcggagggcagcgcgccggaggccaaggttgccccgcacggcccggcgggcgagcgagctcgggctgcagcagccccgccggcggcgcgcacggcaactttggagaggcgagcagcagccccggcagcggcggcagcagcggcaatgaccccttggctcgggctcatcgtgctcctgggcagctggagcctgggggactggggcgccgaggcgtgcacatgctcgcccagccacccccaggacgccttctgcaactccgacatcgtgatccgggccaaggtggtggggaagaagctggtaaaggaggggcccttcggcacgctggtctacaccatcaagcagatgaagatgtaccgaggcttcaccaagatgccccatgtgcagtacatccatacggaagcttccgagagtctctgtggccttaagctggaggtcaacaagtaccagtacctgctgacaggtcgcgtctatgatggcaagatgtacacggggctgtgcaacttcgtggagaggtgggaccagctcaccctctcccagcgcaaggggctgaactatcggtatcacctgggttgtaactgcaagatcaagtcctgctactacctgccttgctttgtgacttccaagaacgagtgtctctggaccgacatgctctccaatttcggttaccctggctaccagtccaaacactacgcctgcatccggcagaagggcggctactgcagctggtaccgaggatgggcccccccggataaaagcatcatcaatgccacagacccctgagcgccagaccctgccccacctcacttccctcccttcccgctgagcttcccttggacactaactcttcccagatgatgacaatgaaattagtgcctgttttcttgcaaatttagcacttggaacatttaaagaaaggtctatgctgtcatatggggtttattgggaactatcctcctggccccaccctgccccttctttttggttttgacatcattcatttccacctgggaatttctggtgccatgccagaaagaatgaggaacctgtattcctcttcttcgtgataatataatctctatttttttaggaaaacaaaaatgaaaaactactccatttgaggattgtaattcccacccctcttgcttcttccccacctcaccatctcccagaccctcttccctttgcccttctcctccaatacataaaggacacagacaaggaacttgctgaaaggccaaccatttcaggatcagtcaaaggcagcaagcagatagactcaaggtgtgtgaaagatgttatacaccaggagctgccactgcatgtcccaaccagactgtgtctgtctgtgtctgcatgtaagagtgagggagggaaggaaggaactacaagagagtcggagatgatgcagcacacacacaattccccagcccagtgatgcttgtgttgaccagatgttcctgagtctggagcaagcacccaggccagaataacagagctttcttagttggtgaagacttaaacatctgcctgaggtcaggaggcaatttgcctgccttgtacaaaagctcaggtgaaagactgagatgaatgtctttcctctccctgcctcccaccagacttcctcctggaaaacgctttggtagatttggccaggagctttcttttatgtaaattggataaatacacacaccatacactatccacagatatagccaagtagatttgggtagaggatactatttccagaatagtgtttagctcacctagggggatatgtttgtatacacatttgcatatacccacatggggacataagctaatttttttacaggacacagaattctgttcaatgctgttaaatatgccaatagtttaatctcttctattttgttgtcgttgcttgtttgaagaaaatcatgacattccaagttgacatttttttttcattttaattaaaatttgaaattctgaa

SEQ ID NO: 366697 - DNA, 3289 bp, Homo sapiens
  misc_feature (7)..(7): n is a, c, g, or t
  misc_feature (316)..(317): n is a, c, g, or t
  misc_feature (348)..(348): n is a, c, g, or t
  misc_feature (657)..(657): n is a, c, g, or t
tctgtgncttgccccagagctgatccttgtctttgtccacttctcagcgaggatggcacttcagggagcccttcccttactatcgcagagagagcaggccctccccagtcatgtccaacccagaactctgttttgttttcttcatagccctagcatcacagaaaatcaccctgtgcattcatggatgtccacgggggcaagggctttgtgttgcttaacccagcatcctgaaccgtgtttgttgaatgaatacagaaccccgtttgctctgggagagcacagaaaacagtcttctatcatatatcatagccagctnnaaacagcagatggcttccatatccagagagnaagaaccagagagagagagaaagagagagagtttgggtctttctcctctgtgcctgctctctccagagaaactggaggggtagcagttagcattcccccgctggttccaccaagcacagtcaaggtctctaggacatggccacccctcacctgtggaagcggtcctgctggggtgggtgggtgttagttggttctggtttgggtcagagacacccagtggcccaggtgggcgtggggccagggcgcagacgagaaggggcacgagggctccgctccgaggacccagcggcaagcaccggtcccgggcgngccccagcccacccactcgcgtgcccacggcggcattattccctataaggatctgaacgatccgggggcggccccgccccgttaccccttgcccccggccccgccccctttttggagggccgatgaggtaatgcggctctgccattggtctgagggggcgggccccaacagcccgaggcggggtccccgggggcccagcgctatatcactcggccgcccaggcagcggcgcagagcgggcagcaggcaggcggcgggcgctcagacggcttctcctcctcctcttgctcctccagctcctgctccttcgccgggaggccgcccgccgagtcctgcgccagcgccgaggcagcctcgctgcgccccatcccgtcccgccgggcactcggagggcagcgcgccggaggccaaggttgccccgcacggcccggcgggcgagcgagctcgggctgcagcagccccgccggcggcgcgcacggcaactttggagaggcgagcagcagccccggcagcggcggcagcagcggcaatgaccccttggctcgggctcatcgtgctcctgggcagctggagcctgggggactggggcgccgaggcgtgcacatgctcgcccagccacccccaggacgccttctgcaactccgacatcgtgatccgggccaaggtggtggggaagaagctggtaaaggaggggcccttcggcacgctggtctacaccatcaagcagatgaagatgtaccgaggcttcaccaagatgccccatgtgcagtacatccatacggaagcttccgagagtctctgtggccttaagctggaggtcaacaagtaccagtacctgctgacaggtcgcgtctatgatggcaagatgtacacggggctgtgcaacttcgtggagaggtgggaccagctcaccctctcccagcgcaaggggctgaactatcggtatcacctgggttgtaactgcaagatcaagtcctgctactacctgccttgctttgtgacttccaagaacgagtgtctctggaccgacatgctctccaatttcggttaccctggctaccagtccaaacactacgcctgcatccggcagaagggcggctactgcagctggtaccgaggatgggcccccccggataaaagcatcatcaatgccacagacccctgagcgccagaccctgccccacctcacttccctcccttcccgctgagcttcccttggacactaactcttcccagatgatgacaatgaaattagtgcctgttttcttgcaaatttagcacttggaacatttaaagaaaggtctatgctgtcatatggggtttattgggaactatcctcctggccccaccctgccccttctttttggttttgacatcattcatttccacctgggaatttctggtgccatgccagaaagaatgaggaacctgtattcctcttcttcgtgataatataatctctatttttttaggaaaacaaaaatgaaaaactactccatttgaggattgtaattcccacccctcttgcttcttccccacctcaccatctcccagaccctcttccctttgcccttctcctccaatacataaaggacacagacaaggaacttgctgaaaggccaaccatttcaggatcagtcaaaggcagcaagcagatagactcaaggtgtgtgaaagatgttatacaccaggagctgccactgcatgtcccaaccagactgtgtctgtctgtgtctgcatgtaagagtgagggagggaaggaaggaactacaagagagtcggagatgatgcagcacacacacaattccccagcccagtgatgcttgtgttgaccagatgttcctgagtctggagcaagcacccaggccagaataacagagctttcttagttggtgaagacttaaacatctgcctgaggtcaggaggcaatttgcctgccttgtacaaaagctcaggtgaaagactgagatgaatgtctttcctctccctgcctcccaccagacttcctcctggaaaacgctttggtagatttggccaggagctttcttttatgtaaattggataaatacacacaccatacactatccacagatatagccaagtagatttgggtagaggatactatttccagaatagtgtttagctcacctagggggatatgtttgtatacacatttgcatatacccacatggggacataagctaatttttttacaggacacagaattctgttcaatgctgttaaatatgccaatagtttaatctcttctattttgttgtcgttgcttgtttgaagaaaatcatgacattccaagttgacatttttttttcattttaattaaaatttgaaattctgaacaccgtcagcaccctctcttccctatcatgggtcatctgacccctgtccgtctccttgtccctgcttcatgtttgggggcctttctttaactgggctactgggtatagccaaattggcgataaagtggtatcaggggctggccagagggaaccgcaacgtccggcgactggctgggggaccctccgggtgggaacctggtcctcccacaccccggtagagacccccaaaccccccgcagggccgccgccaccttacaccagcgaccggcacctccc

SEQ ID NO: 366698 - DNA, 1754 bp, Homo sapiens
  misc_feature (23)..(23): n is a, c, g, or t
gatcgagctcgttaccggactgnagatgtctgagattatcatacctgctgagggtgaaggggagtgagcagacactcgggagggtgtcttgaggctcagggagttatcagttatagaatgttgttgagttggaggaggtggctggtggcccatcctgttttttaaagtttcagctgtgaggtagggccagtagggcaatcctgaagaatgacgatgctccgttgccggcattctgacccagttgcaaagagcctttcttgcagaaggggggattttgcatttgtggtagtcctctgctcgccgccgtaactcttgcgcacgttgaaacattttctgtattctggcggtcttcctctttccattgattttgtcatgatggttgattttcgttgtcaccttcctcttacggattttagctctaacttttgtttccacatgggactggagatgtctgagggcggttttgagctttctataagctatagctttgtttatttcacccgttcacttactgtataatttaaaatcatttatgtagctgagacacttctgtatttcaatcatatcatgaacattttattttgctaaatcttgtgtcatgtgtaggctgtaatatgtgtacattgtgtttaagagaaaaatgaaacccacatgccgccattttcctgaatcaaattctgcagtggaatggagaggaaaatacttctaggcaagcagctagactggtgaattgggggaaatagaaggaactagtaactgagactcctccagcctcctccctattggaatcccaatggctcctggagtaggaaaaaagtttaaactacattcatgttcttgttctgtgtcactcggccctgggtagtctaccatttacttcaccccaagtcctgctgcccatccagttgggaagccatgattttcctaagaatccagggccatgggagatacaattccaagttctcgcttcctcctttgggcatctcttctgcctcccaatcaaggaagctccatgctcaggctctcagctctcgggccagtgctctgctctgtccagggtaggtaatactgggagactcctgtcttttaccctcccctcgttccagacctgcctcatggtggcaacatggttcttgaacaattaaagaaacaaatgactttttggaatagccctgtctagggcaaactgtggcccccaggagacactacccttccatgccccagacctctgtcttgcatgtgacaattgacaatctggactaccccaagatggcacccaagtgtttggcttctggctacctaaggttaacatgtcactagagtatttttatgagagacaaacattataaaaatctgatggcaaaagcaaaacaaaatggaaagtaggggaggtggatgtgacaacaacttccaaattggctctttggaggcgagaggaaggggagaacttggagaatagtttttgctttgggggtagaggcttcttagattctcccagcatccgcctttccctttagccagtctgctgtcctgaaacccagaagtgatggagagaaaccaacaagagatctcgaaccctgtctagaaggaatgtatttgttgctaaatttcgtagcactgtttacagttttcctccatgttatttatgaattttatattccgtgaatgtatattgtcttgtaatgttgcataatgttcactttttatagtgtgtcctttattctaaacagtaaagtggttttatttctatcaca

SEQ ID NO: 366699 - DNA, 3394 bp, Homo sapiens
  misc_feature (7)..(7): n is a, c, g, or t
  misc_feature (316)..(317): n is a, c, g, or t
  misc_feature (348)..(348): n is a, c, g, or t
  misc_feature (657)..(657): n is a, c, g, or t
tctgtgncttgccccagagctgatccttgtctttgtccacttctcagcgaggatggcacttcagggagcccttcccttactatcgcagagagagcaggccctccccagtcatgtccaacccagaactctgttttgttttcttcatagccctagcatcacagaaaatcaccctgtgcattcatggatgtccacgggggcaagggctttgtgttgcttaacccagcatcctgaaccgtgtttgttgaatgaatacagaaccccgtttgctctgggagagcacagaaaacagtcttctatcatatatcatagccagctnnaaacagcagatggcttccatatccagagagnaagaaccagagagagagagaaagagagagagtttgggtctttctcctctgtgcctgctctctccagagaaactggaggggtagcagttagcattcccccgctggttccaccaagcacagtcaaggtctctaggacatggccacccctcacctgtggaagcggtcctgctggggtgggtgggtgttagttggttctggtttgggtcagagacacccagtggcccaggtgggcgtggggccagggcgcagacgagaaggggcacgagggctccgctccgaggacccagcggcaagcaccggtcccgggcgngccccagcccacccactcgcgtgcccacggcggcattattccctataaggatctgaacgatccgggggcggccccgccccgttaccccttgcccccggccccgccccctttttggagggccgatgaggtaatgcggctctgccattggtctgagggggcgggccccaacagcccgaggcggggtccccgggggcccagcgctatatcactcggccgcccaggcagcggcgcagagcgggcagcaggcaggcggcgggcgctcagacggcttctcctcctcctcttgctcctccagctcctgctccttcgccgggaggccgcccgccgagtcctgcgccagcgccgaggcagcctcgctgcgccccatcccgtcccgccgggcactcggagggcagcgcgccggaggccaaggttgccccgcacggcccggcgggcgagcgagctcgggctgcagcagccccgccggcggcgcgcacggcaactttggagaggcgagcagcagccccggcagcggcggcagcagcggcaatgaccccttggctcgggctcatcgtgctcctgggcagctggagcctgggggactggggcgccgaggcgtgcacatgctcgcccagccacccccaggacgccttctgcaactccgacatcgtgatccgggccaaggtggtggggaagaagctggtaaaggaggggcccttcggcacgctggtctacaccatcaagcagatgaagatgtaccgaggcttcaccaagatgccccatgtgcagtacatccatacggaagcttccgagagtctctgtggccttaagctggaggtcaacaagtaccagtacctgctgacaggtcgcgtctatgatggcaagatgtacacggggctgtgcaacttcgtggagaggtgggaccagctcaccctctcccagcgcaaggggctgaactatcggtatcacctgggttgtaactgcaagatcaagtcctgctactacctgccttgctttgtgacttccaagaacgagtgtctctggaccgacatgctctccaatttcggttaccctggctaccagtccaaacactacgcctgcatccggcagaagggcggctactgcagctggtaccgaggatgggcccccccggataaaagcatcatcaatgccacagacccctgagcgccagaccctgccccacctcacttccctcccttcccgctgagcttcccttggacactaactcttcccagatgatgacaatgaaattagtgcctgttttcttgcaaatttagcacttggaacatttaaagaaaggtctatgctgtcatatggggtttattgggaactatcctcctggccccaccctgccccttctttttggttttgacatcattcatttccacctgggaatttctggtgccatgccagaaagaatgaggaacctgtattcctcttcttcgtgataatataatctctatttttttaggaaaacaaaaatgaaaaactactccatttgaggattgtaattcccacccctcttgcttcttccccacctcaccatctcccagaccctcttccctttgcccttctcctccaatacataaaggacacagacaaggaacttgctgaaaggccaaccatttcaggatcagtcaaaggcagcaagcagatagactcaaggtgtgtgaaagatgttatacaccaggagctgccactgcatgtcccaaccagactgtgtctgtctgtgtctgcatgtaagagtgagggagggaaggaaggaactacaagagagtcggagatgatgcagcacacacacaattccccagcccagtgatgcttgtgttgaccagatgttcctgagtctggagcaagcacccaggccagaataacagagctttcttagttggtgaagacttaaacatctgcctgaggtcaggaggcaatttgcctgccttgtacaaaagctcaggtgaaagactgagatgaatgtctttcctctccctgcctcccaccagacttcctcctggaaaacgctttggtagatttggccaggagctttcttttatgtaaattggataaatacacacaccatacactatccacagatatagccaagtagatttgggtagaggatactatttccagaatagtgtttagctcacctagggggatatgtttgtatacacatttgcatatacccacatggggacataagctaatttttttacaggacacagaattctgttcaatgctgttaaatatgccaatagtttaatctcttctattttgttgtcgttgcttgtttgaagaaaatcatgacattccaagttgacatttttttttcattttaattaaaatttgaaattctgaaaaaaaaaaaaaaaaaaaaaaaaaaaaaaaaaaaaaaaaaaaaaaaaaaaaaaaaaaaaaaaaaaaaaaaaaacacaaaaaacaacaaaaaaaaaaaaaaaaagcagggcggcgccggcaccaccaaagagaaacacacacaacacaccggggtgggcaggagccaacgaggtgaaacacacaaggaacaaggagcacccaaaaagcgacgcgcaacaacaaacatggggggtaggcaacaccacgcagaacacaacacccgcggcgggcaacacggtgcttaaaaaaaaccaccaccgagaggggcccagcagaagacacaacggggcacaccaaacgcgcggtggccaacgagcccgcgcgaaataacaaaaagccgggg

SEQ ID NO: 366700 - DNA, 1317 bp, Homo sapiens
  misc_feature (9)..(9): n is a, c, g, or t
  misc_feature (42)..(42): n is a, c, g, or t
  misc_feature (52)..(52): n is a, c, g, or t
  misc_feature (76)..(76): n is a, c, g, or t
  misc_feature (79)..(79): n is a, c, g, or t
  misc_feature (81)..(81): n is a, c, g, or t
ggccccccnccccccccccccgcgacaacaaaaacacttacnggcaataacnatacactcaaggagtggtcgtgantananggaagaagcctgcggtcgccctcacacacttctgtatttcaatcatatcatgaacattttattttgctaaatcttgtgtcatgtgtaggctgtaatatgtgtacattgtgtttaagagaaaaatgaaacccacatgccgccattttcctgaatcaaattctgcagtggaatggagaggaaaatacttctaggcaagcagctagactggtgaattgggggaaatagaaggaactagtaactgagactcctccagcctcctccctattggaatcccaatggctcctggagtaggaaaaaagtttaaactacattcatgttcttgttctgtgtcactcggccctgggtagtctaccatttacttcaccccaagtcctgctgcccatccagttgggaagccatgattttcctaagaatccagggccatgggagatacaattccaagttctcgcttcctcctttgggcatctcttctgcctcccaatcaaggaagctccatgctcaggctctcagctctcgggccagtgctctgctctgtccagggtaggtaatactgggagactcctgtcttttaccctcccctcgttccagacctgcctcatggtggcaacatggttcttgaacaattaaagaaacaaatgactttttggaatagccctgtctagggcaaactgtggcccccaggagacactacccttccatgccccagacctctgtcttgcatgtgacaattgacaatctggactaccccaagatggcacccaagtgtttggcttctggctacctaaggttaacatgtcactagagtatttttatgagagacaaacattataaaaatctgatggcaaaagcaaaacaaaatggaaagtaggggaggtggatgtgacaacaacttccaaattggctctttggaggcgagaggaaggggagaacttggagaatagtttttgctttgggggtagaggcttcttagattctcccagcatccgcctttccctttagccagtctgctgtcctgaaacccagaagtgatggagagaaaccaacaagagatctcgaaccctgtctagaaggaatgtatttgttgctaaatttcgtagcactgtttacagttttcctccatgttatttatgaattttatattccgtgaatgtatattgtcttgtaatgttgcataatgttcactttttatagtgtgtcctttattctaaacagtaaagtggttttatttctatcaca

SEQ ID NO: 366701 - DNA, 2604 bp, Homo sapiens
  misc_feature (7)..(7): n is a, c, g, or t
  misc_feature (316)..(317): n is a, c, g, or t
  misc_feature (348)..(348): n is a, c, g, or t
  misc_feature (657)..(657): n is a, c, g, or t
tctgtgncttgccccagagctgatccttgtctttgtccacttctcagcgaggatggcacttcagggagcccttcccttactatcgcagagagagcaggccctccccagtcatgtccaacccagaactctgttttgttttcttcatagccctagcatcacagaaaatcaccctgtgcattcatggatgtccacgggggcaagggctttgtgttgcttaacccagcatcctgaaccgtgtttgttgaatgaatacagaaccccgtttgctctgggagagcacagaaaacagtcttctatcatatatcatagccagctnnaaacagcagatggcttccatatccagagagnaagaaccagagagagagagaaagagagagagtttgggtctttctcctctgtgcctgctctctccagagaaactggaggggtagcagttagcattcccccgctggttccaccaagcacagtcaaggtctctaggacatggccacccctcacctgtggaagcggtcctgctggggtgggtgggtgttagttggttctggtttgggtcagagacacccagtggcccaggtgggcgtggggccagggcgcagacgagaaggggcacgagggctccgctccgaggacccagcggcaagcaccggtcccgggcgngccccagcccacccactcgcgtgcccacggcggcattattccctataaggatctgaacgatccgggggcggccccgccccgttaccccttgcccccggccccgccccctttttggagggccgatgaggtaatgcggctctgccattggtctgagggggcgggccccaacagcccgaggcggggtccccgggggcccagcgctatatcactcggccgcccaggcagcggcgcagagcgggcagcaggcaggcggcgggcgctcagacggcttctcctcctcctcttgctcctccagctcctgctccttcgccgggaggccgcccgccgagtcctgcgccagcgccgaggcagcctcgctgcgccccatcccgtcccgccgggcactcggagggcagcgcgccggaggccaaggttgccccgcacggcccggcgggcgagcgagctcgggctgcagcagccccgccggcggcgcgcacggcaactttggagaggcgagcagcagccccggcagcggcggcagcagcggcaatgaccccttggctcgggctcatcgtgctcctgggcagctggagcctgggggactggggcgccgaggcgtgcacatgctcgcccagccacccccaggacgccttctgcaactccgacatcgtgatccgggccaaggtggtggggaagaagctggtaaaggaggggcccttcggcacgctggtctacaccatcaagcagatgaagatgtaccgaggcttcaccaagatgccccatgtgcagtacatccatacggaagcttccgagagtctctgtggccttaagctggaggtcaacaagtaccagtacctgctgacaggtcgcgtctatgatggcaagatgtacacggggctgtgcaacttcgtggagaggtgggaccagctcaccctctcccagcgcaaggggctgaactatcggtatcacctgggttgtaactgcaagatcaagtcctgctactacctgccttgctttgtgacttccaagaacgagtgtctctggaccgacatgctctccaatttcggttaccctggctaccagtccaaacactacgcctgcatccggcagaagggcggctactgcagctggtaccgaggatgggcccccccggataaaagcatcatcaatgccacagacccctgagcgccagaccctgccccacctcacttccctcccttcccgctgagcttcccttggacactaactcttcccagatgatgacaatgaaattagtgcctgttttcttgcaaatttagcacttggaacatttaaagaaaggtctatgctgtcatatggggttcccacccctcttgcttcttccccacctcaccatctcccagaccctcttccctttgcccttctcctccaatacataaaggacacagacaaggaacttgctgaaaggccaaccatttcaggatcagtcaaaggcagcaagcagatagactcaaggtgtgtgaaagatgttatacaccaggagctgccactgcatgtcccaaccagactgtgtctgtctgtgtctgcatgtaagagtgagggagggaaggaaggaactacaagagagtcggagatgatgcagcacacacacaattccccagcccagtgatgcttgtgttgaccagatgttcctgagtctggagcaagcacccaggccagaataacagagctttcttagttggtgaagacttaaacatctgcctgaggtcaggaggcaatttgcctgccttgtacaaaagctcaggtgaaagactgagatgaatgtctttcctctccctgcctcccaccagacttcctcctggaaaacgctttggtagatttggccaggagctttcttttatgtaaattggataaatacacacataatatcaagatattgcagtgattggggagcaggtactattccggatgtgtgtgcccccaggggat

SEQ ID NO: 366702 - DNA, 1848 bp, Homo sapiens
  misc_feature (7)..(7): n is a, c, g, or t
  misc_feature (316)..(317): n is a, c, g, or t
  misc_feature (348)..(348): n is a, c, g, or t
  misc_feature (657)..(657): n is a, c, g, or t
tctgtgncttgccccagagctgatccttgtctttgtccacttctcagcgaggatggcacttcagggagcccttcccttactatcgcagagagagcaggccctccccagtcatgtccaacccagaactctgttttgttttcttcatagccctagcatcacagaaaatcaccctgtgcattcatggatgtccacgggggcaagggctttgtgttgcttaacccagcatcctgaaccgtgtttgttgaatgaatacagaaccccgtttgctctgggagagcacagaaaacagtcttctatcatatatcatagccagctnnaaacagcagatggcttccatatccagagagnaagaaccagagagagagagaaagagagagagtttgggtctttctcctctgtgcctgctctctccagagaaactggaggggtagcagttagcattcccccgctggttccaccaagcacagtcaaggtctctaggacatggccacccctcacctgtggaagcggtcctgctggggtgggtgggtgttagttggttctggtttgggtcagagacacccagtggcccaggtgggcgtggggccagggcgcagacgagaaggggcacgagggctccgctccgaggacccagcggcaagcaccggtcccgggcgngccccagcccacccactcgcgtgcccacggcggcattattccctataaggatctgaacgatccgggggcggccccgccccgttaccccttgcccccggccccgccccctttttggagggccgatgaggtaatgcggctctgccattggtctgagggggcgggccccaacagcccgaggcggggtccccgggggcccagcgctatatcactcggccgcccaggcagcggcgcagagcgggcagcaggcaggcggcgggcgctcagacggcttctcctcctcctcttgctcctccagctcctgctccttcgccgggaggccgcccgccgagtcctgcgccagcgccgaggcagcctcgctgcgccccatcccgtcccgccgggcactcggagggcagcgcgccggaggccaaggttgccccgcacggcccggcgggcgagcgagctcgggctgcagcagccccgccggcggcgcgcacggcaactttggagaggcgagcagcagccccggcagcggcggcagcagcggcaatgaccccttggctcgggctcatcgtgctcctgggcagctggagcctgggggactggggcgccgaggcgtgcacatgctcgcccagccacccccaggacgccttctgcaactccgacatcgtgatccgggccaaggtggtggggaagaagctggtaaaggaggggcccttcggcacgctggtctacaccatcaagcagatgaagatgtaccgaggcttcaccaagatgccccatgtgcagtacatccatacggaagcttccgagagtctctgtggccttaagctggaggtcaacaagtaccagtacctgctgacaggtcgcgtctatgatggcaagatgtacacggggctgtgcaacttcgtggagaggtgggaccagctcaccctctcccagcgcaaggggctgaactatcggtatcacctgggttgtaactgcaagatcaagtcctgctactacctgccttgctttgtgacttccaagaacgagtgtctctggaccgacatgctctccaatttcggttaccctggctaccagtccaaacactacgcctgcatccggcagaagggcggctactgcagctggtaccgaggatgggcccccccggataaaagcatcatcaatgccacagaccccttttccagagctgtgatactcaggaatcag

SEQ ID NO: 366703 - DNA, 1848 bp, Homo sapiens
  misc_feature (7)..(7): n is a, c, g, or t
  misc_feature (316)..(317): n is a, c, g, or t
  misc_feature (348)..(348): n is a, c, g, or t
  misc_feature (657)..(657): n is a, c, g, or t
  misc_feature (1830)..(1830): n is a, c, g, or t
  misc_feature (1832)..(1832): n is a, c, g, or t
  misc_feature (1834)..(1834): n is a, c, g, or t
tctgtgncttgccccagagctgatccttgtctttgtccacttctcagcgaggatggcacttcagggagcccttcccttactatcgcagagagagcaggccctccccagtcatgtccaacccagaactctgttttgttttcttcatagccctagcatcacagaaaatcaccctgtgcattcatggatgtccacgggggcaagggctttgtgttgcttaacccagcatcctgaaccgtgtttgttgaatgaatacagaaccccgtttgctctgggagagcacagaaaacagtcttctatcatatatcatagccagctnnaaacagcagatggcttccatatccagagagnaagaaccagagagagagagaaagagagagagtttgggtctttctcctctgtgcctgctctctccagagaaactggaggggtagcagttagcattcccccgctggttccaccaagcacagtcaaggtctctaggacatggccacccctcacctgtggaagcggtcctgctggggtgggtgggtgttagttggttctggtttgggtcagagacacccagtggcccaggtgggcgtggggccagggcgcagacgagaaggggcacgagggctccgctccgaggacccagcggcaagcaccggtcccgggcgngccccagcccacccactcgcgtgcccacggcggcattattccctataaggatctgaacgatccgggggcggccccgccccgttaccccttgcccccggccccgccccctttttggagggccgatgaggtaatgcggctctgccattggtctgagggggcgggccccaacagcccgaggcggggtccccgggggcccagcgctatatcactcggccgcccaggcagcggcgcagagcgggcagcaggcaggcggcgggcgctcagacggcttctcctcctcctcttgctcctccagctcctgctccttcgccgggaggccgcccgccgagtcctgcgccagcgccgaggcagcctcgctgcgccccatcccgtcccgccgggcactcggagggcagcgcgccggaggccaaggttgccccgcacggcccggcgggcgagcgagctcgggctgcagcagccccgccggcggcgcgcacggcaactttggagaggcgagcagcagccccggcagcggcggcagcagcggcaatgaccccttggctcgggctcatcgtgctcctgggcagctggagcctgggggactggggcgccgaggcgtgcacatgctcgcccagccacccccaggacgccttctgcaactccgacatcgtgatccgggccaaggtggtggggaagaagctggtaaaggaggggcccttcggcacgctggtctacaccatcaagcagatgaagatgtaccgaggcttcaccaagatgccccatgtgcagtacatccatacggaagcttccgagagtctctgtggccttaagctggaggtcaacaagtaccagtacctgctgacaggtcgcgtctatgatggcaagatgtacacggggctgtgcaacttcgtggagaggtgggaccagctcaccctctcccagcgcaaggggctgaactatcggtatcacctgggttgtaactgcaagatcaagtcctgctactacctgccttgctttgtgacttccaagaacgagtgtctctggaccgacatgctctccaatttcggttaccctggctaccagtccaaacactacgcctgcatccggcagaagggcggctactgcagctggtaccgaggatgggcccccccggataaaagcatcatcaatgccacagaccccttttccagagcntnangatcctctagatca

SEQ ID NO: 366704 - DNA, 469 bp, Homo sapiens
gttttatatacggtattagagagggcgaatgctggagtattgctaatgggctatggagaccataatccatcataagtaatagctaagggtgactggtaggaagtttgtttctcataggaggtcgttatgacgttgcgtcgatagcggaatcgggaggtatgcctgcttcgaatgtcatagtgacacacttcgacaatctggactaccccaagatggcacccaagtgtttggcttctggctacctaaggttaacatgtcactagagtatttttatgagagacaaacattataaaaatctgatggcaaaagcaaaaactattctccagagttctccccttcctctccggacgcgtgggatttatgaattttatattccgtgaatgtatattgtcttgtaatgttgcataatgttcactttttatagtgtgtcctttattctaaacagtaaagtggttttatttctatcaca

SEQ ID NO: 366705 - DNA, 290 bp, Homo sapiens
ccccagggtctgaatccaggctcggtagcctcaggcctgggcataccatggcagagtccatcaactgctgcctgttatctaattgcagatcaagtcctgctactacctgccttgctttgtgacttccaagaacgagtgtctctggaccgacatgctctccaatttcggttaccctggctaccagtccaaacactacgcctgcatccggcagaagggcggctactgcagctggtaccgaggatgggcccccccggataaaagcatcatcaatgccacagacccctgagcgc

SEQ ID NO: 366706 - DNA, 2130 bp, Homo sapiens
  misc_feature (7)..(7): n is a, c, g, or t
  misc_feature (316)..(317): n is a, c, g, or t
  misc_feature (348)..(348): n is a, c, g, or t
  misc_feature (657)..(657): n is a, c, g, or t
tctgtgncttgccccagagctgatccttgtctttgtccacttctcagcgaggatggcacttcagggagcccttcccttactatcgcagagagagcaggccctccccagtcatgtccaacccagaactctgttttgttttcttcatagccctagcatcacagaaaatcaccctgtgcattcatggatgtccacgggggcaagggctttgtgttgcttaacccagcatcctgaaccgtgtttgttgaatgaatacagaaccccgtttgctctgggagagcacagaaaacagtcttctatcatatatcatagccagctnnaaacagcagatggcttccatatccagagagnaagaaccagagagagagagaaagagagagagtttgggtctttctcctctgtgcctgctctctccagagaaactggaggggtagcagttagcattcccccgctggttccaccaagcacagtcaaggtctctaggacatggccacccctcacctgtggaagcggtcctgctggggtgggtgggtgttagttggttctggtttgggtcagagacacccagtggcccaggtgggcgtggggccagggcgcagacgagaaggggcacgagggctccgctccgaggacccagcggcaagcaccggtcccgggcgngccccagcccacccactcgcgtgcccacggcggcattattccctataaggatctgaacgatccgggggcggccccgccccgttaccccttgcccccggccccgccccctttttggagggccgatgaggtaatgcggctctgccattggtctgagggggcgggccccaacagcccgaggcggggtccccgggggcccagcgctatatcactcggccgcccaggcagcggcgcagagcgggcagcaggcaggcggcgggcgctcagacggcttctcctcctcctcttgctcctccagctcctgctccttcgccgggaggccgcccgccgagtcctgcgccagcgccgaggcagcctcgctgcgccccatcccgtcccgccgggcactcggagggcagcgcgccggaggccaaggttgccccgcacggcccggcgggcgagcgagctcgggctgcagcagccccgccggcggcgcgcacggcaactttggagaggcgagcagcagccccggcagcggcggcagcagcggcaatgaccccttggctcgggctcatcgtgctcctgggcagctggagcctgggggactggggcgccgaggcgtgcacatgctcgcccagccacccccaggacgccttctgcaactccgacatcgtgatccgggccaaggtggtggggaagaagctggtaaaggaggggcccttcggcacgctggtctacaccatcaagcagatgaagatgtaccgaggcttcaccaagatgccccatgtgcagtacatccatacggaagcttccgagagtctctgtggccttaagctggaggtcaacaagtaccagtacctgctgacaggtcgcgtctatgatggcaagatgtacacggggctgtgcaacttcgtggagaggtgggaccagctcaccctctcccagcgcaaggggctgaactatcggtatcacctgggttgtaactgcaagatcaagtcctgctactacctgccttgctttgtgacttccaagaacgagtgtctctggaccgacatgctctccaatttcggttaccctggctaccagtccaaacactacgcctgcatccggcagaagggcggctactgcagctggtaccgaggatgggcccccccggataaaagcatcatcaatgccacagacccctgagcgccagaccctgccccacctcacttccctcccttcccgctgagcttcccttggacactaactcttcccagatgatgacaatgaaattagtgcctgttttcttgcaaatttagcacttggaacatttaaagaaaggtctatgctgtcatatggggtttattgggaactatcctcctggccccaccctgccccttctttttggttttgacatcattcatttccacctgggaatttctggtgccatgccagaaagaatgaggaacctgtattcctcttcttcgtgataatataatctctatttttttagga

SEQ ID NO: 366707 - DNA, 5819 bp, Homo sapiens
  misc_feature (7)..(7): n is a, c, g, or t
  misc_feature (316)..(317): n is a, c, g, or t
  misc_feature (348)..(348): n is a, c, g, or t
  misc_feature (657)..(657): n is a, c, g, or t
tctgtgncttgccccagagctgatccttgtctttgtccacttctcagcgaggatggcacttcagggagcccttcccttactatcgcagagagagcaggccctccccagtcatgtccaacccagaactctgttttgttttcttcatagccctagcatcacagaaaatcaccctgtgcattcatggatgtccacgggggcaagggctttgtgttgcttaacccagcatcctgaaccgtgtttgttgaatgaatacagaaccccgtttgctctgggagagcacagaaaacagtcttctatcatatatcatagccagctnnaaacagcagatggcttccatatccagagagnaagaaccagagagagagagaaagagagagagtttgggtctttctcctctgtgcctgctctctccagagaaactggaggggtagcagttagcattcccccgctggttccaccaagcacagtcaaggtctctaggacatggccacccctcacctgtggaagcggtcctgctggggtgggtgggtgttagttggttctggtttgggtcagagacacccagtggcccaggtgggcgtggggccagggcgcagacgagaaggggcacgagggctccgctccgaggacccagcggcaagcaccggtcccgggcgngccccagcccacccactcgcgtgcccacggcggcattattccctataaggatctgaacgatccgggggcggccccgccccgttaccccttgcccccggccccgccccctttttggagggccgatgaggtaatgcggctctgccattggtctgagggggcgggccccaacagcccgaggcggggtccccgggggcccagcgctatatcactcggccgcccaggcagcggcgcagagcgggcagcaggcaggcggcgggcgctcagacggcttctcctcctcctcttgctcctccagctcctgctccttcgccgggaggccgcccgccgagtcctgcgccagcgccgaggcagcctcgctgcgccccatcccgtcccgccgggcactcggagggcagcgcgccggaggccaaggttgccccgcacggcccggcgggcgagcgagctcgggctgcagcagccccgccggcggcgcgcacggcaactttggagaggcgagcagcagccccggcagcggcggcagcagcggcaatgaccccttggctcgggctcatcgtgctcctgggcagctggagcctgggggactggggcgccgaggcgtgcacatgctcgcccagccacccccaggacgccttctgcaactccgacatcgtgatccgggccaaggtggtggggaagaagctggtaaaggaggggcccttcggcacgctggtctacaccatcaagcagatgaagatgtaccgaggcttcaccaagatgccccatgtgcagtacatccatacggaagcttccgagagtctctgtggccttaagctggaggtcaacaagtaccagtacctgctgacaggtcgcgtctatgatggcaagatgtacacggggctgtgcaacttcgtggagaggtgggaccagctcaccctctcccagcgcaaggggctgaactatcggtatcacctgggttgtaactgcaagatcaagtcctgctactacctgccttgctttgtgacttccaagaacgagtgtctctggaccgacatgctctccaatttcggttaccctggctaccagtccaaacactacgcctgcatccggcagaagggcggctactgcagctggtaccgaggatgggcccccccggataaaagcatcatcaatgccacagacccctgagcgccagaccctgccccacctcacttccctcccttcccgctgagcttcccttggacactaactcttcccagatgatgacaatgaaattagtgcctgttttcttgcaaatttagcacttggaacatttaaagaaaggtctatgctgtcatatggggtttattgggaactatcctcctggccccaccctgccccttctttttggttttgacatcattcatttccacctgggaatttctggtgccatgccagaaagaatgaggaacctgtattcctcttcttcgtgataatataatctctatttttttaggaaaacaaaaatgaaaaactactccatttgaggattgtaattcccacccctcttgcttcttccccacctcaccatctcccagaccctcttccctttgcccttctcctccaatacataaaggacacagacaaggaacttgctgaaaggccaaccatttcaggatcagtcaaaggcagcaagcagatagactcaaggtgtgtgaaagatgttatacaccaggagctgccactgcatgtcccaaccagactgtgtctgtctgtgtctgcatgtaagagtgagggagggaaggaaggaactacaagagagtcggagatgatgcagcacacacacaattccccagcccagtgatgcttgtgttgaccagatgttcctgagtctggagcaagcacccaggccagaataacagagctttcttagttggtgaagacttaaacatctgcctgaggtcaggaggcaatttgcctgccttgtacaaaagctcaggtgaaagactgagatgaatgtctttcctctccctgcctcccaccagacttcctcctggaaaacgctttggtagatttggccaggagctttcttttatgtaaattggataaatacacacaccatacactatccacagatatagccaagtagatttgggtagaggatactatttccagaatagtgtttagctcacctagggggatatgtttgtatacacatttgcatatacccacatggggacataagctaatttttttacaggacacagaattctgttcaatgctgttaaatatgccaatagtttaatctcttctattttgttgtcgttgcttgtttgaagaaaatcatgacattccaagttgacatttttttttcattttaattaaaatttgaaattctgaacaccgtcagcaccctctcttccctatcatgggtcatctgacccctgtccgtctccttgtccctgcttcatgtttgggggcctttctttaactgccttcctggcttagctcagatggcagatgagagtgtagtcaagggcctgggcacaggagggagagctgcagagtgtcctgcctgccttggctggagggacacctctcctgggtgtggagacagcttggttccctttccctagctccctggtgggtgaatgccacctcctgagatcctcacctcttggaattaaaattgttggtcactggggaaagcctgagtttgcaaccagttgtagggtttctgttgtgttttttttttttttttgaaataaaactataatataaattctcctattaaataaaattattttaagttttagtgtcaaaagtgagatgctgagagtaggtgataatgtatattttacagagtgggggttggcaggatggtgacattgaacatgattgctctctgtctcttttttcagcttatgggtatttatcttctattagtatttgtatcttcagttcattccactttaggaaacagagctgccaattgaaacagaagaagaaaaaaaaaaaaagcagcagacaacacactgtagagtcttgcacacacacaagtgcccaggcaaggtgcttggcagaaccgcagagtgggaagagagtaccggcatcgggtttccttgggatcaatttcattaccgtgtacctttcccattgtggtcatgccatttggcagggggagaatgggaggcttggccttctttgtgaggcagtgtgagcagaagctgatgccagcatgtcactggttttgaagggatgagcccagacttgatgttttgggattgtccttattttaacctcaaggtctcgcatggtggggcccctgaccaacctacacaagttccctcccacaagtggacatcagtgtcttctctgtgaggcatctggccattcgcactccctggtgtggtcagcctctctcacacaaggaggaacttgggtgaaggctgagtgtgaggcacctgaagtttccctgcggagtcgataaattagcagaaccacatccccatctgttaggccttggtgaggaggccctgggcaaagaagggtctttcgcaaagcgatgtcagagggcggttttgagctttctataagctatagctttgtttatttcacccgttcacttactgtataatttaaaatcatttatgtagctgagacacttctgtatttcaatcatatcatgaacattttattttgctaaatcttgtgtcatgtgtaggctgtaatatgtgtacattgtgtttaagagaaaaatgaaacccacatgccgccattttcctgaatcaaattctgcagtggaatggagaggaaaatacttctaggcaagcagctagactggtgaattgggggaaatagaaggaactagtaactgagactcctccagcctcctccctattggaatcccaatggctcctggagtaggaaaaaagtttaaactacattcatgttcttgttctgtgtcactcggccctgggtagtctaccatttacttcaccccaagtcctgctgcccatccagttgggaagccatgattttcctaagaatccagggccatgggagatacaattccaagttctcgcttcctcctttgggcatctcttctgcctcccaatcaaggaagctccatgctcaggctctcagctctcgggccagtgctctgctctgtccagggtaggtaatactgggagactcctgtcttttaccctcccctcgttccagacctgcctcatggtggcaacatggttcttgaacaattaaagaaacaaatgactttttggaatagccctgtctagggcaaactgtggcccccaggagacactacccttccatgccccagacctctgtcttgcatgtgacaattgacaatctggactaccccaagatggcacccaagtgtttggcttctggctacctaaggttaacatgtcactagagtatttttatgagagacaaacattataaaaatctgatggcaaaagcaaaacaaaatggaaagtaggggaggtggatgtgacaacaacttccaaattggctctttggaggcgagaggaaggggagaacttggagaatagtttttgctttgggggtagaggcttcttagattctcccagcatccgcctttccctttagccagtctgctgtcctgaaacccagaagtgatggagagaaaccaacaagagatctcgaaccctgtctagaaggaatgtatttgttgctaaatttcgtagcactgtttacagttttcctccatgttatttatgaattttatattccgtgaatgtatattgtcttgtaatgttgcataatgttcactttttatagtgtgtcctttattctaaacagtaaagtggttttatttctatcacaaaaaaaaaaaaaaaaaaaaaaaaaaaaaaacccggaaaaattttcccccgggcgaaaaaacccagagagcccccaagattttgttcgggggttaccccggtgtaataaaacacccgagaaaaccgtggtttccgggaggtacatgctgtgtgacggagagtgaggtccgctgtggtttttgccccccgttttcgttgtgcaggcttttgagctgccccggtagggaaaatccccaggaagggcgcgtggggtgccccacgtggggttcttaaaaaagcgcggttttatctccatacatttgaaggggggcacttgtgtagcggggagaattttcc

SEQ ID NO: 366708 - DNA, 5934 bp, Homo sapiens
  misc_feature (7)..(7): n is a, c, g, or t
  misc_feature (316)..(317): n is a, c, g, or t
  misc_feature (348)..(348): n is a, c, g, or t
  misc_feature (657)..(657): n is a, c, g, or t
  misc_feature (5676)..(5676): n is a, c, g, or t
  misc_feature (5712)..(5712): n is a, c, g, or t
  misc_feature (5716)..(5716): n is a, c, g, or t
  misc_feature (5737)..(5737): n is a, c, g, or t
  misc_feature (5741)..(5742): n is a, c, g, or t
  misc_feature (5748)..(5748): n is a, c, g, or t
  misc_feature (5763)..(5763): n is a, c, g, or t
  misc_feature (5771)..(5772): n is a, c, g, or t
  misc_feature (5779)..(5779): n is a, c, g, or t
  misc_feature (5807)..(5807): n is a, c, g, or t
  misc_feature (5816)..(5816): n is a, c, g, or t
  misc_feature (5820)..(5820): n is a, c, g, or t
  misc_feature (5833)..(5833): n is a, c, g, or t
  misc_feature (5843)..(5843): n is a, c, g, or t
  misc_feature (5856)..(5856): n is a, c, g, or t
  misc_feature (5869)..(5869): n is a, c, g, or t
  misc_feature (5890)..(5892): n is a, c, g, or t
  misc_feature (5900)..(5900): n is a, c, g, or t
  misc_feature (5903)..(5904): n is a, c, g, or t
  misc_feature (5914)..(5914): n is a, c, g, or t
  misc_feature (5920)..(5920): n is a, c, g, or t
  misc_feature (5925)..(5926): n is a, c, g, or t
tctgtgncttgccccagagctgatccttgtctttgtccacttctcagcgaggatggcacttcagggagcccttcccttactatcgcagagagagcaggccctccccagtcatgtccaacccagaactctgttttgttttcttcatagccctagcatcacagaaaatcaccctgtgcattcatggatgtccacgggggcaagggctttgtgttgcttaacccagcatcctgaaccgtgtttgttgaatgaatacagaaccccgtttgctctgggagagcacagaaaacagtcttctatcatatatcatagccagctnnaaacagcagatggcttccatatccagagagnaagaaccagagagagagagaaagagagagagtttgggtctttctcctctgtgcctgctctctccagagaaactggaggggtagcagttagcattcccccgctggttccaccaagcacagtcaaggtctctaggacatggccacccctcacctgtggaagcggtcctgctggggtgggtgggtgttagttggttctggtttgggtcagagacacccagtggcccaggtgggcgtggggccagggcgcagacgagaaggggcacgagggctccgctccgaggacccagcggcaagcaccggtcccgggcgngccccagcccacccactcgcgtgcccacggcggcattattccctataaggatctgaacgatccgggggcggccccgccccgttaccccttgcccccggccccgccccctttttggagggccgatgaggtaatgcggctctgccattggtctgagggggcgggccccaacagcccgaggcggggtccccgggggcccagcgctatatcactcggccgcccaggcagcggcgcagagcgggcagcaggcaggcggcgggcgctcagacggcttctcctcctcctcttgctcctccagctcctgctccttcgccgggaggccgcccgccgagtcctgcgccagcgccgaggcagcctcgctgcgccccatcccgtcccgccgggcactcggagggcagcgcgccggaggccaaggttgccccgcacggcccggcgggcgagcgagctcgggctgcagcagccccgccggcggcgcgcacggcaactttggagaggcgagcagcagccccggcagcggcggcagcagcggcaatgaccccttggctcgggctcatcgtgctcctgggcagctggagcctgggggactggggcgccgaggcgtgcacatgctcgcccagccacccccaggacgccttctgcaactccgacatcgtgatccgggccaaggtggtggggaagaagctggtaaaggaggggcccttcggcacgctggtctacaccatcaagcagatgaagatgtaccgaggcttcaccaagatgccccatgtgcagtacatccatacggaagcttccgagagtctctgtggccttaagctggaggtcaacaagtaccagtacctgctgacaggtcgcgtctatgatggcaagatgtacacggggctgtgcaacttcgtggagaggtgggaccagctcaccctctcccagcgcaaggggctgaactatcggtatcacctgggttgtaactgcaagatcaagtcctgctactacctgccttgctttgtgacttccaagaacgagtgtctctggaccgacatgctctccaatttcggttaccctggctaccagtccaaacactacgcctgcatccggcagaagggcggctactgcagctggtaccgaggatgggcccccccggataaaagcatcatcaatgccacagacccctgagcgccagaccctgccccacctcacttccctcccttcccgctgagcttcccttggacactaactcttcccagatgatgacaatgaaattagtgcctgttttcttgcaaatttagcacttggaacatttaaagaaaggtctatgctgtcatatggggtttattgggaactatcctcctggccccaccctgccccttctttttggttttgacatcattcatttccacctgggaatttctggtgccatgccagaaagaatgaggaacctgtattcctcttcttcgtgataatataatctctatttttttaggaaaacaaaaatgaaaaactactccatttgaggattgtaattcccacccctcttgcttcttccccacctcaccatctcccagaccctcttccctttgcccttctcctccaatacataaaggacacagacaaggaacttgctgaaaggccaaccatttcaggatcagtcaaaggcagcaagcagatagactcaaggtgtgtgaaagatgttatacaccaggagctgccactgcatgtcccaaccagactgtgtctgtctgtgtctgcatgtaagagtgagggagggaaggaaggaactacaagagagtcggagatgatgcagcacacacacaattccccagcccagtgatgcttgtgttgaccagatgttcctgagtctggagcaagcacccaggccagaataacagagctttcttagttggtgaagacttaaacatctgcctgaggtcaggaggcaatttgcctgccttgtacaaaagctcaggtgaaagactgagatgaatgtctttcctctccctgcctcccaccagacttcctcctggaaaacgctttggtagatttggccaggagctttcttttatgtaaattggataaatacacacaccatacactatccacagatatagccaagtagatttgggtagaggatactatttccagaatagtgtttagctcacctagggggatatgtttgtatacacatttgcatatacccacatggggacataagctaatttttttacaggacacagaattctgttcaatgctgttaaatatgccaatagtttaatctcttctattttgttgtcgttgcttgtttgaagaaaatcatgacattccaagttgacatttttttttcattttaattaaaatttgaaattctgaacaccgtcagcaccctctcttccctatcatgggtcatctgacccctgtccgtctccttgtccctgcttcatgtttgggggcctttctttaactgccttcctggcttagctcagatggcagatgagagtgtagtcaagggcctgggcacaggagggagagctgcagagtgtcctgcctgccttggctggagggacacctctcctgggtgtggagacagcttggttccctttccctagctccctggtgggtgaatgccacctcctgagatcctcacctcttggaattaaaattgttggtcactggggaaagcctgagtttgcaaccagttgtagggtttctgttgtgttttttttttttttttgaaataaaactataatataaattctcctattaaataaaattattttaagttttagtgtcaaaagtgagatgctgagagtaggtgataatgtatattttacagagtgggggttggcaggatggtgacattgaacatgattgctctctgtctcttttttcagcttatgggtatttatcttctattagtatttgtatcttcagttcattccactttaggaaacagagctgccaattgaaacagaagaagaaaaaaaaaaaaagcagcagacaacacactgtagagtcttgcacacacacaagtgcccaggcaaggtgcttggcagaaccgcagagtgggaagagagtaccggcatcgggtttccttgggatcaatttcattaccgtgtacctttcccattgtggtcatgccatttggcagggggagaatgggaggcttggccttctttgtgaggcagtgtgagcagaagctgatgccagcatgtcactggttttgaagggatgagcccagacttgatgttttgggattgtccttattttaacctcaaggtctcgcatggtggggcccctgaccaacctacacaagttccctcccacaagtggacatcagtgtcttctctgtgaggcatctggccattcgcactccctggtgtggtcagcctctctcacacaaggaggaacttgggtgaaggctgagtgtgaggcacctgaagtttccctgcggagtcgataaattagcagaaccacatccccatctgttaggccttggtgaggaggccctgggcaaagaagggtctttcgcaaagcgatgtcagagggcggttttgagctttctataagctatagctttgtttatttcacccgttcacttactgtataatttaaaatcatttatgtagctgagacacttctgtatttcaatcatatcatgaacattttattttgctaaatcttgtgtcatgtgtaggctgtaatatgtgtacattgtgtttaagagaaaaatgaaacccacatgccgccattttcctgaatcaaattctgcagtggaatggagaggaaaatacttctaggcaagcagctagactggtgaattgggggaaatagaaggaactagtaactgagactcctccagcctcctccctattggaatcccaatggctcctggagtaggaaaaaagtttaaactacattcatgttcttgttctgtgtcactcggccctgggtagtctaccatttacttcaccccaagtcctgctgcccatccagttgggaagccatgattttcctaagaatccagggccatgggagatacaattccaagttctcgcttcctcctttgggcatctcttctgcctcccaatcaaggaagctccatgctcaggctctcagctctcgggccagtgctctgctctgtccagggtaggtaatactgggagactcctgtcttttaccctcccctcgttccagacctgcctcatggtggcaacatggttcttgaacaattaaagaaacaaatgactttttggaatagccctgtctagggcaaactgtggcccccaggagacactacccttccatgccccagacctctgtcttgcatgtgacaattgacaatctggactaccccaagatggcacccaagtgtttggcttctggctacctaaggttaacatgtcactagagtatttttatgagagacaaacattataaaaatctgatggcaaaagcaaaacaaaatggaaagtaggggaggtggatgtgacaacaacttccaaattggctctttggaggcgagaggaaggggagaacttggagaatagtttttgctttgggggtagaggcttcttagattctcccagcatccgcctttccctttagccagtctgctgtcctgaaacccagaagtgatggagagaaaccaacaagagatctcgaaccctgtctagaaggaatgtatttgttgctaaatttcgtagcactgtttacagttttcctccatgttatttatgaattttatattccgtgaatgtatattgtcttgtaatgttgcataatgttcactttttatagtgtgtcctttattctaaacagtaaagtggttttatttctatcacaaaaaaaaaaaaaaaaaaaaaaaaactcggaaaggagacaaagtaaaggctcactatggaggattcactgtacagaatgaagccaacaaataccagatctcagtgaacaaatacagaggaacagccggtaatgccctcatggatggagcatctcagctgatgggagaaaacaggaccatgaccattcacaacngcatgttcttcagcacgtatgacagagacaatgacngctngttaacatcagatcccagagnccanncaaacngcagatactacttgngtggacannacacctnggacatggaaagcatggcacaaatgatngtgagtatngatnaattggaaggggncatggtcctnaatgaggaagatnagtttgaagatcnggcccttttttccacagaatnnnccccaatncgnnaattttgctntctgtntggannacattttt

SEQ ID NO: 366709 - DNA, 5237 bp, Homo sapiens
  misc_feature (7)..(7): n is a, c, g, or t
  misc_feature (316)..(317): n is a, c, g, or t
  misc_feature (348)..(348): n is a, c, g, or t
  misc_feature (657)..(657): n is a, c, g, or t
tctgtgncttgccccagagctgatccttgtctttgtccacttctcagcgaggatggcacttcagggagcccttcccttactatcgcagagagagcaggccctccccagtcatgtccaacccagaactctgttttgttttcttcatagccctagcatcacagaaaatcaccctgtgcattcatggatgtccacgggggcaagggctttgtgttgcttaacccagcatcctgaaccgtgtttgttgaatgaatacagaaccccgtttgctctgggagagcacagaaaacagtcttctatcatatatcatagccagctnnaaacagcagatggcttccatatccagagagnaagaaccagagagagagagaaagagagagagtttgggtctttctcctctgtgcctgctctctccagagaaactggaggggtagcagttagcattcccccgctggttccaccaagcacagtcaaggtctctaggacatggccacccctcacctgtggaagcggtcctgctggggtgggtgggtgttagttggttctggtttgggtcagagacacccagtggcccaggtgggcgtggggccagggcgcagacgagaaggggcacgagggctccgctccgaggacccagcggcaagcaccggtcccgggcgngccccagcccacccactcgcgtgcccacggcggcattattccctataaggatctgaacgatccgggggcggccccgccccgttaccccttgcccccggccccgccccctttttggagggccgatgaggtaatgcggctctgccattggtctgagggggcgggccccaacagcccgaggcggggtccccgggggcccagcgctatatcactcggccgcccaggcagcggcgcagagcgggcagcaggcaggcggcgggcgctcagacggcttctcctcctcctcttgctcctccagctcctgctccttcgccgggaggccgcccgccgagtcctgcgccagcgccgaggcgtgcacatgctcgcccagccacccccaggacgccttctgcaactccgacatcgtgatccgggccaaggtggtggggaagaagctggtaaaggaggggcccttcggcacgctggtctacaccatcaagcagatgaagatgtaccgaggcttcaccaagatgccccatgtgcagtacatccatacggaagcttccgagagtctctgtggccttaagctggaggtcaacaagtaccagtacctgctgacaggtcgcgtctatgatggcaagatgtacacggggctgtgcaacttcgtggagaggtgggaccagctcaccctctcccagcgcaaggggctgaactatcggtatcacctgggttgtaactgcaagatcaagtcctgctactacctgccttgctttgtgacttccaagaacgagtgtctctggaccgacatgctctccaatttcggttaccctggctaccagtccaaacactacgcctgcatccggcagaagggcggctactgcagctggtaccgaggatgggcccccccggataaaagcatcatcaatgccacagacccctgagcgccagaccctgccccacctcacttccctcccttcccgctgagcttcccttggacactaactcttcccagatgatgacaatgaaattagtgcctgttttcttgcaaatttagcacttggaacatttaaagaaaggtctatgctgtcatatggggtttattgggaactatcctcctggccccaccctgccccttctttttggttttgacatcattcatttccacctgggaatttctggtgccatgccagaaagaatgaggaacctgtattcctcttcttcgtgataatataatctctatttttttaggaaaacaaaaatgaaaaactactccatttgaggattgtaattcccacccctcttgcttcttccccacctcaccatctcccagaccctcttccctttgcccttctcctccaatacataaaggacacagacaaggaacttgctgaaaggccaaccatttcaggatcagtcaaaggcagcaagcagatagactcaaggtgtgtgaaagatgttatacaccaggagctgccactgcatgtcccaaccagactgtgtctgtctgtgtctgcatgtaagagtgagggagggaaggaaggaactacaagagagtcggagatgatgcagcacacacacaattccccagcccagtgatgcttgtgttgaccagatgttcctgagtctggagcaagcacccaggccagaataacagagctttcttagttggtgaagacttaaacatctgcctgaggtcaggaggcaatttgcctgccttgtacaaaagctcaggtgaaagactgagatgaatgtctttcctctccctgcctcccaccagacttcctcctggaaaacgctttggtagatttggccaggagctttcttttatgtaaattggataaatacacacaccatacactatccacagatatagccaagtagatttgggtagaggatactatttccagaatagtgtttagctcacctagggggatatgtttgtatacacatttgcatatacccacatggggacataagctaatttttttacaggacacagaattctgttcaatgctgttaaatatgccaatagtttaatctcttctattttgttgtcgttgcttgtttgaagaaaatcatgacattccaagttgacatttttttttcattttaattaaaatttgaaattctgaacaccgtcagcaccctctcttccctatcatgggtcatctgacccctgtccgtctccttgtccctgcttcatgtttgggggcctttctttaactgccttcctggcttagctcagatggcagatgagagtgtagtcaagggcctgggcacaggagggagagctgcagagtgtcctgcctgccttggctggagggacacctctcctgggtgtggagacagcttggttccctttccctagctccctggtgggtgaatgccacctcctgagatcctcacctcttggaattaaaattgttggtcactggggaaagcctgagtttgcaaccagttgtagggtttctgttgtgttttttttttttttttgaaataaaactataatataaattctcctattaaataaaattattttaagttttagtgtcaaaagtgagatgctgagagtaggtgataatgtatattttacagagtgggggttggcaggatggtgacattgaacatgattgctctctgtctcttttttcagcttatgggtatttatcttctattagtatttgtatcttcagttcattccactttaggaaacagagctgccaattgaaacagaagaagaaaaaaaaaaaaagcagcagacaacacactgtagagtcttgcacacacacaagtgcccaggcaaggtgcttggcagaaccgcagagtgggaagagagtaccggcatcgggtttccttgggatcaatttcattaccgtgtacctttcccattgtggtcatgccatttggcagggggagaatgggaggcttggccttctttgtgaggcagtgtgagcagaagctgatgccagcatgtcactggttttgaagggatgagcccagacttgatgttttgggattgtccttattttaacctcaaggtctcgcatggtggggcccctgaccaacctacacaagttccctcccacaagtggacatcagtgtcttctctgtgaggcatctggccattcgcactccctggtgtggtcagcctctctcacacaaggaggaacttgggtgaaggctgagtgtgaggcacctgaagtttccctgcggagtcgataaattagcagaaccacatccccatctgttaggccttggtgaggaggccctgggcaaagaagggtctttcgcaaagcgatgtcagagggcggttttgagctttctataagctatagctttgtttatttcacccgttcacttactgtataatttaaaatcatttatgtagctgagacacttctgtatttcaatcatatcatgaacattttattttgctaaatcttgtgtcatgtgtaggctgtaatatgtgtacattgtgtttaagagaaaaatgaaacccacatgccgccattttcctgaatcaaattctgcagtggaatggagaggaaaatacttctaggcaagcagctagactggtgaattgggggaaatagaaggaactagtaactgagactcctccagcctcctccctattggaatcccaatggctcctggagtaggaaaaaagtttaaactacattcatgttcttgttctgtgtcactcggccctgggtagtctaccatttacttcaccccaagtcctgctgcccatccagttgggaagccatgattttcctaagaatccagggccatgggagatacaattccaagttctcgcttcctcctttgggcatctcttctgcctcccaatcaaggaagctccatgctcaggctctcagctctcgggccagtgctctgctctgtccagggtaggtaatactgggagactcctgtcttttaccctcccctcgttccagacctgcctcatggtggcaacatggttcttgaacaattaaagaaacaaatgactttttggaatagccctgtctagggcaaactgtggcccccaggagacactacccttccatgccccagacctctgtcttgcatgtgacaattgacaatctggactaccccaagatggcacccaagtgtttggcttctggctacctaaggttaacatgtcactagagtatttttatgagagacaaacattataaaaatctgatggcaaaagcaaaacaaaatggaaagtaggggaggtggatgtgacaacaacttccaaattggctctttggaggcgagaggaaggggagaacttggagaatagtttttgctttgggggtagaggcttcttagattctcccagcatccgcctttccctttagccagtctgctgtcctgaaacccagaagtgatggagagaaaccaacaagagatctcgaaccctgtctagaaggaatgtatttgttgctaaatttcgtagcactgtttacagttttcctccatgttatttatgaattttatattccgtgaatgtatattgtcttgtaatgttgcataatgttcactttttatagtgtgtcctttattctaaacagtaaagtggttttatttctatcaca

SEQ ID NO: 366710 - DNA, 5423 bp, Homo sapiens
  misc_feature (7)..(7): n is a, c, g, or t
  misc_feature (316)..(317): n is a, c, g, or t
  misc_feature (348)..(348): n is a, c, g, or t
  misc_feature (657)..(657): n is a, c, g, or t
tctgtgncttgccccagagctgatccttgtctttgtccacttctcagcgaggatggcacttcagggagcccttcccttactatcgcagagagagcaggccctccccagtcatgtccaacccagaactctgttttgttttcttcatagccctagcatcacagaaaatcaccctgtgcattcatggatgtccacgggggcaagggctttgtgttgcttaacccagcatcctgaaccgtgtttgttgaatgaatacagaaccccgtttgctctgggagagcacagaaaacagtcttctatcatatatcatagccagctnnaaacagcagatggcttccatatccagagagnaagaaccagagagagagagaaagagagagagtttgggtctttctcctctgtgcctgctctctccagagaaactggaggggtagcagttagcattcccccgctggttccaccaagcacagtcaaggtctctaggacatggccacccctcacctgtggaagcggtcctgctggggtgggtgggtgttagttggttctggtttgggtcagagacacccagtggcccaggtgggcgtggggccagggcgcagacgagaaggggcacgagggctccgctccgaggacccagcggcaagcaccggtcccgggcgngccccagcccacccactcgcgtgcccacggcggcattattccctataaggatctgaacgatccgggggcggccccgccccgttaccccttgcccccggccccgccccctttttggagggccgatgaggtaatgcggctctgccattggtctgagggggcgggccccaacagcccgaggcggggtccccgggggcccagcgctatatcactcggccgcccaggcagcggcgcagagcgggcagcaggcaggcggcgggcgctcagacggcttctcctcctcctcttgctcctccagctcctgctccttcgccgggaggccgcccgccgagtcctgcgccagcgccgaggcagcctcgctgcgccccatcccgtcccgccgggcactcggagggcagcgcgccggaggccaaggttgccccgcacggcccggcgggcgagcgagctcgggctgcagcagccccgccggcggcgcgcacggcaactttggagaggcgagcagcagccccggcagcggcggcagcagcggcaatgaccccttggctcgggctcatcgtgctcctgggcagctggagcctgggggactggggcgccgaggcgtgcacatgctcgcccagccacccccaggacgccttctgcaactccgacatcgtgatccgggccaaggtggtggggaagaagctggtaaaggaggggcccttcggcacgctggtctacaccatcaagcagatgaagatgtaccgaggcttcaccaagatgccccatgtgcagtacatccatacggaagcttccgagagtctctgtggccttaagctggaggtcaacaagtaccagtacctgctgacaggtcgcgtctatgatggcaagatgtacacggggctgtgcaacttcgtggagaggtgggaccagctcaccctctcccagcgcaaggggctgaactatcggtatcacctgggttgtaactgcaagatcaagtcctgctactacctgccttgctttgtgacttccaagaacgagtgtctctggaccgacatgctctccaatttcggttaccctggctaccagtccaaacactacgcctgcatccggcagaagggcggctactgcagctggtaccgaggatgggcccccccggataaaagcatcatcaatgccacagacccctgagcgccagaccctgccccacctcacttccctcccttcccgctgagcttcccttggacactaactcttcccagatgatgacaatgaaattagtgcctgttttcttgcaaatttagcacttggaacatttaaagaaaggtctatgctgtcatatggggtttattgggaactatcctcctggccccaccctgccccttctttttggttttgacatcattcatttccacctgggaatttctggtgccatgccagaaagaatgaggaacctgtattcctcttcttcgtgataatataatctctatttttttaggaaaacaaaaatgaaaaactactccatttgaggattgtaattcccacccctcttgcttcttccccacctcaccatctcccagaccctcttccctttgcccttctcctccaatacataaaggacacagacaaggaacttgctgaaaggccaaccatttcaggatcagtcaaaggcagcaagcagatagactcaaggtgtgtgaaagatgttatacaccaggagctgccactgcatgtcccaaccagactgtgtctgtctgtgtctgcatgtaagagtgagggagggaaggaaggaactacaagagagtcggagatgatgcagcacacacacaattccccagcccagtgatgcttgtgttgaccagatgttcctgagtctggagcaagcacccaggccagaataacagagctttcttagttggtgaagacttaaacatctgcctgaggtcaggaggcaatttgcctgccttgtacaaaagctcaggtgaaagactgagatgaatgtctttcctctccctgcctcccaccagacttcctcctggaaaacgctttggtagatttggccaggagctttcttttatgtaaattggataaatacacacaccatacactatccacagatatagccaagtagatttgggtagaggatactatttccagaatagtgtttagctcacctagggggatatgtttgtatacacatttgcatatacccacatggggacataagctaatttttttacaggacacagaattctgttcaatgctgttaaatatgccaatagtttaatctcttctattttgttgtcgttgcttgtttgaagaaaatcatgacattccaagttgacatttttttttcattttaattaaaatttgaaattctgaacaccgtcagcaccctctcttccctatcatgggtcatctgacccctgtccgtctccttgtccctgcttcatgtttgggggcctttctttaactgccttcctggcttagctcagatggcagatgagagtgtagtcaagggcctgggcacaggagggagagctgcagagtgtcctgcctgccttggctggagggacacctctcctgggtgtggagacagcttggttccctttccctagctccctggtgggtgaatgccacctcctgagatcctcacctcttggaattaaaattgttgtttttgaaataaaactataatataaattctcctattaaataaaattattttaagttttagtgtcaaaagtgagatgctgagagtaggtgataatgtatattttacagagtgggggttggcaggatggtgacattgaacatgattgctctctgtctcttttttcagcttatgggtatttatcttctattagtatttgtatcttcagttcattccactttaggaaacagagctgccaattgaaacagaagaagaaaaaaaaaaaaagcagcagacaacacactgtagagtcttgcacacacacaagtgcccaggcaaggtgcttggcagaaccgcagagtgggaagagagtaccggcatcgggtttccttgggatcaatttcattaccgtgtacctttcccattgtggtcatgccatttggcagggggagaatgggaggcttggccttctttgtgaggcagtgtgagcagaagctgatgccagcatgtcactggttttgaagggatgagcccagacttgatgttttgggattgtccttattttaacctcaaggtctcgcatggtggggcccctgaccaacctacacaagttccctcccacaagtggacatcagtgtcttctctgtgaggcatctggccattcgcactccctggtgtggtcagcctctctcacacaaggaggaacttgggtgaaggctgagtgtgaggcacctgaagtttccctgcggagtcgataaattagcagaaccacatccccatctgttaggccttggtgaggaggccctgggcaaagaagggtctttcgcaaagcgatgtcagagggcggttttgagctttctataagctatagctttgtttatttcacccgttcacttactgtataatttaaaatcatttatgtagctgagacacttctgtatttcaatcatatcatgaacattttattttgctaaatcttgtgtcatgtgtaggctgtaatatgtgtacattgtgtttaagagaaaaatgaaacccacatgccgccattttcctgaatcaaattctgcagtggaatggagaggaaaatacttctaggcaagcagctagactggtgaattgggggaaatagaaggaactagtaactgagactcctccagcctcctccctattggaatcccaatggctcctggagtaggaaaaaagtttaaactacattcatgttcttgttctgtgtcactcggccctgggtagtctaccatttacttcaccccaagtcctgctgcccatccagttgggaagccatgattttcctaagaatccagggccatgggagatacaattccaagttctcgcttcctcctttgggcatctcttctgcctcccaatcaaggaagctccatgctcaggctctcagctctcgggccagtgctctgctctgtccagggtaggtaatactgggagactcctgtcttttaccctcccctcgttccagacctgcctcatggtggcaacatggttcttgaacaattaaagaaacaaatgactttttggaatagccctgtctagggcaaactgtggcccccaggagacactacccttccatgccccagacctctgtcttgcatgtgacaattgacaatctggactaccccaagatggcacccaagtgtttggcttctggctacctaaggttaacatgtcactagagtatttttatgagagacaaacattataaaaatctgatggcaaaagcaaaacaaaatggaaagtaggggaggtggatgtgacaacaacttccaaattggctctttggaggcgagaggaaggggagaacttggagaatagtttttgctttgggggtagaggcttcttagattctcccagcatccgcctttccctttagccagtctgctgtcctgaaacccagaagtgatggagagaaaccaacaagagatctcgaaccctgtctagaaggaatgtatttgttgctaaatttcgtagcactgtttacagttttcctccatgttatttatgaattttatattccgtgaatgtatattgtcttgtaatgttgcataatgttcactttttatagtgtgtcctttattctaaacagtaaagtggttttatttctatcaca

SEQ ID NO: 366711 - DNA, 5484 bp, Homo sapiens
  misc_feature (7)..(7): n is a, c, g, or t
  misc_feature (316)..(317): n is a, c, g, or t
  misc_feature (348)..(348): n is a, c, g, or t
  misc_feature (657)..(657): n is a, c, g, or t
  misc_feature (3407)..(3407): n is a, c, g, or t
  misc_feature (3413)..(3413): n is a, c, g, or t
tctgtgncttgccccagagctgatccttgtctttgtccacttctcagcgaggatggcacttcagggagcccttcccttactatcgcagagagagcaggccctccccagtcatgtccaacccagaactctgttttgttttcttcatagccctagcatcacagaaaatcaccctgtgcattcatggatgtccacgggggcaagggctttgtgttgcttaacccagcatcctgaaccgtgtttgttgaatgaatacagaaccccgtttgctctgggagagcacagaaaacagtcttctatcatatatcatagccagctnnaaacagcagatggcttccatatccagagagnaagaaccagagagagagagaaagagagagagtttgggtctttctcctctgtgcctgctctctccagagaaactggaggggtagcagttagcattcccccgctggttccaccaagcacagtcaaggtctctaggacatggccacccctcacctgtggaagcggtcctgctggggtgggtgggtgttagttggttctggtttgggtcagagacacccagtggcccaggtgggcgtggggccagggcgcagacgagaaggggcacgagggctccgctccgaggacccagcggcaagcaccggtcccgggcgngccccagcccacccactcgcgtgcccacggcggcattattccctataaggatctgaacgatccgggggcggccccgccccgttaccccttgcccccggccccgccccctttttggagggccgatgaggtaatgcggctctgccattggtctgagggggcgggccccaacagcccgaggcggggtccccgggggcccagcgctatatcactcggccgcccaggcagcggcgcagagcgggcagcaggcaggcggcgggcgctcagacggcttctcctcctcctcttgctcctccagctcctgctccttcgccgggaggccgcccgccgagtcctgcgccagcgccgaggcagcctcgctgcgccccatcccgtcccgccgggcactcggagggcagcgcgccggaggccaaggttgccccgcacggcccggcgggcgagcgagctcgggctgcagcagccccgccggcggcgcgcacggcaactttggagaggcgagcagcagccccggcagcggcggcagcagcggcaatgaccccttggctcgggctcatcgtgctcctgggcagctggagcctgggggactggggcgccgaggcgtgcacatgctcgcccagccacccccaggacgccttctgcaactccgacatcgtgatccgggccaaggtggtggggaagaagctggtaaaggaggggcccttcggcacgctggtctacaccatcaagcagatgaagatgtaccgaggcttcaccaagatgccccatgtgcagtacatccatacggaagcttccgagagtctctgtggccttaagctggaggtcaacaagtaccagtacctgctgacaggtcgcgtctatgatggcaagatgtacacggggctgtgcaacttcgtggagaggtgggaccagctcaccctctcccagcgcaaggggctgaactatcggtatcacctgggttgtaactgcaagatcaagtcctgctactacctgccttgctttgtgacttccaagaacgagtgtctctggaccgacatgctctccaatttcggttaccctggctaccagtccaaacactacgcctgcatccggcagaagggcggctactgcagctggtaccgaggatgggcccccccggataaaagcatcatcaatgccacagacccctgagcgccagaccctgccccacctcacttccctcccttcccgctgagcttcccttggacactaactcttcccagatgatgacaatgaaattagtgcctgttttcttgcaaatttagcacttggaacatttaaagaaaggtctatgctgtcatatggggtttattgggaactatcctcctggccccaccctgccccttctttttggttttgacatcattcatttccacctgggaatttctggtgccatgccagaaagaatgaggaacctgtattcctcttcttcgtgataatataatctctatttttttaggaaaacaaaaatgaaaaactactccatttgaggattgtaattcccacccctcttgcttcttccccacctcaccatctcccagaccctcttccctttgcccttctcctccaatacataaaggacacagacaaggaacttgctgaaaggccaaccatttcaggatcagtcaaaggcagcaagcagatagactcaaggtgtgtgaaagatgttatacaccaggagctgccactgcatgtcccaaccagactgtgtctgtctgtgtctgcatgtaagagtgagggagggaaggaaggaactacaagagagtcggagatgatgcagcacacacacaattccccagcccagtgatgcttgtgttgaccagatgttcctgagtctggagcaagcacccaggccagaataacagagctttcttagttggtgaagacttaaacatctgcctgaggtcaggaggcaatttgcctgccttgtacaaaagctcaggtgaaagactgagatgaatgtctttcctctccctgcctcccaccagacttcctcctggaaaacgctttggtagatttggccaggagctttcttttatgtaaattggataaatacacacaccatacactatccacagatatagccaagtagatttgggtagaggatactatttccagaatagtgtttagctcacctagggggatatgtttgtatacacatttgcatatacccacatggggacataagctaatttttttacaggacacagaattctgttcaatgctgttaaatatgccaatagtttaatctcttctattttgttgtcgttgcttgtttgaagaaaatcatgacattccaagttgacatttttttttcattttaattaaaatttgaaattctgaacaccgtcagcaccctctcttccctatcatgggtcatctgacccctgtccgtctccttgtccctgcttcatgtttgggggcctttctttaactgccttcctggcttagctcagatggcagatgagagtgtagtcaagggcctgggcacaggagggagagctgcagagtgtcctgcctgccttggctggagggacacctctcctgggtgtggagacagcttggttccctttccctagctccctggtgggtgaatgccacctcctgagatcctcacctcttggaattaaaattgttggtcactggggaaagcctgagtttgcaaccagttgtagggtttctgttgtgttttttttttttttggaattaaaactttaatataaatcctcctataaaanaaaatnatttacacgttgaagggtcaaaagtgagatgctgagagtaggtgataatgtatattttacagagtgggggttggcaggatggtgacattgaacatgattgctctctgtctcttttttcagcttatgggtatttatcttctattagtatttgtatcttcagttcattccactttaggaaacagagctgccaattgaaacagaagaagaaaaaaaaaaaaagcagcagacaacacactgtagagtcttgcacacacacaagtgcccaggcaaggtgcttggcagaaccgcagagtgggaagagagtaccggcatcgggtttccttgggatcaatttcattaccgtgtacctttcccattgtggtcatgccatttggcagggggagaatgggaggcttggccttctttgtgaggcagtgtgagcagaagctgatgccagcatgtcactggttttgaagggatgagcccagacttgatgttttgggattgtccttattttaacctcaaggtctcgcatggtggggcccctgaccaacctacacaagttccctcccacaagtggacatcagtgtcttctctgtgaggcatctggccattcgcactccctggtgtggtcagcctctctcacacaaggaggaacttgggtgaaggctgagtgtgaggcacctgaagtttccctgcggagtcgataaattagcagaaccacatccccatctgttaggccttggtgaggaggccctgggcaaagaagggtctttcgcaaagcgatgtcagagggcggttttgagctttctataagctatagctttgtttatttcacccgttcacttactgtataatttaaaatcatttatgtagctgagacacttctgtatttcaatcatatcatgaacattttattttgctaaatcttgtgtcatgtgtaggctgtaatatgtgtacattgtgtttaagagaaaaatgaaacccacatgccgccattttcctgaatcaaattctgcagtggaatggagaggaaaatacttctaggcaagcagctagactggtgaattgggggaaatagaaggaactagtaactgagactcctccagcctcctccctattggaatcccaatggctcctggagtaggaaaaaagtttaaactacattcatgttcttgttctgtgtcactcggccctgggtagtctaccatttacttcaccccaagtcctgctgcccatccagttgggaagccatgattttcctaagaatccagggccatgggagatacaattccaagttctcgcttcctcctttgggcatctcttctgcctcccaatcaaggaagctccatgctcaggctctcagctctcgggccagtgctctgctctgtccagggtaggtaatactgggagactcctgtcttttaccctcccctcgttccagacctgcctcatggtggcaacatggttcttgaacaattaaagaaacaaatgactttttggaatagccctgtctagggcaaactgtggcccccaggagacactacccttccatgccccagacctctgtcttgcatgtgacaattgacaatctggactaccccaagatggcacccaagtgtttggcttctggctacctaaggttaacatgtcactagagtatttttatgagagacaaacattataaaaatctgatggcaaaagcaaaacaaaatggaaagtaggggaggtggatgtgacaacaacttccaaattggctctttggaggcgagaggaaggggagaacttggagaatagtttttgctttgggggtagaggcttcttagattctcccagcatccgcctttccctttagccagtctgctgtcctgaaacccagaagtgatggagagaaaccaacaagagatctcgaaccctgtctagaaggaatgtatttgttgctaaatttcgtagcactgtttacagttttcctccatgttatttatgaattttatattccgtgaatgtatattgtcttgtaatgttgcataatgttcactttttatagtgtgtcctttattctaaacagtaaagtggttttatttctatcaca

SEQ ID NO: 366712 - DNA, 5459 bp, Homo sapiens
  misc_feature (7)..(7): n is a, c, g, or t
  misc_feature (316)..(317): n is a, c, g, or t
  misc_feature (348)..(348): n is a, c, g, or t
  misc_feature (657)..(657): n is a, c, g, or t
tctgtgncttgccccagagctgatccttgtctttgtccacttctcagcgaggatggcacttcagggagcccttcccttactatcgcagagagagcaggccctccccagtcatgtccaacccagaactctgttttgttttcttcatagccctagcatcacagaaaatcaccctgtgcattcatggatgtccacgggggcaagggctttgtgttgcttaacccagcatcctgaaccgtgtttgttgaatgaatacagaaccccgtttgctctgggagagcacagaaaacagtcttctatcatatatcatagccagctnnaaacagcagatggcttccatatccagagagnaagaaccagagagagagagaaagagagagagtttgggtctttctcctctgtgcctgctctctccagagaaactggaggggtagcagttagcattcccccgctggttccaccaagcacagtcaaggtctctaggacatggccacccctcacctgtggaagcggtcctgctggggtgggtgggtgttagttggttctggtttgggtcagagacacccagtggcccaggtgggcgtggggccagggcgcagacgagaaggggcacgagggctccgctccgaggacccagcggcaagcaccggtcccgggcgngccccagcccacccactcgcgtgcccacggcggcattattccctataaggatctgaacgatccgggggcggccccgccccgttaccccttgcccccggccccgccccctttttggagggccgatgaggtaatgcggctctgccattggtctgagggggcgggccccaacagcccgaggcggggtccccgggggcccagcgctatatcactcggccgcccaggcagcggcgcagagcgggcagcaggcaggcggcgggcgctcagacggcttctcctcctcctcttgctcctccagctcctgctccttcgccgggaggccgcccgccgagtcctgcgccagcgccgaggcagcctcgctgcgccccatcccgtcccgccgggcactcggagggcagcgcgccggaggccaaggttgccccgcacggcccggcgggcgagcgagctcgggctgcagcagccccgccggcggcgcgcacggcaactttggagaggcgagcagcagccccggcagcggcggcagcagcggcaatgaccccttggctcgggctcatcgtgctcctgggcagctggagcctgggggactggggcgccgaggcgtgcacatgctcgcccagccacccccaggacgccttctgcaactccgacatcgtgatccgggccaaggtggtggggaagaagctggtaaaggaggggcccttcggcacgctggtctacaccatcaagcagatgaagatgtaccgaggcttcaccaagatgccccatgtgcagtacatccatacggaagcttccgagagtctctgtggccttaagctggaggtcaacaagtaccagtacctgctgacaggtcgcgtctatgatggcaagatgtacacggggctgtgcaacttcgtggagaggtgggaccagctcaccctctcccagcgcaaggggctgaactatcggtatcacctgggttgtaactgcaagatcaagtcctgctactacctgccttgctttgtgacttccaagaacgagtgtctctggaccgacatgctctccaatttcggttaccctggctaccagtccaaacactacgcctgcatccggcagaagggcggctactgcagctggtaccgaggatgggcccccccggataaaagcatcatcaatgccacagacccctgagcgccagaccctgccccacctcacttccctcccttcccgctgagcttcccttggacactaactcttcccagatgatgacaatgaaattagtgcctgttttcttgcaaatttagcacttggaacatttaaagaaaggtctatgctgtcatatggggtttattgggaactatcctcctggccccaccctgccccttctttttggttttgacatcattcatttccacctgggaatttctggtgccatgccagaaagaatgaggaacctgtattcctcttcttcgtgataatataatctctatttttttaggaaaacaaaaatgaaaaactactccatttgaggattgtaattcccacccctcttgcttcttccccacctcaccatctcccagaccctcttccctttgcccttctcctccaatacataaaggacacagacaaggaacttgctgaaaggccaaccatttcaggatcagtcaaaggcagcaagcagatagactcaaggtgtgtgaaagatgttatacaccaggagctgccactgcatgtcccaaccagactgtgtctgtctgtgtctgcatgtaagagtgagggagggaaggaaggaactacaagagagtcggagatgatgcagcacacacacaattccccagcccagtgatgcttgtgttgaccagatgttcctgagtctggagcaagcacccaggccagaataacagagctttcttagttggtgaagacttaaacatctgcctgaggtcaggaggcaatttgcctgccttgtacaaaagctcaggtgaaagactgagatgaatgtctttcctctccctgcctcccaccagacttcctcctggaaaacgctttggtagatttggccaggagctttcttttatgtaaattggataaatacacacaccatacactatccacagatatagccaagtagatttgggtagaggatactatttccagaatagtgtttagctcacctagggggatatgtttgtatacacatttgcatatacccacatggggacataagctaatttttttacaggacacagaattctgttcaatgctgttaaatatgccaatagtttaatctcttctattttgttgtcgttgcttgtttgaagaaaatcatgacattccaagttgacatttttttttcattttaattaaaatttgaaattctgaacaccgtcagcaccctctcttccctatcatgggtcatctgacccctgtccgtctccttgtccctgcttcatgtttgggggcctttctttaactgccttcctggcttagctcagatggcagatgagagtgtagtcaagggcctgggcacaggagggagagctgcagagtgtcctgcctgccttggctggagggacacctctcctgggtgtggagacagcttggttccctttccctagctccctggtgggtgaatgccacctcctgagatcctcacctcttggaattaaaattgttggtcactggggaaagcctgagtttgcaaccagttgtagggtttctgttgtgttttttttttttttttgaaataaaactataatataaattctcctattaaataaaattattttaagttttagtgtcaaaagtgagatgctgagagtaggtgataatgtatattttacagagtgggggttggcaggatggtgacattgaacatgattgctctctgtctcttttttcagcttatgggtatttatcttctattagtatttgtatcttcagttcattccactttaggaaacagagctgccaattgaaacagaagaagaaaaaaaaaaaaagcagcagacaacacactgtagagtcttgcacacacacaagtgcccaggcaaggtgcttggcagaaccgcagagtgggaagagagtaccggcatcgggtttccttgggatcaatttcattaccgtgtacctttcccattgtggtcatgccatttggcagggggagaatgggaggcttggccttctttgtgaggcagtgtgagcagaagctgatgccagcatgtcactggttttgaagggatgagcccagacttgatgttttgggattgtccttattttaacctcaaggtctcgcatggtggggcccctgaccaacctacacaagttccctcccacaagtggacatcagtgtcttctctgtgaggcatctggccattcgcactccctggtgtggtcagcctctctcacacaaggaggaacttgggtgaaggctgagtgtgaggcacctgaagtttccctgcggagtcgataaattagcagaaccacatccccatctgttaggccttggtgaggaggccctgggcaaagaagggtctttcgcaaagcgatgtcagagggcggttttgagctttctataagctatagctttgtttatttcacccgttcacttactgtataatttaaaatcatttatgtagctgagacacttctgtatttcaatcatatcatgaacattttattttgctaaatcttgtgtcatgtgtaggctgtaatatgtgtacattgtgtttaagagaaaaatgaaacccacatgccgccattttcctgaatcaaattctgcagtggaatggagaggaaaatacttctaggcaagcagctagactggtgaattgggggaaatagaaggaactagtaactgagactcctccagcctcctccctattggaatcccaatggctcctggagtaggaaaaaagtttaaactacattcatgttcttgttctgtgtcactcggccctgggtagtctaccatttacttcaccccaagtcctgctgcccatccagttgggaagccatgattttcctaagaatccagggccatgggagatacaattccaagttctcgcttcccaatcaaggaagctccatgctcaggctctcagctctcgggccagtgctctgctctgtccagggtaggtaatactgggagactcctgtcttttaccctcccctcgttccagacctgcctcatggtggcaacatggttcttgaacaattaaagaaacaaatgactttttggaatagccctgtctagggcaaactgtggcccccaggagacactacccttccatgccccagacctctgtcttgcatgtgacaattgacaatctggactaccccaagatggcacccaagtgtttggcttctggctacctaaggttaacatgtcactagagtatttttatgagagacaaacattataaaaatctgatggcaaaagcaaaacaaaatggaaagtaggggaggtggatgtgacaacaacttccaaattggctctttggaggcgagaggaaggggagaacttggagaatagtttttgctttgggggtagaggcttcttagattctcccagcatccgcctttccctttagccagtctgctgtcctgaaacccagaagtgatggagagaaaccaacaagagatctcgaaccctgtctagaaggaatgtatttgttgctaaatttcgtagcactgtttacagttttcctccatgttatttatgaattttatattccgtgaatgtatattgtcttgtaatgttgcataatgttcactttttatagtgtgtcctttattctaaacagtaaagtggttttatttctatcaca

SEQ ID NO: 366713 - DNA, 5519 bp, Homo sapiens
  misc_feature (7)..(7): n is a, c, g, or t
  misc_feature (316)..(317): n is a, c, g, or t
  misc_feature (348)..(348): n is a, c, g, or t
  misc_feature (657)..(657): n is a, c, g, or t
tctgtgncttgccccagagctgatccttgtctttgtccacttctcagcgaggatggcacttcagggagcccttcccttactatcgcagagagagcaggccctccccagtcatgtccaacccagaactctgttttgttttcttcatagccctagcatcacagaaaatcaccctgtgcattcatggatgtccacgggggcaagggctttgtgttgcttaacccagcatcctgaaccgtgtttgttgaatgaatacagaaccccgtttgctctgggagagcacagaaaacagtcttctatcatatatcatagccagctnnaaacagcagatggcttccatatccagagagnaagaaccagagagagagagaaagagagagagtttgggtctttctcctctgtgcctgctctctccagagaaactggaggggtagcagttagcattcccccgctggttccaccaagcacagtcaaggtctctaggacatggccacccctcacctgtggaagcggtcctgctggggtgggtgggtgttagttggttctggtttgggtcagagacacccagtggcccaggtgggcgtggggccagggcgcagacgagaaggggcacgagggctccgctccgaggacccagcggcaagcaccggtcccgggcgngccccagcccacccactcgcgtgcccacggcggcattattccctataaggatctgaacgatccgggggcggccccgccccgttaccccttgcccccggccccgccccctttttggagggccgatgaggtaatgcggctctgccattggtctgagggggcgggccccaacagcccgaggcggggtccccgggggcccagcgctatatcactcggccgcccaggcagcggcgcagagcgggcagcaggcaggcggcgggcgctcagacggcttctcctcctcctcttgctcctccagctcctgctccttcgccgggaggccgcccgccgagtcctgcgccagcgccgaggcagcctcgctgcgccccatcccgtcccgccgggcactcggagggcagcgcgccggaggccaaggttgccccgcacggcccggcgggcgagcgagctcgggctgcagcagccccgccggcggcgcgcacggcaactttggagaggcgagcagcagccccggcagcggcggcagcagcggcaatgaccccttggctcgggctcatcgtgctcctgggcagctggagcctgggggactggggcgccgaggcgtgcacatgctcgcccagccacccccaggacgccttctgcaactccgacatcgtgatccgggccaaggtggtggggaagaagctggtaaaggaggggcccttcggcacgctggtctacaccatcaagcagatgaagatgtaccgaggcttcaccaagatgccccatgtgcagtacatccatacggaagcttccgagagtctctgtggccttaagctggaggtcaacaagtaccagtacctgctgacaggtcgcgtctatgatggcaagatgtacacggggctgtgcaacttcgtggagaggtgggaccagctcaccctctcccagcgcaaggggctgaactatcggtatcacctgggttgtaactgcaagatcaagtcctgctactacctgccttgctttgtgacttccaagaacgagtgtctctggaccgacatgctctccaatttcggttaccctggctaccagtccaaacactacgcctgcatccggcagaagggcggctactgcagctggtaccgaggatgggcccccccggataaaagcatcatcaatgccacagacccctgagcgccagaccctgccccacctcacttccctcccttcccgctgagcttcccttggacactaactcttcccagatgatgacaatgaaattagtgcctgttttcttgcaaatttagcacttggaacatttaaagaaaggtctatgctgtcatatggggtttattgggaactatcctcctggccccaccctgccccttctttttggttttgacatcattcatttccacctgggaatttctggtgccatgccagaaagaatgaggaacctgtattcctcttcttcgtgataatataatctctatttttttaggaaaacaaaaatgaaaaactactccatttgaggattgtaattcccacccctcttgcttcttccccacctcaccatctcccagaccctcttccctttgcccttctcctccaatacataaaggacacagacaaggaacttgctgaaaggccaaccatttcaggatcagtcaaaggcagcaagcagatagactcaaggtgtgtgaaagatgttatacaccaggagctgccactgcatgtcccaaccagactgtgtctgtctgtgtctgcatgtaagagtgagggagggaaggaaggaactacaagagagtcggagatgatgcagcacacacacaattccccagcccagtgatgcttgtgttgaccagatgttcctgagtctggagcaagcacccaggccagaataacagagctttcttagttggtgaagacttaaacatctgcctgaggtcaggaggcaatttgcctgccttgtacaaaagctcaggtgaaagactgagatgaatgtctttcctctccctgcctcccaccagacttcctcctggaaaacgctttggtagatttggccaggagctttcttttatgtaaattggataaatacacacaccatacactatccacagatatagccaagtagatttgggtagaggatactatttccagaatagtgtttagctcacctagggggatatgtttgtatacacatttgcatatacccacatggggacataagctaatttttttacaggacacagaattctgttcaatgctgttaaatatgccaatagtttaatctcttctattttgttgtcgttgcttgtttgaagaaaatcatgacattccaagttgacatttttttttcattttaattaaaatttgaaattctgaacaccgtcagcaccctctcttccctatcatgggtcatctgacccctgtccgtctccttgtccctgcttcatgtttgggggcctttctttaactgccttcctggcttagctcagatggcagatgagagtgtagtcaagggcctgggcacaggagggagagctgcagagtgtcctgcctgccttggctggagggacacctctcctgggtgtggagacagcttggttccctttccctagctccctggtgggtgaatgccacctcctgagatcctcacctcttggaattaaaattgttggtcactggggaaagcctgagtttgcaaccagttgtagggtttctgttgtgttttttttttttttttgaaataaaactataatataaattctcctattaaataaaattattttaagttttagtgtcaaaagtgagatgctgagagtaggtgataatgtatattttacagagtgggggttggcaggatggtgacattgaacatgattgctctctgtctcttttttcagcttatgggtatttatcttctattagtatttgtatcttcagttcattccactttaggaaacagagctgccaattgaaacagaagaagaaaaaaaaaaaaagcagcagacaacacactgtagagtcttgcacacacacaagtgcccaggcaaggtgcttggcagaaccgcagagtgggaagagagtaccggcatcgggtttccttgggatcaatttcattaccgtgtacctttcccattgtggtcatgccatttggcagggggagaatgggaggcttggccttctttgtgaggcagtgtgagcagaagctgatgccagcatgtcactggttttgaagggatgagcccagacttgatgttttgggattgtccttattttaacctcaaggtctcgcatggtggggcccctgaccaacctacacaagttccctcccacaagtggacatcagtgtcttctctgtgaggcatctggccattcgcactccctggtgtggtcagcctctctcacacaaggaggaacttgggtgaaggctgagtgtgaggcacctgaagtttccctgcggagtcgataaattagcagaaccacatccccatctgttaggccttggtgaggaggccctgggcaaagaagggtctttcgcaaagcgatgtcagagggcggttttgagctttctataagctatagctttgtttatttcacccgttcacttactgtataatttaaaatcatttatgtagctgagacacttctgtatttcaatcatatcatgaacattttattttgctaaatcttgtgtcatgtgtaggctgtaatatgtgtacattgtgtttaagagaaaaatgaaacccacatgccgccattttcctgaatcaaattctgcagtggaatggagaggaaaatacttctaggcaagcagctagactggtgaattgggggaaatagaaggaactagtaactgagactcctccagcctcctccctattggaatcccaatggctcctggagtaggaaaaaagtttaaactacattcatgttcttgttctgtgtcactcggccctgggtagtctaccatttacttcaccccaagtcctgctgcccatccagttgggaagccatgattttcctaagaatccagggccatgggagatacaattccaagttctcgcttcctcctttgggcatctcttctgcctcccaatcaaggaagctccatgctcaggctctcagctctcgggccagtgctctgctctgtccagggtaggtaatactgggagactcctgtcttttaccctcccctcgttccagacctgcctcatggtggcaacatggttcttgaacaattaaagaaacaaatgactttttggaatagccctgtctagggcaaactgtggcccccaggagacactacccttccatgccccagacctctgtcttgcatgtgacaattgacaatctggactaccccaagatggcacccaagtgtttggcttctggctacctaaggttaacatgtcactagagtatttttatgagagacaaacattataaaaatctgatggcaaaagcaaaacaaaatggaaagtaggggaggtggatgtgacaacaacttccaaattggctctttggaggcgagaggaaggggagaacttggagaatagtttttgctttgggggtagaggcttcttagattctcccagcatccgcctttccctttagccagtctgctgtcctgaaacccagaagtgatggagagaaaccaacaagagatctcgaaccctgtctagaaggaatgtatttgttgctaaatttcgtagcactgtttacagttttcctccatgttatttatgaattttatattccgtgaatgcgtccgtcgaagtcattcggctactttgggaaagttggtatgaagcttaccacttaaagaggaaccgagcttctgcccactgtcaccgtgacaattcgtggactctggtcagtgcacgaac

SEQ ID NO: 366714 - DNA, 5160 bp, Homo sapiens
  misc_feature (7)..(7): n is a, c, g, or t
  misc_feature (316)..(317): n is a, c, g, or t
  misc_feature (348)..(348): n is a, c, g, or t
  misc_feature (657)..(657): n is a, c, g, or t
  misc_feature (5141)..(5141): n is a, c, g, or t
tctgtgncttgccccagagctgatccttgtctttgtccacttctcagcgaggatggcacttcagggagcccttcccttactatcgcagagagagcaggccctccccagtcatgtccaacccagaactctgttttgttttcttcatagccctagcatcacagaaaatcaccctgtgcattcatggatgtccacgggggcaagggctttgtgttgcttaacccagcatcctgaaccgtgtttgttgaatgaatacagaaccccgtttgctctgggagagcacagaaaacagtcttctatcatatatcatagccagctnnaaacagcagatggcttccatatccagagagnaagaaccagagagagagagaaagagagagagtttgggtctttctcctctgtgcctgctctctccagagaaactggaggggtagcagttagcattcccccgctggttccaccaagcacagtcaaggtctctaggacatggccacccctcacctgtggaagcggtcctgctggggtgggtgggtgttagttggttctggtttgggtcagagacacccagtggcccaggtgggcgtggggccagggcgcagacgagaaggggcacgagggctccgctccgaggacccagcggcaagcaccggtcccgggcgngccccagcccacccactcgcgtgcccacggcggcattattccctataaggatctgaacgatccgggggcggccccgccccgttaccccttgcccccggccccgccccctttttggagggccgatgaggtaatgcggctctgccattggtctgagggggcgggccccaacagcccgaggcggggtccccgggggcccagcgctatatcactcggccgcccaggcagcggcgcagagcgggcagcaggcaggcggcgggcgctcagacggcttctcctcctcctcttgctcctccagctcctgctccttcgccgggaggccgcccgccgagtcctgcgccagcgccgaggcagcctcgctgcgccccatcccgtcccgccgggcactcggagggcagcgcgccggaggccaaggttgccccgcacggcccggcgggcgagcgagctcgggctgcagcagccccgccggcggcgcgcacggcaactttggagaggcgagcagcagccccggcagcggcggcagcagcggcaatgaccccttggctcgggctcatcgtgctcctgggcagctggagcctgggggactggggcgccgaggcgtgcacatgctcgcccagccacccccaggacgccttctgcaactccgacatcgtgatccgggccaaggtggtggggaagaagctggtaaaggaggggcccttcggcacgctggtctacaccatcaagcagatgaagatgtaccgaggcttcaccaagatgccccatgtgcagtacatccatacggaagcttccgagagtctctgtggccttaagctggaggtcaacaagtaccagtacctgctgacaggtcgcgtctatgatggcaagatgtacacggggctgtgcaacttcgtggagaggtgggaccagctcaccctctcccagcgcaaggggctgaactatcggtatcacctgggttgtaactgcaagatcaagtcctgctactacctgccttgctttgtgacttccaagaacgagtgtctctggaccgacatgctctccaatttcggttaccctggctaccagtccaaacactacgcctgcatccggcagaagggcggctactgcagctggtaccgaggatgggcccccccggataaaagcatcatcaatgccacagacccctgagcgccagaccctgccccacctcacttccctcccttcccgctgagcttcccttggacactaactcttcccagatgatgacaatgaaattagtgcctgttttcttgcaaatttagcacttggaacatttaaagaaaggtctatgctgtcatatggggtttattgggaactatcctcctggccccaccctgccccttctttttggttttgacatcattcatttccacctgggaatttctggtgccatgccagaaagaatgaggaacctgtattcctcttcttcgtgataatataatctctatttttttaggaaaacaaaaatgaaaaactactccatttgaggattgtaattcccacccctcttgcttcttccccacctcaccatctcccagaccctcttccctttgcccttctcctccaatacataaaggacacagacaaggaacttgctgaaaggccaaccatttcaggatcagtcaaaggcagcaagcagatagactcaaggtgtgtgaaagatgttatacaccaggagctgccactgcatgtcccaaccagactgtgtctgtctgtgtctgcatgtaagagtgagggagggaaggaaggaactacaagagagtcggagatgatgcagcacacacacaattccccagcccagtgatgcttgtgttgaccagatgttcctgagtctggagcaagcacccaggccagaataacagagctttcttagttggtgaagacttaaacatctgcctgaggtcaggaggcaatttgcctgccttgtacaaaagctcaggtgaaagactgagatgaatgtctttcctctccctgcctcccaccagacttcctcctggaaaacgctttggtagatttggccaggagctttcttttatgtaaattggataaatacacacaccatacactatccacagatatagccaagtagatttgggtagaggatactatttccagaatagtgtttagctcacctagggggatatgtttgtatacacatttgcatatacccacatggggacataagctaatttttttacaggacacagaattctgttcaatgctgttaaatatgccaatagtttaatctcttctattttgttgtcgttgcttgtttgaagaaaatcatgacattccaagttgacatttttttttcattttaattaaaatttgaaattctgaacaccgtcagcaccctctcttccctatcatgggtcatctgacccctgtccgtctccttgtccctgcttcatgtttgggggcctttctttaactgccttcctggcttagctcagatggcagatgagagtgtagtcaagggcctgggcacaggagggagagctgcagagtgtcctgcctgccttggctggagggacacctctcctgggtgtggagacagcttggttccctttccctagctccctggtgggtgaatgccacctcctgagatcctcacctcttggaattaaaattgttggtcactggggaaagcctgagtttgcaaccagttgtagggtttctgttgtgttttttttttttttttgaaataaaactataatataaattctcctattaaataaaattattttaagttttagtgtcaaaagtgagatgctgagagtaggtgataatgtatattttacagagtgggggttggcaggatggtgacattgaacatgattgctctctgtctcttttttcagcttatgggtatttatcttctattagtatttgtatcttcagttcattccactttaggaaacagagctgccaattgaaacagaagaagaaaaaaaaaaaaagcagcagacaacacactgtagagtcttgcacacacacaagtgcccaggcaaggtgcttggcagaaccgcagagtgggaagagagtaccggcatcgggtttccttgggatcaatttcattaccgtgtacctttcccattgtggtcatgccatttggcagggggagaatgggaggcttggccttctttgtgaggcagtgtgagcagaagctgatgccagcatgtcactggttttgaagggatgagcccagacttgatgttttgggattgtccttattttaacctcaaggtctcgcatggtggggcccctgaccaacctacacaagttccctcccacaagtggacatcagtgtcttctctgtgaggcatctggccattcgcactccctggtgtggtcagcctctctcacacaaggaggaacttgggtgaaggctgagtgtgaggcacctgaagtttccctgcggagtcgataaattagcagaaccacatccccatctgttaggccttggtgaggaggccctgggcaaagaagggtctttcgcaaagcgatgtcagagggcggttttgagctttctataagctatagctttgtttatttcacccgttcacttactgtataatttaaaatcatttatgtagctgagacacttctgtatttcaatcatatcatgaacattttattttgctaaatcttgtgtcatgtgtaggctgtaatatgtgtacattgtgtttaagagaaaaatgaaacccacatgccgccattttcctgaatcaaattctgcagtggaatggagaggaaaatacttctaggcaagcagctagactggtgaattgggggaaatagaaggaactagtaactgagactcctccagcctcctccctattggaatcccaatggctcctggagtaggaaaaaagtttaaactacattcatgttcttgttctgtgtcactcggccctgggtagtctaccatttacttcaccccaagtcctgctgcccatccagttgggaagccatgattttcctaagaatccagggccatgggagatacaattccaagttctcgcttcctcctttgggcatctcttctgcctcccaatcaaggaagctccatgctcaggctctcagctctcgggccagtgctctgctctgtccagggtaggtaatactgggagactcctgtcttttaccctcccctcgttccagacctgcctcatggtggcaacatggttcttgaacaattaaagaaacaaatgactttttggaatagccctgtctagggcaaactgtggcccccaggagacactacccttccatgccccagacctctgtcttgcatgtgacaattgacaatctggactaccccaagatggcacccaagtgtttggcttctggctacctaaggttaacatgtcactagagtatttttatgagagacaaacattataaaaatctgatggcaaaagcactgggaagtaggggaaggtgatgtgacaacctttcgctttggnggtagaggcgtcctaggtt

SEQ ID NO: 366715 - DNA, 4782 bp, Homo sapiens
  misc_feature (7)..(7): n is a, c, g, or t
  misc_feature (316)..(317): n is a, c, g, or t
  misc_feature (348)..(348): n is a, c, g, or t
  misc_feature (657)..(657): n is a, c, g, or t
tctgtgncttgccccagagctgatccttgtctttgtccacttctcagcgaggatggcacttcagggagcccttcccttactatcgcagagagagcaggccctccccagtcatgtccaacccagaactctgttttgttttcttcatagccctagcatcacagaaaatcaccctgtgcattcatggatgtccacgggggcaagggctttgtgttgcttaacccagcatcctgaaccgtgtttgttgaatgaatacagaaccccgtttgctctgggagagcacagaaaacagtcttctatcatatatcatagccagctnnaaacagcagatggcttccatatccagagagnaagaaccagagagagagagaaagagagagagtttgggtctttctcctctgtgcctgctctctccagagaaactggaggggtagcagttagcattcccccgctggttccaccaagcacagtcaaggtctctaggacatggccacccctcacctgtggaagcggtcctgctggggtgggtgggtgttagttggttctggtttgggtcagagacacccagtggcccaggtgggcgtggggccagggcgcagacgagaaggggcacgagggctccgctccgaggacccagcggcaagcaccggtcccgggcgngccccagcccacccactcgcgtgcccacggcggcattattccctataaggatctgaacgatccgggggcggccccgccccgttaccccttgcccccggccccgccccctttttggagggccgatgaggtaatgcggctctgccattggtctgagggggcgggccccaacagcccgaggcggggtccccgggggcccagcgctatatcactcggccgcccaggcagcggcgcagagcgggcagcaggcaggcggcgggcgctcagacggcttctcctcctcctcttgctcctccagctcctgctccttcgccgggaggccgcccgccgagtcctgcgccagcgccgaggcagcctcgctgcgccccatcccgtcccgccgggcactcggagggcagcgcgccggaggccaaggttgccccgcacggcccggcgggcgagcgagctcgggctgcagcagccccgccggcggcgcgcacggcaactttggagaggcgagcagcagccccggcagcggcggcagcagcggcaatgaccccttggctcgggctcatcgtgctcctgggcagctggagcctgggggactggggcgccgaggcgtgcacatgctcgcccagccacccccaggacgccttctgcaactccgacatcgtgatccgggccaaggtggtggggaagaagctggtaaaggaggggcccttcggcacgctggtctacaccatcaagcagatgaagatgtaccgaggcttcaccaagatgccccatgtgcagtacatccatacggaagcttccgagagtctctgtggccttaagctggaggtcaacaagtaccagtacctgctgacaggtcgcgtctatgatggcaagatgtacacggggctgtgcaacttcgtggagaggtgggaccagctcaccctctcccagcgcaaggggctgaactatcggtatcacctgggttgtaactgcaagatcaagtcctgctactacctgccttgctttgtgacttccaagaacgagtgtctctggaccgacatgctctccaatttcggttaccctggctaccagtccaaacactacgcctgcatccggcagaagggcggctactgcagctggtaccgaggatgggcccccccggataaaagcatcatcaatgccacagacccctgagcgccagaccctgccccacctcacttccctcccttcccgctgagcttcccttggacactaactcttcccagatgatgacaatgaaattagtgcctgttttcttgcaaatttagcacttggaacatttaaagaaaggtctatgctgtcatatggggtttattgggaactatcctcctggccccaccctgccccttctttttggttttgacatcattcatttccacctgggaatttctggtgccatgccagaaagaatgaggaacctgtattcctcttcttcgtgataatataatctctatttttttaggaaaacaaaaatgaaaaactactccatttgaggattgtaattcccacccctcttgcttcttccccacctcaccatctcccagaccctcttccctttgcccttctcctccaatacataaaggacacagacaaggaacttgctgaaaggccaaccatttcaggatcagtcaaaggcagcaagcagatagactcaaggtgtgtgaaagatgttatacaccaggagctgccactgcatgtcccaaccagactgtgtctgtctgtgtctgcatgtaagagtgagggagggaaggaaggaactacaagagagtcggagatgatgcagcacacacacaattccccagcccagtgatgcttgtgttgaccagatgttcctgagtctggagcaagcacccaggccagaataacagagctttcttagttggtgaagacttaaacatctgcctgaggtcaggaggcaatttgcctgccttgtacaaaagctcaggtgaaagactgagatgaatgtctttcctctccctgcctcccaccagacttcctcctggaaaacgctttggtagatttggccaggagctttcttttatgtaaattggataaatacacacaccatacactatccacagatatagccaagtagatttgggtagaggatactatttccagaatagtgtttagctcacctagggggatatgtttgtatacacatttgcatatacccacatggggacataagctaatttttttacaggacacagaattctgttcaatgctgttaaatatgccaatagtttaatctcttctattttgttgtcgttgcttgtttgaagaaaatcatgacattccaagttgacatttttttttcattttaattaaaatttgaaattctgaacaccgtcagcaccctctcttccctatcatgggtcatctgacccctgtccgtctccttgtccctgcttcatgtttgggggcctttctttaactgccttcctggcttagctcagatggcagatgagagtgtagtcaagggcctgggcacaggagggagagctgcagagtgtcctgcctgccttggctggagggacacctctcctgggtgtggagacagcttggttccctttccctagctccctggtgggtgaatgccacctcctgagatcctcacctcttggaattaaaattgttggtcactggggaaagcctgagtttgcaaccagttgtagggtttctgttgtgttttttttttttttttgaaataaaactataatataaattctcctattaaataaaattattttaagttttagtgtcaaaagtgagatgctgagagtaggtgataatgtatattttacagagtgggggttggcaggatggtgacattgaacatgattgctctctgtctcttttttcagcttatgggtatttatcttctattagtatttgtatcttcagttcattccactttaggaaacagagctgccaattgaaacagaagaagaaaaaaaaaaaaagcagcagacaacacactgtagagtcttgcacacacacaagtgcccaggcaaggtgcttggcagaaccgcagagtgggaagagagtaccggcatcgggtttccttgggatcaatttcattaccgtgtacctttcccattgtggtcatgccatttggcagggggagaatgggaggcttggccttctttgtgaggcagtgtgagcagaagctgatgccagcatgtcactggttttgaagggatgagcccagacttgatgttttgggattgtccttattttaacctcaaggtctcgcatggtggggcccctgaccaacctacacaagttccctcccacaagtggacatcagtgtcttctctgtgaggcatctggccattcgcactccctggtgtggtcagcctctctcacacaaggaggaacttgggtgaaggctgagtgtgaggcacctgaagtttccctgcggagtcgataaattagcagaaccacatccccatctgttaggccttggtgaggaggccctgggcaaagaagggtctttcgcaaagcgatgtcagagggcggttttgagctttctataagctatagctttgtttatttcacccgttcacttactgtataatttaaaatcatttatgtagctgagacacttctgtatttcaatcatatcatgaacattttattttgctaaatcttgtgtcatgtgtaggctgtaatatgtgtacattgtgtttaagagaaaaatgaaacccacatgccgccattttcctgaatcaaattctgcagtggaatggagaggaaaatacttctaggcaagcagctagactggtgaattgggggaaatagaaggaactagtaactgagactcctccagcctcctccctattggaatcccaatggctcctggagtaggaaaaaagtttaaactacattcatgttcttgttctgtgtcactcggccctgggtagtctaccatttacttcaccccaagtcctgctgcccatccagttgggaagccatgattttcctaagaatccagggccatgggagatacaattccaagttctcgcttcctcctttgggcatctcttctgcctcccaatcaaggaagctccatgctcagacatctccagtccgggatctctatatcgaggt

SEQ ID NO: 366716 - DNA, 4153 bp, Homo sapiens
  misc_feature (7)..(7): n is a, c, g, or t
  misc_feature (316)..(317): n is a, c, g, or t
  misc_feature (348)..(348): n is a, c, g, or t
  misc_feature (657)..(657): n is a, c, g, or t
tctgtgncttgccccagagctgatccttgtctttgtccacttctcagcgaggatggcacttcagggagcccttcccttactatcgcagagagagcaggccctccccagtcatgtccaacccagaactctgttttgttttcttcatagccctagcatcacagaaaatcaccctgtgcattcatggatgtccacgggggcaagggctttgtgttgcttaacccagcatcctgaaccgtgtttgttgaatgaatacagaaccccgtttgctctgggagagcacagaaaacagtcttctatcatatatcatagccagctnnaaacagcagatggcttccatatccagagagnaagaaccagagagagagagaaagagagagagtttgggtctttctcctctgtgcctgctctctccagagaaactggaggggtagcagttagcattcccccgctggttccaccaagcacagtcaaggtctctaggacatggccacccctcacctgtggaagcggtcctgctggggtgggtgggtgttagttggttctggtttgggtcagagacacccagtggcccaggtgggcgtggggccagggcgcagacgagaaggggcacgagggctccgctccgaggacccagcggcaagcaccggtcccgggcgngccccagcccacccactcgcgtgcccacggcggcattattccctataaggatctgaacgatccgggggcggccccgccccgttaccccttgcccccggccccgccccctttttggagggccgatgaggtaatgcggctctgccattggtctgagggggcgggccccaacagcccgaggcggggtccccgggggcccagcgctatatcactcggccgcccaggcagcggcgcagagcgggcagcaggcaggcggcgggcgctcagacggcttctcctcctcctcttgctcctccagctcctgctccttcgccgggaggccgcccgccgagtcctgcgccagcgccgaggcagcctcgctgcgccccatcccgtcccgccgggcactcggagggcagcgcgccggaggccaaggttgccccgcacggcccggcgggcgagcgagctcgggctgcagcagccccgccggcggcgcgcacggcaactttggagaggcgagcagcagccccggcagcggcggcagcagcggcaatgaccccttggctcgggctcatcgtgctcctgggcagctggagcctgggggactggggcgccgaggcgtgcacatgctcgcccagccacccccaggacgccttctgcaactccgacatcgtgatccgggccaaggtggtggggaagaagctggtaaaggaggggcccttcggcacgctggtctacaccatcaagcagatgaagatgtaccgaggcttcaccaagatgccccatgtgcagtacatccatacggaagcttccgagagtctctgtggccttaagctggaggtcaacaagtaccagtacctgctgacaggtcgcgtctatgatggcaagatgtacacggggctgtgcaacttcgtggagaggtgggaccagctcaccctctcccagcgcaaggggctgaactatcggtatcacctgggttgtaactgcaagatcaagtcctgctactacctgccttgctttgtgacttccaagaacgagtgtctctggaccgacatgctctccaatttcggttaccctggctaccagtccaaacactacgcctgcatccggcagaagggcggctactgcagctggtaccgaggatgggcccccccggataaaagcatcatcaatgccacagacccctgagcgccagaccctgccccacctcacttccctcccttcccgctgagcttcccttggacactaactcttcccagatgatgacaatgaaattagtgcctgttttcttgcaaatttagcacttggaacatttaaagaaaggtctatgctgtcatatggggtttattgggaactatcctcctggccccaccctgccccttctttttggttttgacatcattcatttccacctgggaatttctggtgccatgccagaaagaatgaggaacctgtattcctcttcttcgtgataatataatctctatttttttaggaaaacaaaaatgaaaaactactccatttgaggattgtaattcccacccctcttgcttcttccccacctcaccatctcccagaccctcttccctttgcccttctcctccaatacataaaggacacagacaaggaacttgctgaaaggccaaccatttcaggatcagtcaaaggcagcaagcagatagactcaaggtgtgtgaaagatgttatacaccaggagctgccactgcatgtcccaaccagactgtgtctgtctgtgtctgcatgtaagagtgagggagggaaggaaggaactacaagagagtcggagatgatgcagcacacacacaattccccagcccagtgatgcttgtgttgaccagatgttcctgagtctggagcaagcacccaggccagaataacagagctttcttagttggtgaagacttaaacatctgcctgaggtcaggaggcaatttgcctgccttgtacaaaagctcaggtgaaagactgagatgaatgtctttcctctccctgcctcccaccagacttcctcctggaaaacgctttggtagatttggccaggagctttcttttatgtaaattggataaatacacacaccatacactatccacagatatagccaagtagatttgggtagaggatactatttccagaatagtgtttagctcacctagggggatatgtttgtatacacatttgcatatacccacatggggacataagctaatttttttacaggacacagaattctgttcaatgctgttaaatatgccaatagtttaatctcttctattttgttgtcgttgcttgtttgaagaaaatcatgacattccaagttgacatttttttttcattttaattaaaatttgaaattctgaacaccgtcagcaccctctcttccctatcatgggtcatctgacccctgtccgtctccttgtccctgcttcatgtttgggggcctttctttaactgccttcctggcttagctcagatggcagatgagagtgtagtcaagggcctgggcacaggagggagagctgcagagtgtcctgcctgccttggctggagggacacctctcctgggtgtggagacagcttggttccctttccctagctccctggtgggtgaatgccacctcctgagatcctcacctcttggaattaaaattgttggtcactggggaaagcctgagtttgcaaccagttgtagggtttctgttgtgttttttttttttttttgaaataaaactataatataaattctcctattaaataaaattattttaagttttagtgtcaaaagtgagatgctgagagtaggtgataatgtatattttacagagtgggggttggcaggatggtgacattgaacatgattgctctctgtctcttttttcagcttatgggtatttatcttctattagtatttgtatcttcagttcattccactttaggaaacagagctgccaattgaaacagaagaagaaaaaaaaaaaaagcagcagacaacacactgtagagtcttgcacacacacaagtgcccaggcaaggtgcttggcagaaccgcagagtgggaagagagtaccggcatcgggtttccttgggatcaatttcattaccgtgtacctttcccattgtggtcatgccatttggcagggggagaatgggaggcttggccttctttgtgaggcagtgtgagcagaagctgatgccagcatgtcactggttttgaagggatgagcccagacttgatgttttgggattgtccttattttaacctcaaggtctcgcatggtggggcccctgaccaacctacacaagttccctcccacaagtggacatcagtgtcttctctgtgaggcatctggccattcgcactccctggtgtggtcagcctctctcacacaaggaggaacttgggtgaaggctgagtgtgaggcacctgaagtttccctgcacaaatactctctcttgtctgctgccaagctgcgtgtgaggggatcctcatagagtcggcca

SEQ ID NO: 366717 - DNA, 146 bp, Homo sapiens
atatcagcattcctgagtatgactggcctatcattttctggttttgtactaagtctttggttttggtattcagatcatagagttatcatagcatgaatcagaaattagcccatttttccattttatgaaaatatttcaataagatt

SEQ ID NO: 366718 - DNA, 626 bp, Homo sapiens
actatttaatcttatttcacttaggaccttggttatttatattagttgtctataggcagtggaacataattaaataccattttctagttaaattcacctaagacaacttttaaacaaaactcttgcgttaaatgttgccattaatgaagcgttgttaacttgcccctctctgcccagcaccttccttctctgacttcactgcttggggagcatgctaatgattccttggtgttaataactttgcaattcttaaacaggtgacattccaagcctgcagtatatctgaggccagatacctttatgatcagttggctactatctgtccaattgttgtaagtagaaattacctcttattttaaatactacttcgtatgaaataagatagcatgtgcagaatttactgacagtgtgctatttaagtccagttaagacctcagtcagagatggactaatataaatagtatgtaggtttaggtataatgaactgagagtctacactgtagaagtttactcttgctagtacaacattgatttgttaaatgtgaagtttgaatgtggccattttccctcccccatacttcatgtcctcacattagagagaggatgatttaagtgaatcaaaccca

SEQ ID NO: 366719 - DNA, 526 bp, Homo sapiens
ttatatagcatattcatttatatatatttttaatctttagccattgaagaacaataactataggatcagtaaatcccgatatgactcaatagacagctatttatctaagtgtggtgagaaatataatgacatcgacttgacgatagataaagagatctacgaacagctgttgcaggaaggtgggtttctactccatctttctgggtttgaatgtacgcctttagttcttcaaagctcttttacacttttttgctgactcctggtctggtttctatttttagtgcaaagtctttaacttctctcatgaggctacttgttcctaaagtttcaggttccaaatacttgtgagattttcttgatttttagcaaaaggagcttactttggaggtctgtgtctaggtccacaccagtgccccagcaggcattgtgtaagtagtgaataaaacgctgacactcccgcagtgtccgcaggataaaatactgggtgaggtgaggatactaatcaaaccagctatttcaagcttct

SEQ ID NO: 366720 - DNA, 3818 bp, Homo sapiens
agtctataaaacctggagcgcaggatcgcgcccaggagcggcgagctagcggacgcaaagactgggcatgctccgcggcggcgcaggttttggtcacaagtaggaagaagccagtgcaccagaccggcaaagagaagcgggagccgccgcggcagcgcggccgtggggtccgccgccgccgcatcggagcgggaggaggagcagcggggagggcgaggccgccgggccgagagccgtcccgcctgctctcggtcttctgccttcgcctccgcgcggtgcgtcggacccagggtctgtcacctgggcgccaggggccgccgccggggagccggagcgggcaggaccctccctccgccgactgcggcccgagagcgcccccgcggggtggagcggcagccgccttctgcgggcggctgagtgtccgtctcgcgcccggagcgggcgaccgccgtcagcccggaggaggaggaggaggaggaggagggggcggccatggggctgctgtcccagggctcgccgctgagctgggaggaaaccaagcgccatgccgaccacgtgcggcggcacgggatcctccagttcctgcacatctaccacgccgtcaaggaccggcacaaggacgttctcaagtggggcgatgaggtggaatacatgttggtatcttttgatcatgaaaataaaaaagtccggttggtcctgtctggggagaaagttcttgaaactctgcaagagaagggggaaaggacaaacccaaaccatcctaccctttggagaccagagtatgggagttacatgattgaagggacaccaggacagccctacggaggaacaatgtccgagttcaatacagttgaggccaacatgcgaaaacgccggaaggaggctacttctatattagaagaaaatcaggctctttgcacaataacttcatttcccagattaggctgtcctgggttcacactgcccgaggtcaaacccaacccagtggaaggaggagcttccaagtccctcttctttccagatgaagcaataaacaagcaccctcgcttcagtaccttaacaagaaatatccgacataggagaggagaaaaggttgtcatcaatgtaccaatatttaaggacaagaatacaccatctccatttatagaaacatttactgaggatgatgaagcttcaagggcttctaagccggatcatatttacatggatgccatgggatttggaatgggcaattgctgtctccaggtgacattccaagcctgcagtatatctgaggccagatacctttatgatcagttggctactatctgtccaattgttatggctttgagtgctgcatctcccttttaccgaggctatgtgtcagacattgattgtcgctggggagtgatttctgcatctgtagatgatagaactcgggaggagcgaggactggagccattgaagaacaataactataggatcagtaaatcccgatatgactcaatagacagctatttatctaagtgtggtgagaaatataatgacatcgacttgacgatagataaagagatctacgaacagctgttgcaggaaggcattgatcatctcctggcccagcatgttgctcatctctttattagagacccactgacactgtttgaagagaaaatacacctggatgatgctaatgagtctgaccattttgagaatattcagtccacaaattggcagacaatgagatttaagccccctcctccaaactcagacattggatggagagtagaatttcgacccatggaggtgcaattaacagactttgagaactctgcctatgtggtgtttgtggtactgctcaccagagtgatcctttcctacaaattggattttctcattccactgtcaaaggttgatgagaacatgaaggtagcacagaaaagagatgctgtcttgcagggaatgttttatttcaggaaagatatttgcaaaggtggcaatgcagtggtggatggttgtggcaaggcccagaacagcacggagctcgctgcagaggagtacaccctcatgagcatagacaccatcatcaatgggaaggaaggtgtgtttcctggactgatcccaattctgaactcttaccttgaaaacatggaagtggatgtggacaccagatgtagtattctgaactacctaaagctaattaagaagagagcatctggagaactaatgacagttgccagatggatgagggagtttatcgcaaaccatcctgactacaagcaagacagtgtcataactgatgaaatgaattatagccttattttgaagtgtaaccaaattgcaaatgaattatgtgaatgcccagagttacttggatcagcatttaggaaagtaaaatatagtggaagtaaaactgactcatccaactagacattctacagaaagaaaaatgcattattgacgaactggctacagtaccatgcctctcagcccgtgtgtataatatgaagaccaaatgatagaactgtactgttttctgggccagtgagccagaaattgattaaggctttctttggtaggtaaatctagagtttatacagtgtacatgtacatagtaaagtatttttgattaacaatgtattttaataacatatctaaagtcatcatgaactggcttgtacatttttaaattcttactctggagcaacctactgtctaagcagttttgtaaatgtactggtaattgtacaatacttgcattccagagttaaaatgtttactgtaaatttttgttcttttaaagactacctgggacctgatttattgaaatttttctctttaaaaacattttctctcgttaattttcctttgtcatttcctttgttgtctacattaaatcacttgaatccattgaaagtgcttcaagggtaatcttgggtttctagcaccttatctatgatgtttcttttgcaattggaataatcacttggtcaccttgccccaagctttcccctctgaataaatacccattgaactctgatggctgttatcaaaggaacttttctttgtttaaatttgctgatgcaggaattaagtttaaacacaactctatagaaagaaaggagattattacccagaattcacatgtagtgattattaaggacaatttttttttttaactaaaaaagttggcggcaggggtggggggtggcaatcatttttcttcctatacatacaaaggatattgtcaaaaatggcgttcttctcttgtggcctgttattctgattgctgctgtatacagttttgtcactctttagtttttagttaagcatactgatagactttcctctaaaagccattcactccagattttacctggggaatattctacatactgcttactttctctataaaactcatcaataaatcatgaaaggcactgagttttgtaaatcaggaccctaaatgtttaattgtaaataagtttcagataattattatagctttgcgttgaagtttgttgtttttttttctcaactagttaagtcaactgcttctgaaataactctgtattgtagattatgcagatctttacaggcataaatatttaaactgtaatatgctaacttgaagagattgcaataaagctgcttcagctaaccctgtttatgtttaaatactagggtttgttctatattttatacatgcattttggatgattaaagaatgcctggttttcgtttgcaatttgcttgtgtaaatcaggttgtaaaaaggcagataaattgaaatgtttgtggtatgaggaaataaaagaatggaattagctttcattcagaaa

SEQ ID NO: 366721 - DNA, 4124 bp, Homo sapiens
agtctataaaacctggagcgcaggatcgcgcccaggagcggcgagctagcggacgcaaagactgggcatgctccgcggcggcgcaggttttggtcacaagtaggaagaagccagtgcaccagaccggcaaagagaagcgggagccgccgcggcagcgcggccgtggggtccgccgccgccgcatcggagcgggaggaggagcagcggggagggcgaggccgccgggccgagagccgtcccgcctgctctcggtcttctgccttcgcctccgcgcggtgcgtcggacccagggtctgtcacctgggcgccaggggccgccgccggggagccggagcgggcaggaccctccctccgccgactgcggcccgagagcgcccccgcggggtggagcggcagccgccttctgcgggcggctgagtgtccgtctcgcgcccggagcgggcgaccgccgtcagcccggaggaggaggaggaggaggaggagggggcggccatggggctgctgtcccagggctcgccgctgagctgggaggaaaccaagcgccatgccgaccacgtgcggcggcacgggatcctccagttcctgcacatctaccacgccgtcaaggaccggcacaaggacgttctcaagtggggcgatgaggtggaatacatgttggtatcttttgatcatgaaaataaaaaagtccggttggtcctgtctggggagaaagttcttgaaactctgcaagagaagggggaaaggacaaacccaaaccatcctaccctttggagaccagagtatgggagttacatgattgaagggacaccaggacagccctacggaggaacaatgtccgagttcaatacagttgaggccaacatgcgaaaacgccggaaggaggctacttctatattagaagaaaatcaggctctttgcacaataacttcatttcccagattaggctgtcctgggttcacactgcccgaggtcaaacccaacccagtggaaggaggagcttccaagtccctcttctttccagatgaagcaataaacaagcaccctcgcttcagtaccttaacaagaaatatccgacataggagaggagaaaaggttgtcatcaatgtaccaatatttaaggacaagaatacaccatctccatttatagaaacatttactgaggatgatgaagcttcaagggcttctaagccggatcatatttacatggatgccatgggatttggaatgggcaattgctgtctccaggtgacattccaagcctgcagtatatctgaggccagatacctttatgatcagttggctactatctgtccaattgttatggctttgagtgctgcatctcccttttaccgaggctatgtgtcagacattgattgtcgctggggagtgatttctgcatctgtagatgatagaactcgggaggagcgaggactggagccattgaagaacaataactataggatcagtaaatcccgatatgactcaatagacagctatttatctaagtgtggtgagaaatataatgacatcgacttgacgatagataaagagatctacgaacagctgttgcaggaaggcattgatcatctcctggcccagcatgttgctcatctctttattagagacccactgacactgtttgaagagaaaatacacctggatgatgctaatgagtctgaccattttgagaatattcagtccacaaattggcagacaatgagatttaagccccctcctccaaactcagacattggatggagagtagaatttcgacccatggaggtaagacacatgcatcagcaagaactgactcaaaagtactctttcgccagctgttcatcacccttctgatgctgctatgagaaggctcttatatataaaataaaaattaagtatgtgcatggtagcaagtcagtccaagttaaggagggttgatttctgagaatagatgtgggcaaagggcttccagacccagatggggaattaggagatggcttgggaatgacatgatctgaggaagggcctgggtcagggaagagcatgtttgtgtagttggttcataacttctctgggcttctgcttgtctaggtgcaattaacagactttgagaactctgcctatgtggtgtttgtggtactgctcaccagagtgatcctttcctacaaattggattttctcattccactgtcaaaggttgatgagaacatgaaggtagcacagaaaagagatgctgtcttgcagggaatgttttatttcaggaaagatatttgcaaaggtggcaatgcagtggtggatggttgtggcaaggcccagaacagcacggagctcgctgcagaggagtacaccctcatgagcatagacaccatcatcaatgggaaggaaggtgtgtttcctggactgatcccaattctgaactcttaccttgaaaacatggaagtggatgtggacaccagatgtagtattctgaactacctaaagctaattaagaagagagcatctggagaactaatgacagttgccagatggatgagggagtttatcgcaaaccatcctgactacaagcaagacagtgtcataactgatgaaatgaattatagccttattttgaagtgtaaccaaattgcaaatgaattatgtgaatgcccagagttacttggatcagcatttaggaaagtaaaatatagtggaagtaaaactgactcatccaactagacattctacagaaagaaaaatgcattattgacgaactggctacagtaccatgcctctcagcccgtgtgtataatatgaagaccaaatgatagaactgtactgttttctgggccagtgagccagaaattgattaaggctttctttggtaggtaaatctagagtttatacagtgtacatgtacatagtaaagtatttttgattaacaatgtattttaataacatatctaaagtcatcatgaactggcttgtacatttttaaattcttactctggagcaacctactgtctaagcagttttgtaaatgtactggtaattgtacaatacttgcattccagagttaaaatgtttactgtaaatttttgttcttttaaagactacctgggacctgatttattgaaatttttctctttaaaaacattttctctcgttaattttcctttgtcatttcctttgttgtctacattaaatcacttgaatccattgaaagtgcttcaagggtaatcttgggtttctagcaccttatctatgatgtttcttttgcaattggaataatcacttggtcaccttgccccaagctttcccctctgaataaatacccattgaactctgatggctgttatcaaaggaacttttctttgtttaaatttgctgatgcaggaattaagtttaaacacaactctatagaaagaaaggagattattacccagaattcacatgtagtgattattaaggacaatttttttttttaactaaaaaagttggcggcaggggtggggggtggcaatcatttttcttcctatacatacaaaggatattgtcaaaaatggcgttcttctcttgtggcctgttattctgattgctgctgtatacagttttgtcactctttagtttttagttaagcatactgatagactttcctctaaaagccattcactccagattttacctggggaatattctacatactgcttactttctctataaaactcatcaataaatcatgaaaggcactgagttttgtaaatcaggaccctaaatgtttaattgtaaataagtttcagataattattatagctttgcgttgaagtttgttgtttttttttctcaactagttaagtcaactgcttctgaaataactctgtattgtagattatgcagatctttacaggcataaatatttaaactgtaatatgctaacttgaagagattgcaataaagctgcttcagctaaccctgtttatgtttaaatactagggtttgttctatattttatacatgcattttggatgattaaagaatgcctggttttcgtttgcaatttgcttgtgtaaatcaggttgtaaaaaggcagataaattgaaatgtttgtggtatgaggaaataaaagaatggaattagctttcattcagaaa

SEQ ID NO: 366722 - DNA, 3764 bp, Homo sapiens
agtctataaaacctggagcgcaggatcgcgcccaggagcggcgagctagcggacgcaaagactgggcatgctccgcggcggcgcaggttttggtcacaagtaggaagaagccagtgcaccagaccggcaaagagaagcgggagccgccgcggcagcgcggccgtggggtccgccgccgccgcatcggagcgggaggaggagcagcggggagggcgaggccgccgggccgagagccgtcccgcctgctctcggtcttctgccttcgcctccgcgcggtgcgtcggacccagggtctgtcacctgggcgccaggggccgccgccggggagccggagcgggcaggaccctccctccgccgactgcggcccgagagcgcccccgcggggtggagcggcagccgccttctgcgggcggctgagtgtccgtctcgcgcccggagcgggcgaccgccgtcagcccggaggaggaggaggaggaggaggagggggcggccatggggctgctgtcccagggctcgccgctgagctgggaggaaaccaagcgccatgccgaccacgtgcggcggcacgggatcctccagttcctgcacatctaccacgccgtcaaggaccggcacaaggacgttctcaagtggggcgatgaggtggaatacatgttggtatcttttgatcatgaaaataaaaaagtccggttggtcctgtctggggagaaagttcttgaaactctgcaagagaagggggaaaggacaaacccaaaccatcctaccctttggagaccagagtatgggagttacatgattgaagggacaccaggacagccctacggaggaacaatgtccgagttcaatacagttgaggccaacatgcgaaaacgccggaaggaggctacttctatattagaagaaaatcaggctctttgcacaataacttcatttcccagattaggctgtcctgggttcacactgcccgaggtcaaacccaacccagtggaaggaggagcttccaagtccctcttctttccagatgaagcaataaacaagcaccctcgcttcagtaccttaacaagaaatatccgacataggagaggagttatagaaacatttactgaggatgatgaagcttcaagggcttctaagccggatcatatttacatggatgccatgggatttggaatgggcaattgctgtctccaggtgacattccaagcctgcagtatatctgaggccagatacctttatgatcagttggctactatctgtccaattgttatggctttgagtgctgcatctcccttttaccgaggctatgtgtcagacattgattgtcgctggggagtgatttctgcatctgtagatgatagaactcgggaggagcgaggactggagccattgaagaacaataactataggatcagtaaatcccgatatgactcaatagacagctatttatctaagtgtggtgagaaatataatgacatcgacttgacgatagataaagagatctacgaacagctgttgcaggaaggcattgatcatctcctggcccagcatgttgctcatctctttattagagacccactgacactgtttgaagagaaaatacacctggatgatgctaatgagtctgaccattttgagaatattcagtccacaaattggcagacaatgagatttaagccccctcctccaaactcagacattggatggagagtagaatttcgacccatggaggtgcaattaacagactttgagaactctgcctatgtggtgtttgtggtactgctcaccagagtgatcctttcctacaaattggattttctcattccactgtcaaaggttgatgagaacatgaaggtagcacagaaaagagatgctgtcttgcagggaatgttttatttcaggaaagatatttgcaaaggtggcaatgcagtggtggatggttgtggcaaggcccagaacagcacggagctcgctgcagaggagtacaccctcatgagcatagacaccatcatcaatgggaaggaaggtgtgtttcctggactgatcccaattctgaactcttaccttgaaaacatggaagtggatgtggacaccagatgtagtattctgaactacctaaagctaattaagaagagagcatctggagaactaatgacagttgccagatggatgagggagtttatcgcaaaccatcctgactacaagcaagacagtgtcataactgatgaaatgaattatagccttattttgaagtgtaaccaaattgcaaatgaattatgtgaatgcccagagttacttggatcagcatttaggaaagtaaaatatagtggaagtaaaactgactcatccaactagacattctacagaaagaaaaatgcattattgacgaactggctacagtaccatgcctctcagcccgtgtgtataatatgaagaccaaatgatagaactgtactgttttctgggccagtgagccagaaattgattaaggctttctttggtaggtaaatctagagtttatacagtgtacatgtacatagtaaagtatttttgattaacaatgtattttaataacatatctaaagtcatcatgaactggcttgtacatttttaaattcttactctggagcaacctactgtctaagcagttttgtaaatgtactggtaattgtacaatacttgcattccagagttaaaatgtttactgtaaatttttgttcttttaaagactacctgggacctgatttattgaaatttttctctttaaaaacattttctctcgttaattttcctttgtcatttcctttgttgtctacattaaatcacttgaatccattgaaagtgcttcaagggtaatcttgggtttctagcaccttatctatgatgtttcttttgcaattggaataatcacttggtcaccttgccccaagctttcccctctgaataaatacccattgaactctgatggctgttatcaaaggaacttttctttgtttaaatttgctgatgcaggaattaagtttaaacacaactctatagaaagaaaggagattattacccagaattcacatgtagtgattattaaggacaatttttttttttaactaaaaaagttggcggcaggggtggggggtggcaatcatttttcttcctatacatacaaaggatattgtcaaaaatggcgttcttctcttgtggcctgttattctgattgctgctgtatacagttttgtcactctttagtttttagttaagcatactgatagactttcctctaaaagccattcactccagattttacctggggaatattctacatactgcttactttctctataaaactcatcaataaatcatgaaaggcactgagttttgtaaatcaggaccctaaatgtttaattgtaaataagtttcagataattattatagctttgcgttgaagtttgttgtttttttttctcaactagttaagtcaactgcttctgaaataactctgtattgtagattatgcagatctttacaggcataaatatttaaactgtaatatgctaacttgaagagattgcaataaagctgcttcagctaaccctgtttatgtttaaatactagggtttgttctatattttatacatgcattttggatgattaaagaatgcctggttttcgtttgcaatttgcttgtgtaaatcaggttgtaaaaaggcagataaattgaaatgtttgtggtatgaggaaataaaagaatggaattagctttcattcagaaa

SEQ ID NO: 366723 - DNA, 3443 bp, Homo sapiens
agtctataaaacctggagcgcaggatcgcgcccaggagcggcgagctagcggacgcaaagactgggcatgctccgcggcggcgcaggttttggtcacaagtaggaagaagccagtgcaccagaccggcaaagagaagcgggagccgccgcggcagcgcggccgtggggtccgccgccgccgcatcggagcgggaggaggagcagcggggagggcgaggccgccgggccgagagccgtcccgcctgctctcggtcttctgccttcgcctccgcgcggtgcgtcggacccagggtctgtcacctgggcgccaggggccgccgccggggagccggagcgggcaggaccctccctccgccgactgcggcccgagagcgcccccgcggggtggagcggcagccgccttctgcgggcggctgagtgtccgtctcgcgcccggagcgggcgaccgccgtcagcccggaggaggaggaggaggaggaggagggggcggccatggggctgctgtcccagggctcgccgctgagctgggaggaaaccaagcgccatgccgaccacgtgcggcggcacgggatcctccagttcctgcacatctaccacgccgtcaaggaccggcacaaggacgttctcaagtggggcgatgaggtgaccaatttatgacgtttggttgtctgttttagtaccttaacaagaaatatccgacataggagaggagaaaaggttgtcatcaatgtaccaatatttaaggacaagaatacaccatctccatttatagaaacatttactgaggatgatgaagcttcaagggcttctaagccggatcatatttacatggatgccatgggatttggaatgggcaattgctgtctccaggtgacattccaagcctgcagtatatctgaggccagatacctttatgatcagttggctactatctgtccaattgttatggctttgagtgctgcatctcccttttaccgaggctatgtgtcagacattgattgtcgctggggagtgatttctgcatctgtagatgatagaactcgggaggagcgaggactggagccattgaagaacaataactataggatcagtaaatcccgatatgactcaatagacagctatttatctaagtgtggtgagaaatataatgacatcgacttgacgatagataaagagatctacgaacagctgttgcaggaaggcattgatcatctcctggcccagcatgttgctcatctctttattagagacccactgacactgtttgaagagaaaatacacctggatgatgctaatgagtctgaccattttgagaatattcagtccacaaattggcagacaatgagatttaagccccctcctccaaactcagacattggatggagagtagaatttcgacccatggaggtgcaattaacagactttgagaactctgcctatgtggtgtttgtggtactgctcaccagagtgatcctttcctacaaattggattttctcattccactgtcaaaggttgatgagaacatgaaggtagcacagaaaagagatgctgtcttgcagggaatgttttatttcaggaaagatatttgcaaaggtggcaatgcagtggtggatggttgtggcaaggcccagaacagcacggagctcgctgcagaggagtacaccctcatgagcatagacaccatcatcaatgggaaggaaggtgtgtttcctggactgatcccaattctgaactcttaccttgaaaacatggaagtggatgtggacaccagatgtagtattctgaactacctaaagctaattaagaagagagcatctggagaactaatgacagttgccagatggatgagggagtttatcgcaaaccatcctgactacaagcaagacagtgtcataactgatgaaatgaattatagccttattttgaagtgtaaccaaattgcaaatgaattatgtgaatgcccagagttacttggatcagcatttaggaaagtaaaatatagtggaagtaaaactgactcatccaactagacattctacagaaagaaaaatgcattattgacgaactggctacagtaccatgcctctcagcccgtgtgtataatatgaagaccaaatgatagaactgtactgttttctgggccagtgagccagaaattgattaaggctttctttggtaggtaaatctagagtttatacagtgtacatgtacatagtaaagtatttttgattaacaatgtattttaataacatatctaaagtcatcatgaactggcttgtacatttttaaattcttactctggagcaacctactgtctaagcagttttgtaaatgtactggtaattgtacaatacttgcattccagagttaaaatgtttactgtaaatttttgttcttttaaagactacctgggacctgatttattgaaatttttctctttaaaaacattttctctcgttaattttcctttgtcatttcctttgttgtctacattaaatcacttgaatccattgaaagtgcttcaagggtaatcttgggtttctagcaccttatctatgatgtttcttttgcaattggaataatcacttggtcaccttgccccaagctttcccctctgaataaatacccattgaactctgatggctgttatcaaaggaacttttctttgtttaaatttgctgatgcaggaattaagtttaaacacaactctatagaaagaaaggagattattacccagaattcacatgtagtgattattaaggacaatttttttttttaactaaaaaagttggcggcaggggtggggggtggcaatcatttttcttcctatacatacaaaggatattgtcaaaaatggcgttcttctcttgtggcctgttattctgattgctgctgtatacagttttgtcactctttagtttttagttaagcatactgatagactttcctctaaaagccattcactccagattttacctggggaatattctacatactgcttactttctctataaaactcatcaataaatcatgaaaggcactgagttttgtaaatcaggaccctaaatgtttaattgtaaataagtttcagataattattatagctttgcgttgaagtttgttgtttttttttctcaactagttaagtcaactgcttctgaaataactctgtattgtagattatgcagatctttacaggcataaatatttaaactgtaatatgctaacttgaagagattgcaataaagctgcttcagctaaccctgtttatgtttaaatactagggtttgttctatattttatacatgcattttggatgattaaagaatgcctggttttcgtttgcaatttgcttgtgtaaatcaggttgtaaaaaggcagataaattgaaatgtttgtggtatgaggaaataaaagaatggaattagctttcattcagaaa

SEQ ID NO: 366724 - DNA, 2830 bp, Homo sapiens
actatttaatcttatttcacttaggaccttggttatttatattagttgtctataggcagtggaacataattaaataccattttctagttaaattcacctaagacaacttttaaacaaaactcttgcgttaaatgttgccattaatgaagcgttgttaacttgcccctctctgcccagcaccttccttctctgacttcactgcttggggagcatgctaatgattccttggtgttaataactttgcaattcttaaacaggtgacattccaagcctgcagtatatctgaggccagatacctttatgatcagttggctactatctgtccaattgttatggctttgagtgctgcatctcccttttaccgaggctatgtgtcagacattgattgtcgctggggagtgatttctgcatctgtagatgatagaactcgggaggagcgaggactggagccattgaagaacaataactataggatcagtaaatcccgatatgactcaatagacagctatttatctaagtgtggtgagaaatataatgacatcgacttgacgatagataaagagatctacgaacagctgttgcaggaaggcattgatcatctcctggcccagcatgttgctcatctctttattagagacccactgacactgtttgaagagaaaatacacctggatgatgctaatgagtctgaccattttgagaatattcagtccacaaattggcagacaatgagatttaagccccctcctccaaactcagacattggatggagagtagaatttcgacccatggaggtgcaattaacagactttgagaactctgcctatgtggtgtttgtggtactgctcaccagagtgatcctttcctacaaattggattttctcattccactgtcaaaggttgatgagaacatgaaggtagcacagaaaagagatgctgtcttgcagggaatgttttatttcaggaaagatatttgcaaaggtggcaatgcagtggtggatggttgtggcaaggcccagaacagcacggagctcgctgcagaggagtacaccctcatgagcatagacaccatcatcaatgggaaggaaggtgtgtttcctggactgatcccaattctgaactcttaccttgaaaacatggaagtggatgtggacaccagatgtagtattctgaactacctaaagctaattaagaagagagcatctggagaactaatgacagttgccagatggatgagggagtttatcgcaaaccatcctgactacaagcaagacagtgtcataactgatgaaatgaattatagccttattttgaagtgtaaccaaattgcaaatgaattatgtgaatgcccagagttacttggatcagcatttaggaaagtaaaatatagtggaagtaaaactgactcatccaactagacattctacagaaagaaaaatgcattattgacgaactggctacagtaccatgcctctcagcccgtgtgtataatatgaagaccaaatgatagaactgtactgttttctgggccagtgagccagaaattgattaaggctttctttggtaggtaaatctagagtttatacagtgtacatgtacatagtaaagtatttttgattaacaatgtattttaataacatatctaaagtcatcatgaactggcttgtacatttttaaattcttactctggagcaacctactgtctaagcagttttgtaaatgtactggtaattgtacaatacttgcattccagagttaaaatgtttactgtaaatttttgttcttttaaagactacctgggacctgatttattgaaatttttctctttaaaaacattttctctcgttaattttcctttgtcatttcctttgttgtctacattaaatcacttgaatccattgaaagtgcttcaagggtaatcttgggtttctagcaccttatctatgatgtttcttttgcaattggaataatcacttggtcaccttgccccaagctttcccctctgaataaatacccattgaactctgatggctgttatcaaaggaacttttctttgtttaaatttgctgatgcaggaattaagtttaaacacaactctatagaaagaaaggagattattacccagaattcacatgtagtgattattaaggacaatttttttttttaactaaaaaagttggcggcaggggtggggggtggcaatcatttttcttcctatacatacaaaggatattgtcaaaaatggcgttcttctcttgtggcctgttattctgattgctgctgtatacagttttgtcactctttagtttttagttaagcatactgatagactttcctctaaaagccattcactccagattttacctggggaatattctacatactgcttactttctctataaaactcatcaataaatcatgaaaggcactgagttttgtaaatcaggaccctaaatgtttaattgtaaataagtttcagataattattatagctttgcgttgaagtttgttgtttttttttctcaactagttaagtcaactgcttctgaaataactctgtattgtagattatgcagatctttacaggcataaatatttaaactgtaatatgctaacttgaagagattgcaataaagctgcttcagctaaccctgtttatgtttaaatactagggtttgttctatattttatacatgcattttggatgattaaagaatgcctggttttcgtttgcaatttgcttgtgtaaatcaggttgtaaaaaggcagataaattgaaatgtttgtggtatgaggaaataaaagaatggaattagctttcattcagaaa

SEQ ID NO: 366725 - DNA, 3765 bp, Homo sapiens
agtctataaaacctggagcgcaggatcgcgcccaggagcggcgagctagcggacgcaaagactgggcatgctccgcggcggcgcaggttttggtcacaagtaggaagaagccagtgcaccagaccggcaaagagaagcgggagccgccgcggcagcgcggccgtggggtccgccgccgccgcatcggagcgggaggaggagcagcggggagggcgaggccgccgggccgagagccgtcccgcctgctctcggtcttctgccttcgcctccgcgcggtgcgtcggacccagggtctgtcacctgggcgccaggggccgccgccggggagccggagcgggcaggaccctccctccgccgactgcggcccgagagcgcccccgcggggtggagcggcagccgccttctgcgggcggctgagtgtccgtctcgcgcccggagcgggcgaccgccgtcagcccggaggaggaggaggaggaggaggagggggcggccatggggctgctgtcccagggctcgccgctgagctgggaggaaaccaagcgccatgccgaccacgtgcggcggcacgggatcctccagttcctgcacatctaccacgccgtcaaggaccggcacaaggacgttctcaagtggggcgatgaggtggaatacatgttggtatcttttgatcatgaaaataaaaaagtccggttggtcctgtctggggagaaagttcttgaaactctgcaagagaagggggaaaggacaaacccaaaccatcctaccctttggagaccagagtatgggagttacatgattgaagggacaccaggacagccctacggaggaacaatgtccgagttcaatacagttgaggccaacatgcgaaaacgccggaaggaggctacttctatattagaagaaaatcaggctctttgcacaataacttcatttcccagattaggctgtcctgggttcacactgcccgaggtcaaacccaacccagtggaaggaggagcttccaagtccctcttctttccagatgaagcaataaacaagcaccctcgcttcagtaccttaacaagaaatatccgacataggagaggagaaaaggttgtcatcaatgtaccaatatttaaggacaagaatacaccatctccatttatagaaacatttactgaggatgatgaagcttcaagggcttctaagccggatcatatttacatggatgccatgggatttggaatgggcaattgctgtctccaggtgacattccaagcctgcagtatatctgaggccagatacctttatgatcagttggctactatctgtccaattgttatggctttgagtgctgcatctcccttttaccgaggctatgtgtcagacattgattgtcgctggggagtgatttctgcatctgtagatgatagaactcgggaggagcgaggactggagccattgaagaacaataactataggatcagtaaatcccgatatgactcaatagacagctatttatctaagtgtggtgagaaatataatgacatcgacttgacgatagataaagagatctacgaacagctgttgcaggaaggcattgatcatctcctggcccagcatgttgctcatctctttattagagacccactgacactgtttgaagagaaaatacacctggatgatgctaatgagtctgaccattttgagaatattcagtccacaaattggcagacaatgagatttaagccccctcctccaaactcagacattggatggagagtagaatttcgacccatggaggtgcaattaacagactttgagaactctgcctatgtggtgtttgtggtactgctcaccagagtgatcctttcctacaaattggattttctcattccactgtcaaaggttgatgagaacatgaaggtagcacagaaaagagatgctgtcttgcagggaatgttttatttcaggaaagatatttgcaaaggtggcaatgcagtggtggatggttgtggcaaggcccagaacagcacggagctcgctgcagaggagtacaccctcatgagcatagacaccatcatcaatgggaaggaaggtgtgtttcctggactgatcccaattctgaactcttaccttgaaaacatggaagtggatgtggacaccagatgtagtattctgaactacctaaagctaattaagaagagagcatctggagaactaatgacagttgccagatggatgagggagtttatcgcaaaccatcctgactacaagcaagacagtgtcataactgatgaaatgaattatagccttattttgaagtgtaaccaaattgcaaatgaattatgtgaatgcccagagttacttggatcagcatttaggaaagtaaaatatagtggaagtaaaactgactcatccaactagacattctacagaaagaaaaatgcattattgacgaactggctacagtaccatgcctctcagcccgtgtgtataatatgaagaccaaatgatagaactgtactgttttctgggccagtgagccagaaattgattaaggctttctttggtaggtaaatctagagtttatacagtgtacatgtacatagtaatggcttgtacatttttaaattcttactctggagcaacctactgtctaagcagttttgtaaatgtactggtaattgtacaatacttgcattccagagttaaaatgtttactgtaaatttttgttcttttaaagactacctgggacctgatttattgaaatttttctctttaaaaacattttctctcgttaattttcctttgtcatttcctttgttgtctacattaaatcacttgaatccattgaaagtgcttcaagggtaatcttgggtttctagcaccttatctatgatgtttcttttgcaattggaataatcacttggtcaccttgccccaagctttcccctctgaataaatacccattgaactctgatggctgttatcaaaggaacttttctttgtttaaatttgctgatgcaggaattaagtttaaacacaactctatagaaagaaaggagattattacccagaattcacatgtagtgattattaaggacaatttttttttttaactaaaaaagttggcggcaggggtggggggtggcaatcatttttcttcctatacatacaaaggatattgtcaaaaatggcgttcttctcttgtggcctgttattctgattgctgctgtatacagttttgtcactctttagtttttagttaagcatactgatagactttcctctaaaagccattcactccagattttacctggggaatattctacatactgcttactttctctataaaactcatcaataaatcatgaaaggcactgagttttgtaaatcaggaccctaaatgtttaattgtaaataagtttcagataattattatagctttgcgttgaagtttgttgtttttttttctcaactagttaagtcaactgcttctgaaataactctgtattgtagattatgcagatctttacaggcataaatatttaaactgtaatatgctaacttgaagagattgcaataaagctgcttcagctaaccctgtttatgtttaaatactagggtttgttctatattttatacatgcattttggatgattaaagaatgcctggttttcgtttgcaatttgcttgtgtaaatcaggttgtaaaaaggcagataaattgaaatgtttgtggtatgaggaaataaaagaatggaattagctttcattcagaaa

SEQ ID NO: 366726 - DNA, 3764 bp, Homo sapiens
agtctataaaacctggagcgcaggatcgcgcccaggagcggcgagctagcggacgcaaagactgggcatgctccgcggcggcgcaggttttggtcacaagtaggaagaagccagtgcaccagaccggcaaagagaagcgggagccgccgcggcagcgcggccgtggggtccgccgccgccgcatcggagcgggaggaggagcagcggggagggcgaggccgccgggccgagagccgtcccgcctgctctcggtcttctgccttcgcctccgcgcggtgcgtcggacccagggtctgtcacctgggcgccaggggccgccgccggggagccggagcgggcaggaccctccctccgccgactgcggcccgagagcgcccccgcggggtggagcggcagccgccttctgcgggcggctgagtgtccgtctcgcgcccggagcgggcgaccgccgtcagcccggaggaggaggaggaggaggaggagggggcggccatggggctgctgtcccagggctcgccgctgagctgggaggaaaccaagcgccatgccgaccacgtgcggcggcacgggatcctccagttcctgcacatctaccacgccgtcaaggaccggcacaaggacgttctcaagtggggcgatgaggtggaatacatgttggtatcttttgatcatgaaaataaaaaagtccggttggtcctgtctggggagaaagttcttgaaactctgcaagagaagggggaaaggacaaacccaaaccatcctaccctttggagaccagagtatgggagttacatgattgaagggacaccaggacagccctacggaggaacaatgtccgagttcaatacagttgaggccaacatgcgaaaacgccggaaggaggctacttctatattagaagaaaatcaggctctttgcacaataacttcatttcccagattaggctgtcctgggttcacactgcccgaggtcaaacccaacccagtggaaggaggagcttccaagtccctcttctttccagatgaagcaataaacaagcaccctcgcttcagtaccttaacaagaaatatccgacataggagaggagaaaaggttgtcatcaatgtaccaatatttaaggacaagaatacaccatctccatttatagaaacatttactgaggatgatgaagcttcaagggcttctaagccggatcatatttacatggatgccatgggatttggaatgggcaattgctgtctccaggtgacattccaagcctgcagtatatctgaggccagatacctttatgatcagttggctactatctgtccaattgttatggctttgagtgctgcatctcccttttaccgaggctatgtgtcagacattgattgtcgctggggagtgatttctgcatctgtagatgatagaactcgggaggagcgaggactggagccattgaagaacaataactataggatcagtaaatcccgatatgactcaatagacagctatttatctaagtgtggtgagaaatataatgacatcgacttgacgatagataaagagatctacgaacagctgttgcaggaaggcattgatcatctcctggcccagcatgttgctcatctctttattagagacccactgacactgtttgaagagaaaatacacctggatgatgctaatgagtctgaccattttgagaatattcagtccacaaattggcagacaatgagatttaagccccctcctccaaactcagacattggatggagagtagaatttcgacccatggaggtgcaattaacagactttgagaactctgcctatgtggtgtttgtggtactgctcaccagagtgatcctttcctacaaattggattttctcattccactgtcaaaggttgatgagaacatgaaggtagcacagaaaagagatgctgtcttgcagggaatgttttatttcaggaaagatatttgcaaaggtggcaatgcagtggtggatggttgtggcaaggcccagaacagcacggagctcgctgcagaggagtacaccctcatgagcatagacaccatcatcaatgggaaggaaggtgtgtttcctggactgatcccaattctgaactcttaccttgaaaacatggaagtggatgtggacaccagatgtagtattctgaactacctaaagctaattaagaagagagcatctggagaactaatgacagttgccagatggatgagggagtttatcgcaaaccatcctgactacaagcaagacagtgtcataactgatgaaatgaattatagccttattttgaagtgtaaccaaattgcaaatgaattatgtgaatgcccagagttacttggatcagcatttaggaaagtaaaatatagtggaagtaaaactgactcatccaactagacattctacagaaagataatatgaagaccaaatgatagaactgtactgttttctgggccagtgagccagaaattgattaaggctttctttggtaggtaaatctagagtttatacagtgtacatgtacatagtaaagtatttttgattaacaatgtattttaataacatatctaaagtcatcatgaactggcttgtacatttttaaattcttactctggagcaacctactgtctaagcagttttgtaaatgtactggtaattgtacaatacttgcattccagagttaaaatgtttactgtaaatttttgttcttttaaagactacctgggacctgatttattgaaatttttctctttaaaaacattttctctcgttaattttcctttgtcatttcctttgttgtctacattaaatcacttgaatccattgaaagtgcttcaagggtaatcttgggtttctagcaccttatctatgatgtttcttttgcaattggaataatcacttggtcaccttgccccaagctttcccctctgaataaatacccattgaactctgatggctgttatcaaaggaacttttctttgtttaaatttgctgatgcaggaattaagtttaaacacaactctatagaaagaaaggagattattacccagaattcacatgtagtgattattaaggacaatttttttttttaactaaaaaagttggcggcaggggtggggggtggcaatcatttttcttcctatacatacaaaggatattgtcaaaaatggcgttcttctcttgtggcctgttattctgattgctgctgtatacagttttgtcactctttagtttttagttaagcatactgatagactttcctctaaaagccattcactccagattttacctggggaatattctacatactgcttactttctctataaaactcatcaataaatcatgaaaggcactgagttttgtaaatcaggaccctaaatgtttaattgtaaataagtttcagataattattatagctttgcgttgaagtttgttgtttttttttctcaactagttaagtcaactgcttctgaaataactctgtattgtagattatgcagatctttacaggcataaatatttaaactgtaatatgctaacttgaagagattgcaataaagctgcttcagctaaccctgtttatgtttaaatactagggtttgttctatattttatacatgcattttggatgattaaagaatgcctggttttcgtttgcaatttgcttgtgtaaatcaggttgtaaaaaggcagataaattgaaatgtttgtggtatgaggaaataaaagaatggaattagctttcattcagaaa

SEQ ID NO: 366727 - DNA, 2886 bp, Homo sapiens
agtctataaaacctggagcgcaggatcgcgcccaggagcggcgagctagcggacgcaaagactgggcatgctccgcggcggcgcaggttttggtcacaagtaggaagaagccagtgcaccagaccggcaaagagaagcgggagccgccgcggcagcgcggccgtggggtccgccgccgccgcatcggagcgggaggaggagcagcggggagggcgaggccgccgggccgagagccgtcccgcctgctctcggtcttctgccttcgcctccgcgcggtgcgtcggacccagggtctgtcacctgggcgccaggggccgccgccggggagccggagcgggcaggaccctccctccgccgactgcggcccgagagcgcccccgcggggtggagcggcagccgccttctgcgggcggctgagtgtccgtctcgcgcccggagcgggcgaccgccgtcagcccggaggaggaggaggaggaggaggagggggcggccatggggctgctgtcccagggctcgccgctgagctgggaggaaaccaagcgccatgccgaccacgtgcggcggcacgggatcctccagttcctgcacatctaccacgccgtcaaggaccggcacaaggacgttctcaagtggggcgatgaggtggaatacatgttggtatcttttgatcatgaaaataaaaaagtccggttggtcctgtctggggagaaagttcttgaaactctgcaagagaagggggaaaggacaaacccaaaccatcctaccctttggagaccagagtatgggagttacatgattgaagggacaccaggacagccctacggaggaacaatgtccgagttcaatacagttgaggccaacatgcgaaaacgccggaaggaggctacttctatattagaagaaaatcaggctctttgcacaataacttcatttcccagattaggctgtcctgggttcacactgcccgaggtcaaacccaacccagtggaaggaggagcttccaagtccctcttctttccagatgaagcaataaacaagcaccctcgcttcagtaccttaacaagaaatatccgacataggagaggagaaaaggttgtcatcaatgtaccaatatttaaggacaagaatacaccatctccatttatagaaacatttactgaggatgatgaagcttcaagggcttctaagccggatcatatttacatggatgccatgggatttggaatgggcaattgctgtctccaggtgacattccaagcctgcagtatatctgaggccagatacctttatgatcagttggctactatctgtccaattgttatggctttgagtgctgcatctcccttttaccgaggctatgtgtcagacattgattgtcgctggggagtgatttctgcatctgtagatgatagaactcgggaggagcgaggactggagccattgaagaacaataactataggatcagtaaatcccgatatgactcaatagacagctatttatctaagtgtggtgagaaatataatgacatcgacttgacgatagataaagagatctacgaacagctgttgcaggaaggcattgatcatctcctggcccagcatgttgctcatctctttattagagacccactgacactgtttgaagagaaaatacacctggatgatgctaatgagtctgaccattttgagaatattcagtccacaaattggcagacaatgagatttaagccccctcctccaaactcagacattggatggagagtagaatttcgacccatggaggtgcaattaacagactttgagaactctgcctatgtggtgtttgtggtactgctcaccagagtgatcctttcctacaaattggattttctcattccactgtcaaaggttgatgagaacatgaaggtagcacagaaaagagatgctgtcttgcagggaatgttttatttcaggaaagatatttgcaaaggtggcaatgcagtggtggatggttgtggcaaggcccagaacagcacggagctcgctgcagaggagtacaccctcatgagcatagacaccatcatcaatgggaaggaaggtgtgtttcctggactgatcccaattctgaactcttaccttgaaaacatggaagtggatgtggacaccagatgtagtattctgaactacctaaagctaattaagaagagagcatctggagaactaatgacagttgccagatggatgagggagtttatcgcaaaccatcctgactacaagcaagacagtgtcataactgatgaaatgaattatagccttattttgaagtgtaaccaaattgcaaatgaattatgtgaatgcccagagttacttggatcagcatttaggaaagtaaaatatagtggaagtaaaactgactcatccaactagacattctacagaaagaaaaatgcattattgacgaactggctacagtaccatgcctctcagcccgtgtgtataatatgaagaccaaatgatagaactgtactgttttctgggccagtgagccagaaattgattaaggctttctttggtaggtaaatctagagtttatacagtgtacatgtacatagtaaagtatttttgattaacaatgtattttaataacatatctaaagtcatcatgaactggcttgtacatttttaaattcttactctggagcaacctactgtctaagcagttttgtaaatgtactggtaattgtacaatacttgcattccagagttaaaatgtttactgtaaatttttgttcttttaaagactacctgggacctgatttattgaaatttttctctttaaaaacattttctctcgttaattttcctttgtcatttcctttgttgtctacattaaatcacttgaatcca

SEQ ID NO: 366728 - DNA, 1621 bp, Homo sapiens
ctctagaggatacacctccataacggtgcccacatagtattcttatgggttaaattgaggcctcctcaaaagatgttgaaatcctaaattctagtagctcagaatgtgaccttatttagcaatagagttattgcgggtcgggcgtggtggctcatgcctgtagtcccagctacttgggaggctgaggcaggagaatggcgtgaacccgggaggcggagcttgcagtgagccgagatcccgccactgcactccagcctgggcgacagagcgagactccatctcaaaaaaaaaaaaaaaagaaagaaacaaaaaccaaaaaccaggaggaaggagtctctatcctccataacctcactgaagatctcacctgaagacgtcaggcccaccctgaataatcagtatttttgattaacaatgtattttaataacatatctaaagtcatcatgaactggcttgtacatttttaaattcttactctggagcaacctactgtctaagcagttttgtaaatgtactggtaattgtacaatacttgcattccagagttaaaatgtttactgtaaatttttgttcttttaaagactacctgggacctgatttattgaaatttttctctttaaaaacattttctctcgttaattttcctttgtcatttcctttgttgtctacattaaatcacttgaatccattgaaagtgcttcaagggtaatcttgggtttctagcaccttatctatgatgtttcttttgcaattggaataatcacttggtcaccttgccccaagctttcccctctgaataaatacccattgaactctgatggctgttatcaaaggaacttttctttgtttaaatttgctgatgcaggaattaagtttaaacacaactctatagaaagaaaggagattattacccagaattcacatgtagtgattattaaggacaatttttttttttaactaaaaaagttggcggcaggggtggggggtggcaatcatttttcttcctatacatacaaaggatattgtcaaaaatggcgttcttctcttgtggcctgttattctgattgctgctgtatacagttttgtcactctttagtttttagttaagcatactgatagactttcctctaaaagccattcactccagattttacctggggaatattctacatactgcttactttctctataaaactcatcaataaatcatgaaaggcactgagttttgtaaatcaggaccctaaatgtttaattgtaaataagtttcagataattattatagctttgcgttgaagtttgttgtttttttttctcaactagttaagtcaactgcttctgaaataactctgtattgtagattatgcagatctttacaggcataaatatttaaactgtaatatgctaacttgaagagattgcaataaagctgcttcagctaaccctgtttatgtttaaatactagggtttgttctatattttatacatgcattttggatgattaaagaatgcctggttttcgtttgcaatttgcttgtgtaaatcaggttgtaaaaaggcagataaattgaaatgtttgtggtatgaggaaataaaagaatggaattagctttcattcagaaa

SEQ ID NO: 366729 - DNA, 2516 bp, Homo sapiens
agtctataaaacctggagcgcaggatcgcgcccaggagcggcgagctagcggacgcaaagactgggcatgctccgcggcggcgcaggttttggtcacaagtaggaagaagccagtgcaccagaccggcaaagagaagcgggagccgccgcggcagcgcggccgtggggtccgccgccgccgcatcggagcgggaggaggagcagcggggagggcgaggccgccgggccgagagccgtcccgcctgctctcggtcttctgccttcgcctccgcgcggtgcgtcggacccagggtctgtcacctgggcgccaggggccgccgccggggagccggagcgggcaggaccctccctccgccgactgcggcccgagagcgcccccgcggggtggagcggcagccgccttctgcgggcggctgagtgtccgtctcgcgcccggagcgggcgaccgccgtcagcccggaggaggaggaggaggaggaggagggggcggccatggggctgctgtcccagggctcgccgctgagctgggaggaaaccaagcgccatgccgaccacgtgcggcggcacgggatcctccagttcctgcacatctaccacgccgtcaaggaccggcacaaggacgttctcaagtggggcgatgaggtggaatacatgttggtatcttttgatcatgaaaataaaaaagtccggttggtcctgtctggggagaaagttcttgaaactctgcaagagaagggggaaaggacaaacccaaaccatcctaccctttggagaccagagtatgggagttacatgattgaagggacaccaggacagccctacggaggaacaatgtccgagttcaatacagttgaggccaacatgcgaaaacgccggaaggaggctacttctatattagaagaaaatcaggctctttgcacaataacttcatttcccagattaggctgtcctgggttcacactgcccgaggtcaaacccaacccagtggaaggaggagcttccaagtccctcttctttccagatgaagcaataaacaagcaccctcgcttcagtaccttaacaagaaatatccgacataggagaggagaaaaggttgtcatcaatgtaccaatatttaaggacaagaatacaccatctccatttatagaaacatttactgaggatgatgaagcttcaagggcttctaagccggatcatatttacatggatgccatgggatttggaatgggcaattgctgtctccaggtgacattccaagcctgcagtatatctgaggccagatacctttatgatcagttggctactatctgtccaattgttatggctttgagtgctgcatctcccttttaccgaggctatgtgtcagacattgattgtcgctggggagtgatttctgcatctgtagatgatagaactcgggaggagcgaggactggagccattgaagaacaataactataggatcagtaaatcccgatatgactcaatagacagctatttatctaagtgtggtgagaaatataatgacatcgacttgacgatagataaagagatctacgaacagctgttgcaggaaggcattgatcatctcctggcccagcatgttgctcatctctttattagagacccactgacactgtttgaagagaaaatacacctggatgatgctaatgagtctgaccattttgagaatattcagtccacaaattggcagacaatgagatttaagccccctcctccaaactcagacattggatggagagtagaatttcgacccatggaggtgcaattaacagactttgagaactctgcctatgtggtgtttgtggtactgctcaccagagtgatcctttcctacaaattggattttctcattccactgtcaaaggttgatgagaacatgaaggtagcacagaaaagagatgctgtcttgcagggaatgttttatttcaggaaagatatttgcaaaggtggcaatgcagtggtggatggttgtggcaaggcccagaacagcacggagctcgctgcagaggagtacaccctcatgagcatagacaccatcatcaatgggaaggaaggtgtgtttcctggactgatcccaattctgaactcttaccttgaaaacatggaagtggatgtggacaccagatgtagtattctgaactacctaaagctaattaagaagagagcatctggagaactaatgacagttgccagatggatgagggagtttatcgcaaaccatcctgactacaagcaagacagtgtcataactgatctaataaggagtggtgcaccactcctatagatcagttcattttaaacatgtttgggtgaaaatgatgtgtcaatgtaggtacatgtattacaattgatgacctttcattgacgcatcataatgacttacagttcatagtttatattaagatcattcttggtgttgtacattctgtgggtttggacaaatgtataatgaccatgtatccagcattataatatcagacagagtattttcac

SEQ ID NO: 366730 - DNA, 2139 bp, Homo sapiens
agtctataaaacctggagcgcaggatcgcgcccaggagcggcgagctagcggacgcaaagactgggcatgctccgcggcggcgcaggttttggtcacaagtaggaagaagccagtgcaccagaccggcaaagagaagcgggagccgccgcggcagcgcggccgtggggtccgccgccgccgcatcggagcgggaggaggagcagcggggagggcgaggccgccgggccgagagccgtcccgcctgctctcggtcttctgccttcgcctccgcgcggtgcgtcggacccagggtctgtcacctgggcgccaggggccgccgccggggagccggagcgggcaggaccctccctccgccgactgcggcccgagagcgcccccgcggggtggagcggcagccgccttctgcgggcggctgagtgtccgtctcgcgcccggagcgggcgaccgccgtcagcccggaggaggaggaggaggaggaggagggggcggccatggggctgctgtcccagggctcgccgctgagctgggaggaaaccaagcgccatgccgaccacgtgcggcggcacgggatcctccagttcctgcacatctaccacgccgtcaaggaccggcacaaggacgttctcaagtggggcgatgaggtggaatacatgttggtatcttttgatcatgaaaataaaaaagtccggttggtcctgtctggggagaaagttcttgaaactctgcaagagaagggggaaaggacaaacccaaaccatcctaccctttggagaccagagtatgggagttacatgattgaagggacaccaggacagccctacggaggaacaatgtccgagttcaatacagttgaggccaacatgcgaaaacgccggaaggaggctacttctatattagaagaaaatcaggctctttgcacaataacttcatttcccagattaggctgtcctgggttcacactgcccgaggtcaaacccaacccagtggaaggaggagcttccaagtccctcttctttccagatgaagcaataaacaagcaccctcgcttcagtaccttaacaagaaatatccgacataggagaggagaaaaggttgtcatcaatgtaccaatatttaaggacaagaatacaccatctccatttatagaaacatttactgaggatgatgaagcttcaagggcttctaagccggatcatatttacatggatgccatgggatttggaatgggcaattgctgtctccaggtgacattccaagcctgcagtatatctgaggccagatacctttatgatcagttggctactatctgtccaattgttatggctttgagtgctgcatctcccttttaccgaggctatgtgtcagacattgattgtcgctggggagtgatttctgcatctgtagatgatagaactcgggaggagcgaggactggagccattgaagaacaataactataggatcagtaaatcccgatatgactcaatagacagctatttatctaagtgtggtgagaaatataatgacatcgacttgacgatagataaagagatctacgaacagctgttgcaggaaggcattgatcatctcctggcccagcatgttgctcatctctttattagagacccactgacactgtttgaagagaaaatacacctggatgatgctaatgagtctgaccattttgagaatattcagtccacaaattggcagacaatgagatttaagccccctcctccaaactcagacattggatggagagtagaatttcgacccatggaggtgcaattaacagactttgagaactctgcctatgtggtgtttgtggtactgctcaccagagtgatcctttcctacaaattggattttctcattccactgtcaaaggttgatgagaacatgaaggtagcacagaaaagagatgctgtcttgcagggaatgttttatttcaggaaagatatttgcaaaggtggcaatgcagtggtggatggttgtggcaaggcccagaacagcacggagctcgctgcagaggagtacaccctcatgagcatagacaccatcatcaatgggaaggaaggtgtgtttcctggaatgatcccgattctgaactcgaacccagttcaggatccgtctagagta

SEQ ID NO: 366731 - DNA, 2335 bp, Homo sapiens
agtctataaaacctggagcgcaggatcgcgcccaggagcggcgagctagcggacgcaaagactgggcatgctccgcggcggcgcaggttttggtcacaagtaggaagaagccagtgcaccagaccggcaaagagaagcgggagccgccgcggcagcgcggccgtggggtccgccgccgccgcatcggagcgggaggaggagcagcggggagggcgaggccgccgggccgagagccgtcccgcctgctctcggtcttctgccttcgcctccgcgcggtgcgtcggacccagggtctgtcacctgggcgccaggggccgccgccggggagccggagcgggcaggaccctccctccgccgactgcggcccgagagcgcccccgcggggtggagcggcagccgccttctgcgggcggctgagtgtccgtctcgcgcccggagcgggcgaccgccgtcagcccggaggaggaggaggaggaggaggagggggcggccatggggctgctgtcccagggctcgccgctgagctgggaggaaaccaagcgccatgccgaccacgtgcggcggcacgggatcctccagttcctgcacatctaccacgccgtcaaggaccggcacaaggacgttctcaagtggggcgatgaggtggaatacatgttggtatcttttgatcatgaaaataaaaaagtccggttggtcctgtctggggagaaagttcttgaaactctgcaagagaagggggaaaggacaaacccaaaccatcctaccctttggagaccagagtatgggagttacatgattgaagggacaccaggacagccctacggaggaacaatgtccgagttcaatacagttgaggccaacatgcgaaaacgccggaaggaggctacttctatattagaagaaaatcaggctctttgcacaataacttcatttcccagattaggctgtcctgggttcacactgcccgaggtcaaacccaacccagtggaaggaggagcttccaagtccctcttctttccagatgaagcaataaacaagcaccctcgcttcagtaccttaacaagaaatatccgacataggagaggagaaaaggttgtcatcaatgtaccaatatttaaggacaagaatacaccatctccatttatagaaacatttactgaggatgatgaagcttcaagggcttctaagccggatcatatttacatggatgccatgggatttggaatgggcaattgctgtctccaggtgacattccaagcctgcagtatatctgaggccagatacctttatgatcagttggctactatctgtccaattgttatggctttgagtgctgcatctcccttttaccgaggctatgtgtcagacattgattgtcgctggggagtgatttctgcatctgtagatgatagaactcgggaggagcgaggactggagccattgaagaacaataactataggatcagtaaatcccgatatgactcaatagacagctatttatctaagtgtggtgagaaatataatgacatcgacttgacgatagataaagagatctacgaacagctgttgcaggaaggcattgatcatctcctggcccagcatgttgctcatctctttattagagacccactgacactgtttgaagagaaaatacacctggatgatgctaatgagtctgaccattttgagaatattcagtccacaaattggcagacaatgagatttaagccccctcctccaaactcagacattggatggagagtagaatttcgacccatggaggtaagacacatgcatcagcaagaactgactcaaaagtactctttcgccagctgttcatcacccttctgatgctgctatgagaaggctcttatatataaaataaaaattaagtatgtgcatggtagcaagtcagtccaagttaaggagggttgatttctgagaatagatgtgggcaaagggcttccagacccagatggggaattaggagatggcttgggaatgacatgatctgaggaagggcctgggtcagggaagagcatgtttgtgtagttggttcataacttctctgggcttctgcttgtctaggtgcaattaacagactttgagaactctgcctatgtggtgtttgtggtactgctcaccagagtgatcctttcctacaaattggattttctcattccactgtcaaaggtaaggatatgtttctttatggtgatgggtatagatctatctgtagatatatttatttatatatgctatttatttcccacctaatttcatttgaaattgtttaccctttgcaataaaatgtttctccatcaaccctattctt

SEQ ID NO: 366732 - DNA, 1315 bp, Homo sapiens
agtctataaaacctggagcgcaggatcgcgcccaggagcggcgagctagcggacgcaaagactgggcatgctccgcggcggcgcaggttttggtcacaagtaggaagaagccagtgcaccagaccggcaaagagaagcgggagccgccgcggcagcgcggccgtggggtccgccgccgccgcatcggagcgggaggaggagcagcggggagggcgaggccgccgggccgagagccgtcccgcctgctctcggtcttctgccttcgcctccgcgcggtgcgtcggacccagggtctgtcacctgggcgccaggggccgccgccggggagccggagcgggcaggaccctccctccgccgactgcggcccgagagcgcccccgcggggtggagcggcagccgccttctgcgggcggctgagtgtccgtctcgcgcccggagcgggcgaccgccgtcagcccggaggaggaggaggaggaggaggagggggcggccatggggctgctgtcccagggctcgccgctgagctgggaggaaaccaagcgccatgccgaccacgtgcggcggcacgggatcctccagttcctgcacatctaccacgccgtcaaggaccggcacaaggacgttctcaagtggggcgatgaggtggaatacatgttggtatcttttgatcatgaaaataaaaaagtccggttggtcctgtctggggagaaagttcttgaaactctgcaagagaagggggaaaggacaaacccaaaccatcctaccctttggagaccagagtatgggagttacatgattgaagggacaccaggacagccctacggaggaacaatgtccgagttcaatacagttgaggccaacatgcgaaaacgccggaaggaggctacttctatattagaagattaggctgtcctgggttcacactgcccgaggtcaaacccaacccagtggaaggaggagcttccaagtccctcttctttccagatgaagcaataaacaagcaccctcgcttcaggtgagtatggctttgtgttgaaatgcagatgcccttcactagacccctgacttctgagagtatagtatttctgtctagaaatcctttttgagcattaactgagttttggctctcttcctaagtaaccagagaagatagcagatgtgcacctgttcacatcttcagtacccccaggcttcttggttgttgatgcgtgcaccaggcttgatttgtcaattctccaagtcgtcacaaagttattcgctgagccactgcgaataactcttttaatagggagattattttcagtcctaggtctgt

SEQ ID NO: 366733 - DNA, 1202 bp, Homo sapiens
agtctataaaacctggagcgcaggatcgcgcccaggagcggcgagctagcggacgcaaagactgggcatgctccgcggcggcgcaggttttggtcacaagtaggaagaagccagtgcaccagaccggcaaagagaagcgggagccgccgcggcagcgcggccgtggggtccgccgccgccgcatcggagcgggaggaggagcagcggggagggcgaggccgccgggccgagagccgtcccgcctgctctcggtcttctgccttcgcctccgcgcggtgcgtcggacccagggtctgtcacctgggcgccaggggccgccgccggggagccggagcgggcaggaccctccctccgccgactgcggcccgagagcgcccccgcggggtggagcggcagccgccttctgcgggcggctgagtgtccgtctcgcgcccggagcgggcgaccgccgtcagcccggaggaggaggaggaggaggaggagggggcggccatggggctgctgtcccagggctcgccgctgagctgggaggaaaccaagcgccatgccgaccacgtgcggcggcacgggatcctccagttcctgcacatctaccacgccgtcaaggaccggcacaaggacgttctcaagtggggcgatgaggtgagcgcccgcggtccccgtccccgccgggcacccgtgtctggccgcccgcgctgcctttgtcttgccctacgcccccggccctatcgcggtccgcgttctccactgcgcccgggggtcctcgagcgcctcccggccccgggagcatcgtccctgctttcgcctagtccgcgtccagggccatcctcctgactagactcctttcttgttcattcattcttttgggttttccccttcattccataaacacggattgggcgctgggagggcgtgagcatgaaaaagtgacattaggtgctgcgagtcttcaacctagtgtatctgcagaccggcaactaccatgatccaccttacaggctcaaaattcgcttttgcggtcaatatgaaagagatttaagttttcctagtaggcctgctgcttttagaaatcaggtcttcaggatgtccacttctgccctacctcatgcaggtgtcttttccttaaacctctccaacttctcatcttccctcccctccaaaacacacacacttcatagctataaattgaaaccagtaaatta

SEQ ID NO: 366734 - DNA, 3016 bp, Homo sapiens
agtctataaaacctggagcgcaggatcgcgcccaggagcggcgagctagcggacgcaaagactgggcatgctccgcggcggcgcaggttttggtcacaagtaggaagaagccagtgcaccagaccggcaaagagaagcgggagccgccgcggcagcgcggccgtggggtccgccgccgccgcatcggagcgggaggaggagcagcggggagggcgaggccgccgggccgagagccgtcccgcctgctctcggtcttctgccttcgcctccgcgcggtgcgtcggacccagggtctgtcacctgggcgccaggggccgccgccggggagccggagcgggcaggaccctccctccgccgactgcggcccgagagcgcccccgcggggtggagcggcagccgccttctgcgggcggctgagtgtccgtctcgcgcccggagcgggcgaccgccgtcagcccggaggaggaggaggaggaggaggagggggcggccatggggctgctgtcccagggctcgccgctgagctgggaggaaaccaagcgccatgccgaccacgtgcggcggcacgggatcctccagttcctgcacatctaccacgccgtcaaggaccggcacaaggacgttctcaagtggggcgatgaggtggaatacatgttggtatcttttgatcatgaaaataaaaaagtccggttggtcctgtctggggagaaagttcttgaaactctgcaagagaagggggaaaggacaaacccaaaccatcctaccctttggagaccagagtatgggagttacatgattgaagggacaccaggacagccctacggaggaacaatgtccgagttcaatacagttgaggccaacatgcgaaaacgccggaaggaggctacttctatattagaagaaaatcaggctctttgcacaataacttcatttcccagattaggctgtcctgggttcacactgcccgaggtcaaacccaacccagtggaaggaggagcttccaagtccctcttctttccagatgaagcaataaacaagcaccctcgcttcagtaccttaacaagaaatatccgacataggagaggagaaaaggttgtcatcaatgtaccaatatttaaggacaagaatacaccatctccatttatagaaacatttactgaggatgatgaagcttcaagggcttctaagccggatcatatttacatggatgccatgggatttggaatgggcaattgctgtctccaggtgacattccaagcctgcagtatatctgaggccagatacctttatgatcagttggctactatctgtccaattgttatggctttgagtgctgcatctcccttttaccgaggctatgtgtcagacattgattgtcgctggggagtgatttctgcatctgtagatgatagaactcgggaggagcgaggactggagccattgaagaacaataactataggatcagtaaatcccgatatgactcaatagacagctatttatctaagtgtggtgagaaatataatgacatcgacttgacgatagataaagagatctacgaacagctgttgcaggaaggcattgatcatctcctggcccagcatgttgctcatctctttattagagacccactgacactgtttgaagagaaaatacacctggatgatgctaatgagtctgaccattttgagaatattcagtccacaaattggcagacaatgagatttaagccccctcctccaaactcagacattggatggagagtagaatttcgacccatggaggtgcaattaacagactttgagaactctgcctatgtggtgtttgtggtactgctcaccagagtgatcctttcctacaaattggattttctcattccactgtcaaaggttgatgagaacatgaaggtagcacagaaaagagatgctgtcttgcagggaatgttttatttcaggaaagatatttgcaaaggtggcaatgcagtggtggatggttgtggcaaggcccagaacagcacggagctcgctgcagaggagtacaccctcatgagcatagacaccatcatcaatgggaaggaaggtgtgtttcctggactgatcccaattctgaactcttaccttgaaaacatggaagtggatgtggacaccagatgtagtattctgaactacctaaagctaattaagaagagagcatctggagaactaatgacagttgccagatggatgagggagtttatcgcaaaccatcctgactacaagcaagacagtgtcataactgatgaaatgaattatagccttattttgaagtgtaaccaaattgcaaatgaattatgtgaatgcccagagttacttggatcagcatttaggaaagtaaaatatagtggaagtaaaactgactcatccaactagacattctacagaaagaaaaatgcattattgacgaactggctacagtaccatgcctctcagcccgtgtgtataatatgaagaccaaatgatagaactgtactgttttctgggccagtgagccagaaattgattaaggctttctttggtaggtaaatctagagtttatacagtgtacatgtacatagtaaagtatttttgattaacaatgtattttaataacatatctaaagtcatcatgaactggcttgtacatttttaaattcttactctggagcaacctactgtctaagcagttttgtaaatgtactggtaattgtacaatacttgcattccagagttaaaatgtttactgtaaatttttgttcttttaaagactacctgggacctgatttattgaaatttttctctttaaaaacattttctctcgttaattttcctttgtcatttcctttgttgtctacattaaatcacttgaatccattgaaagtgcttcaagggtaatcttgggtttctagcaccttatctatgatgtttcttttgcaattggaataatcacttggtcaccttgccccaagctttcccctctgaataaatacccattgaactctga

SEQ ID NO: 366735 - DNA, 3203 bp, Homo sapiens
ccagagtatcactcgttagtacagatgaaggaaaccaagcgccatgccgaccacgtgcggcggcacgggatcctccagttcctgcacatctaccacgccgtcaaggaccggcacaaggacgttctcaagtggggcgatgaggtggaatacatgttggtatcttttgatcatgaaaataaaaaagtccggttggtcctgtctggggagaaagttcttgaaactctgcaagagaagggggaaaggacaaacccaaaccatcctaccctttggagaccagagtatgggagttacatgattgaagggacaccaggacagccctacggaggaacaatgtccgagttcaatacagttgaggccaacatgcgaaaacgccggaaggaggctacttctatattagaagaaaatcaggctctttgcacaataacttcatttcccagtaccttaacaagaaatatccgacataggagaggagaaaaggttgtcatcaatgtaccaatatttaaggacaagaatacaccatctccatttatagaaacatttactgaggatgatgaagcttcaagggcttctaagccggatcatatttacatggatgccatgggatttggaatgggcaattgctgtctccaggtgacattccaagcctgcagtatatctgaggccagatacctttatgatcagttggctactatctgtccaattgttatggctttgagtgctgcatctcccttttaccgaggctatgtgtcagacattgattgtcgctggggagtgatttctgcatctgtagatgatagaactcgggaggagcgaggactggagccattgaagaacaataactataggatcagtaaatcccgatatgactcaatagacagctatttatctaagtgtggtgagaaatataatgacatcgacttgacgatagataaagagatctacgaacagctgttgcaggaaggcattgatcatctcctggcccagcatgttgctcatctctttattagagacccactgacactgtttgaagagaaaatacacctggatgatgctaatgagtctgaccattttgagaatattcagtccacaaattggcagacaatgagatttaagccccctcctccaaactcagacattggatggagagtagaatttcgacccatggaggtgcaattaacagactttgagaactctgcctatgtggtgtttgtggtactgctcaccagagtgatcctttcctacaaattggattttctcattccactgtcaaaggttgatgagaacatgaaggtagcacagaaaagagatgctgtcttgcagggaatgttttatttcaggaaagatatttgcaaaggtggcaatgcagtggtggatggttgtggcaaggcccagaacagcacggagctcgctgcagaggagtacaccctcatgagcatagacaccatcatcaatgggaaggaaggtgtgtttcctggactgatcccaattctgaactcttaccttgaaaacatggaagtggatgtggacaccagatgtagtattctgaactacctaaagctaattaagaagagagcatctggagaactaatgacagttgccagatggatgagggagtttatcgcaaaccatcctgactacaagcaagacagtgtcataactgatgaaatgaattatagccttattttgaagtgtaaccaaattgcaaatgaattatgtgaatgcccagagttacttggatcagcatttaggaaagtaaaatatagtggaagtaaaactgactcatccaactagacattctacagaaagaaaaatgcattattgacgaactggctacagtaccatgcctctcagcccgtgtgtataatatgaagaccaaatgatagaactgtactgttttctgggccagtgagccagaaattgattaaggctttctttggtaggtaaatctagagtttatacagtgtacatgtacatagtaaagtatttttgattaacaatgtattttaataacatatctaaagtcatcatgaactggcttgtacatttttaaattcttactctggagcaacctactgtctaagcagttttgtaaatgtactggtaattgtacaatacttgcattccagagttaaaatgtttactgtaaatttttgttcttttaaagactacctgggacctgatttattgaaatttttctctttaaaaacattttctctcgttaattttcctttgtcatttcctttgttgtctacattaaatcacttgaatccattgaaagtgcttcaagggtaatcttgggtttctagcaccttatctatgatgtttcttttgcaattggaataatcacttggtcaccttgccccaagctttcccctctgaataaatacccattgaactctgatggctgttatcaaaggaacttttctttgtttaaatttgctgatgcaggaattaagtttaaacacaactctatagaaagaaaggagattattacccagaattcacatgtagtgattattaaggacaatttttttttttaactaaaaaagttggcggcaggggtggggggtggcaatcatttttcttcctatacatacaaaggatattgtcaaaaatggcgttcttctcttgtggcctgttattctgattgctgctgtatacagttttgtcactctttagtttttagttaagcatactgatagactttcctctaaaagccattcactccagattttacctggggaatattctacatactgcttactttctctataaaactcatcaataaatcatgaaaggcactgagttttgtaaatcaggaccctaaatgtttaattgtaaataagtttcagataattattatagctttgcgttgaagtttgttgtttttttttctcaactagttaagtcaactgcttctgaaataactctgtattgtagattatgcagatctttacaggcataaatatttaaactgtaatatgctaacttgaagagattgcaataaagctgcttcagctaaccctgtttatgtttaaatactagggtttgttctatattttatacatgcattttggatgattaaagaatgcctggttttcgtttgcaatttgcttgtgtaaatcaggttgtaaaaaggcagataaattgaaatgtttgtggtatgaggaaataaaagaatggaattagctttcattcagaaa

SEQ ID NO: 366736 - DNA, 3760 bp, Homo sapiens
agtctataaaacctggagcgcaggatcgcgcccaggagcggcgagctagcggacgcaaagactgggcatgctccgcggcggcgcaggttttggtcacaagtaggaagaagccagtgcaccagaccggcaaagagaagcgggagccgccgcggcagcgcggccgtggggtccgccgccgccgcatcggagcgggaggaggagcagcggggagggcgaggccgccgggccgagagccgtcccgcctgctctcggtcttctgccttcgcctccgcgcggtgcgtcggacccagggtctgtcacctgggcgccaggggccgccgccggggagccggagcgggcaggaccctccctccgccgactgcggcccgagagcgcccccgcggggtggagcggcagccgccttctgcgggcggctgagtgtccgtctcgcgcccggagcgggcgaccgccgtcagcccggaggaggaggaggaggaggaggagggggcggccatggggctgctgtcccagggctcgccgctgagctgggaggaaaccaagcgccatgccgaccacgtgcggcggcacgggatcctccagttcctgcacatctaccacgccgtcaaggaccggcacaaggacgttctcaagtggggcgatgaggtggaatacatgttggtatcttttgatcatgaaaataaaaaagtccggttggtcctgtctggggagaaagttcttgaaactctgcaagagaagggggaaaggacaaacccaaaccatcctaccctttggagaccagagtatgggagttacatgattgaagggacaccaggacagccctacggaggaacaatgtccgagttcaatacagttgaggccaacatgcgaaaacgccggaaggaggctacttctatattagaagaaaatcaggctctttgcacaataacttcatttcccagattaggctgtcctgggttcacactgcccgaggtcaaacccaacccagtggaaggaggagcttccaagtccctcttctttccagatgaagcaataaacaagcaccctcgcttcagtaccttaacaagaaatatccgacataggagaggagaaaaggttgtcatcaatgtaccaatatttaaggacaagaatacaccatctccatttatagaaacatttactgaggatgatgaagcttcaagggcttctaagccggatcatatttacatggatgccatgggatttggaatgggcaattgctgtctccaggtgacattccaagcctgcagtatatctgaggccagatacctttatgatcagttggctactatctgtccaattgttatggctttgagtgctgcatctcccttttaccgaggctatgtgtcagacattgattgtcgctggggagtgatttctgcatctgtagatgatagaactcgggaggagcgaggactggagccattgaagaacaataactataggatcagtaaatcccgatatgactcaatagacagctatttatctaagtgtggtgagaaatataatgacatcgacttgacgatagataaagagatctacgaacagctgttgcaggaaggcattgatcatctcctggcccagcatgttgctcatctctttattagagacccactgacactgtttgaagagaaaatacacctggatgatgctaatgagtctgaccattttgagaatattcagtccacaaattggcagacaatgagatttaagccccctcctccaaactcagacattggatggagagtagaatttcgacccatggaggtgcaattaacagactttgagaactctgcctatgtggtgtttgtggtactgctcaccagagtgatcctttcctacaaattggattttctcattccactgtcaaaggttgatgagaacatgaaggtagcacagaaaagagatgctgtcttgcagggaatgttttatttcaggaaagatatttgcaaaggtggcaatgcagtggtggatggttgtggcaaggcccagaacagcacggagctcgctgcagaggagtacaccctcatgagcatagacaccatcatcaatgggaaggaaggtgtgtttcctggactgatcccaattctgaactcttaccttgaaaacatggaagtggatgagaactaatgacagttgccagatggatgagggagtttatcgcaaaccatcctgactacaagcaagacagtgtcataactgatgaaatgaattatagccttattttgaagtgtaaccaaattgcaaatgaattatgtgaatgcccagagttacttggatcagcatttaggaaagtaaaatatagtggaagtaaaactgactcatccaactagacattctacagaaagaaaaatgcattattgacgaactggctacagtaccatgcctctcagcccgtgtgtataatatgaagaccaaatgatagaactgtactgttttctgggccagtgagccagaaattgattaaggctttctttggtaggtaaatctagagtttatacagtgtacatgtacatagtaaagtatttttgattaacaatgtattttaataacatatctaaagtcatcatgaactggcttgtacatttttaaattcttactctggagcaacctactgtctaagcagttttgtaaatgtactggtaattgtacaatacttgcattccagagttaaaatgtttactgtaaatttttgttcttttaaagactacctgggacctgatttattgaaatttttctctttaaaaacattttctctcgttaattttcctttgtcatttcctttgttgtctacattaaatcacttgaatccattgaaagtgcttcaagggtaatcttgggtttctagcaccttatctatgatgtttcttttgcaattggaataatcacttggtcaccttgccccaagctttcccctctgaataaatacccattgaactctgatggctgttatcaaaggaacttttctttgtttaaatttgctgatgcaggaattaagtttaaacacaactctatagaaagaaaggagattattacccagaattcacatgtagtgattattaaggacaatttttttttttaactaaaaaagttggcggcaggggtggggggtggcaatcatttttcttcctatacatacaaaggatattgtcaaaaatggcgttcttctcttgtggcctgttattctgattgctgctgtatacagttttgtcactctttagtttttagttaagcatactgatagactttcctctaaaagccattcactccagattttacctggggaatattctacatactgcttactttctctataaaactcatcaataaatcatgaaaggcactgagttttgtaaatcaggaccctaaatgtttaattgtaaataagtttcagataattattatagctttgcgttgaagtttgttgtttttttttctcaactagttaagtcaactgcttctgaaataactctgtattgtagattatgcagatctttacaggcataaatatttaaactgtaatatgctaacttgaagagattgcaataaagctgcttcagctaaccctgtttatgtttaaatactagggtttgttctatattttatacatgcattttggatgattaaagaatgcctggttttcgtttgcaatttgcttgtgtaaatcaggttgtaaaaaggcagataaattgaaatgtttgtggtatgaggaaataaaagaatggaattagctttcattcagaaa

SEQ ID NO: 366737 - DNA, 3836 bp, Homo sapiens
agtctataaaacctggagcgcaggatcgcgcccaggagcggcgagctagcggacgcaaagactgggcatgctccgcggcggcgcaggttttggtcacaagtaggaagaagccagtgcaccagaccggcaaagagaagcgggagccgccgcggcagcgcggccgtggggtccgccgccgccgcatcggagcgggaggaggagcagcggggagggcgaggccgccgggccgagagccgtcccgcctgctctcggtcttctgccttcgcctccgcgcggtgcgtcggacccagggtctgtcacctgggcgccaggggccgccgccggggagccggagcgggcaggaccctccctccgccgactgcggcccgagagcgcccccgcggggtggagcggcagccgccttctgcgggcggctgagtgtccgtctcgcgcccggagcgggcgaccgccgtcagcccggaggaggaggaggaggaggaggagggggcggccatggggctgctgtcccagggctcgccgctgagctgggaggaaaccaagcgccatgccgaccacgtgcggcggcacgggatcctccagttcctgcacatctaccacgccgtcaaggaccggcacaaggacgttctcaagtggggcgatgaggtggaatacatgttggtatcttttgatcatgaaaataaaaaagtccggttggtcctgtctggggagaaagttcttgaaactctgcaagagaagggggaaaggacaaacccaaaccatcctaccctttggagaccagagtatgggagttacatgattgaagggacaccaggacagccctacggaggaacaatgtccgagttcaatacagttgaggccaacatgcgaaaacgccggaaggaggctacttctatattagaagaaaatcaggctctttgcacaataacttcatttcccagattaggctgtcctgggttcacactgcccgaggtcaaacccaacccagtggaaggaggagcttccaagtccctcttctttccagatgaagcaataaacaagcaccctcgcttcagtaccttaacaagaaatatccgacataggagaggagaaaaggttgtcatcaatgtaccaatatttaaggacaagaatacaccatctccatttatagaaacatttactgaggatgatgaagcttcaagggcttctaagccggatcatatttacatggatgccatgggatttggaatgggcaattgctgtctccaggtgacattccaagcctgcagtatatctgaggccagatacctttatgatcagttggctactatctgtccaattgttatggctttgagtgctgcatctcccttttaccgaggctatgtgtcagacattgattgtcgctggggagtgatttctgcatctgtagatgatagaactcgggaggagcgaggactggagccattgaagaacaataactataggatcagtaaatcccgatatgactcaatagacagctatttatctaagtgtggtgagaaatataatgacatcgacttgacgatagataaagagatctacgaacagctgttgcaggaaggcattgatcatctcctggcccagcatgttgctcatctctttattagagacccactgacactgtttgaagagaaaatacacctggatgatgctaatgagtctgaccattttgagaatattcagtccacaaattggcagacaatgagatttaagccccctcctccaaactcagacattggatggagagtagaatttcgacccatggaggtgcaattaacagactttgagaactctgcctatgtggtgtttgtggtactgctcaccagagtgatcctttcctacaaattggattttctcattccactgtcaaaggttgatgagaacatgaaggtagcacagaaaagagatgctgtcttgcagggaatgttttatttcaggaaagatatttgcaaaggtggcaatgcagtggtggatggttgtggcaaggcccagaacagcacggagctcgctgcagaggagtacaccctcatgagcatagacaccatcatcaatgggaaggaaggtgtgtttcctggactgatcccaattctgaactcttaccttgaaaacatggaagtggatgtggacaccagatgtagtattctgaactacctaaagctaattaagaagagagcatctggagaactaatgacagttgccagatggatgagggagtttatcgcaaaccatcctgactacaagcaagacagtgtcataactgatgaaatgaattatagccttattttgaagtgtaaccaaattgcaaatgaattatgtgaatgcccagagttacttggatcagcatttaggaaagtaaaatatagtggaagtaaaactgactcatccaactagacattctacagaaagaaaaatgcattattgacgaactggctacagtaccatgcctctcagcccgtgtgtataatatgaagaccaaatgatagaactgtactgttttctgggccagtgagccagaaattgattaaggctttctttggtaggtaaatctagagtttatacagtgtacatgtacatagtaaagtatttttgattaacaatgtattttaataacatatctaaagtcatcatgaactggcttgtacatttttaaattcttactctggagcaacctactgtctaagcagttttgtaaatgtactggtaattgtacaatacttgcattccagagttaaaatgtttactgtaaatttttgttcttttaaagactacctgggacctgatttattgaaatttttctctttaaaaacattttctctcgttaattttcctttgtcatttcctttgttgtctacattaaatcacttgaatccattgaaagtgcttcaagggtaatcttgggtttctagcaccttatctatgatgtttcttttgcaattggaataatcacttggtcaccttgccccaagctttcccctctgaataaatacccattgaactctgatggctgttatcaaaggaacttttctttgtttaaatttgctgatgcaggaattaagtttaaacacaactctatagaaagaaaggagattattacccagaattcacatgtagtgattattaaggacaatttttttttttaactaaaaaagttggcggcaggggtggggggtggcaatcatttttcttcctatacatacaaaggatattgtcaaaaatggcgttcttctcttgtggcctgttattctgattgctgctgtatacagttttgtcactctttagtttttagttaagcatactgatagactttcctctaaaagccattcactccagattttacctggggaatattctacatactgcttactttctctataaaactcatcaataaatcatgaaaggcactgagttttgtaaatcaggaccctaaatgtttaattgtaaataagtttcagataattattatagctttgcgttgaagtttgttgtttttttttctcaactagttaagtcaactgcttctgaaataactctgtattgtagattatgcagatctttacaggcataaatatttaaactgtaatatgctaacttgaagagattgcaataaagctgcttcagctaaaaaaaaaaaaaaaaaaaaaacttttgggggcgctggcccggaaaaggttttaaaccttgcgttggggcggccccgtggtatgtaaccgcgccacgacggttccaggacccggccgaccggtggttccccaaaaaaaccgcggccccgttcgacacccggtcgcgcctgggtcacacagccggcaacacccccgcggggg

SEQ ID NO: 366738 - DNA, 2029 bp, Homo sapiens
agtctataaaacctggagcgcaggatcgcgcccaggagcggcgagctagcggacgcaaagactgggcatgctccgcggcggcgcaggttttggtcacaagtaggaagaagccagtgcaccagaccggcaaagagaagcgggagccgccgcggcagcgcggccgtggggtccgccgccgccgcatcggagcgggaggaggagcagcggggagggcgaggccgccgggccgagagccgtcccgcctgctctcggtcttctgccttcgcctccgcgcggtgcgtcggacccagggtctgtcacctgggcgccaggggccgccgccggggagccggagcgggcaggaccctccctccgccgactgcggcccgagagcgcccccgcggggtggagcggcagccgccttctgcgggcggctgagtgtccgtctcgcgcccggagcgggcgaccgccgtcagcccggaggaggaggaggaggaggaggagggggcggccatggggctgctgtcccagggctcgccgctgagctgggaggaaaccaagcgccatgccgaccacgtgcggcggcacgggatcctccagttcctgcacatctaccacgccgtcaaggaccggcacaaggacgttctcaagtggggcgatgaggtggaatacatgttggtatcttttgatcatgaaaataaaaaagtccggttggtcctgtctggggagaaagttcttgaaactctgcaagagaagggggaaaggacaaacccaaaccatcctaccctttggagaccagagtatgggagttacatgattgaagggacaccaggacagccctacggaggaacaatgtccgagttcaatacagttgaggccaacatgcgaaaacgccggaaggaggctacttctatattagaagaaaatcaggctctttgcacaataacttcatttcccagattaggctgtcctgggttcacactgcccgaggtcaaacccaacccagtggaaggaggagcttccaagtccctcttctttccagatgaagcaataaacaagcaccctcgcttcagtaccttaacaagaaatatccgacataggagaggagaaaaggttgtcatcaatgtaccaatatttaaggacaagaatacaccatctccatttatagaaacatttactgaggatgatgaagcttcaagggcttctaagccggatcatatttacatggatgccatgggatttggaatgggcaattgctgtctccaggtgacattccaagcctgcagtatatctgaggccagatacctttatgatcagttggctactatctgtccaattgttatggctttgagtgctgcatctcccttttaccgaggctatgtgtcagacattgattgtcgctggggagtgatttctgcatctgtagatgatagaactcgggaggagcgaggactggagccattgaagaacaataactataggatcagtaaatcccgatatgactcaatagacagctatttatctaagtgtggtgagaaatataatgacatcgacttgacgatagataaagagatctacgaacagctgttgcaggaaggcattgatcatctcctggcccagcatgttgctcatctctttattagagacccactgacactgtttgaagagaaaatacacctggatgatgctaatgagtctgaccattttgagaatattcagtccacaaattggcagacaatgagatttaagccccctcctccaaactcagacattggatggagagtagaatttcgacccatggaggtgcaattaacagactttgagaactctgcctatgtggtgtttgtggtactgctcaccagagtgatcctttcctacaaattggattttctcattccactgtcaaaggtaaggatatgtttctttatggtgatgggtatagatctatctgtagatatatttatttatatatgctatttatttcccacctaatttcatttgaaattgtttaccctttgcaataaaatgtttctccatcaaccctattctt

SEQ ID NO: 366739 - DNA, 112 bp, Homo sapiens
gttgtggcaaggcccagaacagcacggagctcgctgcagaggagtacaccctcatgagcatagacaccatcatcaatgggaaggtaggagggtggccctgtacagtacccct

SEQ ID NO: 366740 - DNA, 466 bp, Homo sapiens
gcctcagacatttccaagaaatgttcttcctaagtagctttatgctgctatggcaatacagggtgacttccttggatttagcagtagtcaatggaaaaaaaaaaaaagcgaggactgctcctgttaattgcatcctgctgtctagattgcctgtcactctcttctctacataccccaggccatttgttgcagccaagctactagatttctcttcctttccttacatatagaaaactggttaaatgtgtcctattctgagaatttgccctgagtagagcatttctgaatttcagtccacaaaaaacacatgccagaatcatactaggattcaaaaccccagccctgccacttagtggctgtgtgagttttggcaaattgctttaattgttctgagcttattttcacatctgtaaagtgagactgaaagaggttaataaaagccacttcaaagagctgtgaagtggat

SEQ ID NO: 366741 - DNA, 1557 bp, Homo sapiens
cagcactgggaacgtgtctgcgtcccttactgaaccgtaagctccgggaggacaacacggggctgtcgttggtcactgctgtgtcaccagcacggactcgcacaggaccgggaagagaggaagcgcgtggggggaataggtgtggaataaatgaatgaatgaggaaactgaagccaagtcaatgtctgagttggattcaaacttaagtctctccttactgagaggagggaccaagttggatctcctgcgatctgttctccactgagccctgccaggattctgggcacacagaagcgctcagtaagggctttgaaacttaacagtttgggagccagatcctcaggccacatctctctcctcccacgacctccgcggtcctccagaaccatagagagttgtacagagatcgccctgctctatgctctactctcctggggagcggggccagagaggccggaagtgctgcgagccctgggccacgctggccgtgctggcagtgggccgcctcgatccctctgcagtctttcccttgaggctccaagaccagcaggtgaggcctcgcggcgctgaaaccgtgaggcccggaccacaggctccagatggaccctgggaaggacaaagagggggtgccccagccctcagggccgccagcaaggaagaaatttgtgatacccctcgacgaggatgaggtccctcctggagtggccaagcccttattccgatctacacagagccttcccactgtggacacctcggcccaggcggcccctcagacctacgccgaatatgccatctcacagcctctggaaggggctggggccacgtgccccacagggtcagagcccctggcaggagagacgcccaaccaggccctgaaacccggggcaaaatccaacagcatcattgtgagccctcggcagaggggcaatcccgtactgaagttcgtgcgcaatgtgccctgggaatttggcgacgtaattcccgactatgtgctgggccagagcacctgtgccctgttcctcagcctccgctaccacaacctgcacccagactacatccatgggcggctgcagagcctggggaagaacttcgccttgcgggtcctgcttgtccaggtggatgtgaaagatccccagcaggccctcaaggagctggctaagatgtgtatcctggccgactgcacattgatcctcgcctggagccccgaggaagctgggcggtacctggagacctacaaggcctatgagcagaaaccagcggacctcctgatggagaagctagagcaggacttcgtctcccgggtgactgaatgtctgaccaccgtgaagtcagtcaacaaaacggacagtcagaccctcctgaccacatttggatctctggaacagctcatcgccgcatcaagagaagatctggccttatgcccaggcctgggccctcagaaagcccggaggctgtttgatgtcctgcacgagcccttcttgaaagtaccctgatgaccccagctgccaaggaaacccccagtgtaataataaatcgtcctcccaggccaggctcctg

SEQ ID NO: 366742 - DNA, 1388 bp, Homo sapiens
cagcactgggaacgtgtctgcgtcccttactgaaccgtaagctccgggaggacaacacggggctgtcgttggtcactgctgtgtcaccagcacggactcgcacaggaccgggaagagaggaagcgcgtggggggaataggtgtggaataaatgaatgaatgaggaaactgaagccaagtcaatgtctgagttggattcaaacttaagtctctccttactgagaggagggaccaagttggatctcctgcgatctgttctccactgagccctgccaggattctgggcacacagaagcgctcagtaagggctttgaaacttaacagtttgggagccagatcctcaggccacatctctctcctcccacgacctccgcggtcctccagaaccatagagagttgtacagagatcgccctgctctatgctctactctcctggggagcggggccagagaggccggaagtgctgcgagccctgggccacgctggccgtgctggcagtgggccgcctcgatccctctgcagtctttcccttgaggctccaagaccagcaggctccagatggaccctgggaaggacaaagagggggtgccccagccctcagggccgccagcaaggaagaaatttgtgatacccctcgacgaggatgaggtccctcctggagtggccaagcccttattccgatctacacagagccttcccactgtggacacctcggcccaggcggcccctcagacctacgccgaatatgccatctcacagcctctggaaggggctggggccacgtgccccacagggtcagagcccctggcaggagagacgcccaaccaggccctgaaacccggggcaaaatccaacagcatcattgtgagccctcggcagaggggcaatcccgtactgaagttcgtgcgcaatgtgccctgggaatttggcgacgtaattcccgactatgtgctgggccagagcacctgtgccctgttcctcagcctccgctaccacaacctgcacccagactacatccatgggcggctgcagagcctggggaagaacttcgccttgcgggtcctgcttgtccaggtggatgtgaaagatccccagcaggccctcaaggagctggctaagatgtgtatcctggccgactgcacattgatcctcgcctggagccccgaggaagctgggcggtacctggagacctacaaggcctatgagcagaaaccagcggacctcctgatggagaagctagagcaggacttcgtctcccgggtgaggccacctcacctcccatccctgcctgggcctccccgcagctcctgggtggttgagcttcagttccaattttaaggcgactgtccattcatccctgggcctcgtctttcctggcccatcccaccg

SEQ ID NO: 366743 - DNA, 1033 bp, Homo sapiens
tgcttgaacccgggaggtggaggttgcaatgagccaagatagtgccactacactccagtctgggtgacagagcaagactgtctcaaaaaaagaaaaagaaaggggagaggaactcacagggcctcagatgtcctctgctcaccccaaccagtcccctgcaaactccctttctccccacaggccaagcccttattccgatctacacagagccttcccactgtggacacctcggcccaggcggcccctcagacctacgccgaatatgccatctcacagcctctggaaggggctggggccacgtgccccacagggtcagagcccctggcaggagagacgcccaaccaggccctgaaacccggggcaaaatccaacagcatcattgtgagccctcggcagaggggcaatcccgtactgaagttcgtgcgcaatgtgccctgggaatttggcgacgtaattcccgactatgtgctgggccagagcacctgtgccctgttcctcagcctccgctaccacaacctgcacccagactacatccatgggcggctgcagagcctggggaagaacttcgccttgcgggtcctgcttgtccaggtggatgtgaaagatccccagcaggccctcaaggagctggctaagatgtgtatcctggccgactgcacattgatcctcgcctggagccccgaggaagctgggcggtacctggagacctacaaggcctatgagcagaaaccagcggacctcctgatggagaagctagagcaggacttcgtctcccgggtgactgaatgtctgaccaccgtgaagtcagtcaacaaaacggacagtcagaccctcctgaccacatttggatctctggaacagctcatcgccgcatcaagagaagatctggccttatgcccaggcctgggccctcagaaagcccggaggctgtttgatgtcctgcacgagcccttcttgaaagtaccctgatgaccccagctgccaaggaaacccccagtgtaataataaatcgtcctcccaggccaggctcctg

SEQ ID NO: 366744 - DNA, 938 bp, Homo sapiens
ggcggggcgagccgaaggtggaggtcaaaggggcgtggcgttacagagcctctagcgctgggtgttggggacctgacgctatggagctctcggagttttgtgggggacggctgtgagtggggggttcctgctgcgggatgagaacgtagacgccagtggctcactcgctcctggcaccttccctttcaggctccagatggaccctgggaaggacaaagagggggtgccccagccctcagggccgccagcaaggaagaaatttgtgatacccctcgacgaggatgaggtccctcctggagtgaggggcaatcccgtactgaagttcgtgcgcaatgtgccctgggaatttggcgacgtaattcccgactatgtgctgggccagagcacctgtgccctgttcctcagcctccgctaccacaacctgcacccagactacatccatgggcggctgcagagcctggggaagaacttcgccttgcgggtcctgcttgtccaggtggatgtgaaagatccccagcaggccctcaaggagctggctaagatgtgtatcctggccgactgcacattgatcctcgcctggagccccgaggaagctgggcggtacctggagacctacaaggcctatgagcagaaaccagcggacctcctgatggagaagctagagcaggacttcgtctcccgggtgactgaatgtctgaccaccgtgaagtcagtcaacaaaacggacagtcagaccctcctgaccacatttggatctctggaacagctcatcgccgcatcaagagaagatctggccttatgcccaggcctgggccctcagaaagcccggaggctgtttgatgtcctgcacgagcccttcttgaaagtaccctgatgaccccagctgccaaggaaacccccagtgtaataataaatcgtcctcccaggccaggctcctg

SEQ ID NO: 366745 - DNA, 1287 bp, Homo sapiens
ggcggggcgagccgaaggtggaggtcaaaggggcgtggcgttacagagcctctagcgctgggtgttggggacctgacgctatggagctctcggagttttgtgggggacggctgtgagtggggggttcctgctgcgggatgagaacgtagacgccagtggctcactcgctcctggcaccttccctttcaggctccagatggaccctgggaaggacaaagagggggtgccccagccctcagggccgccagcaaggaagaaatttgtgatacccctcgacgaggatgaggtccctcctggagtggccaagcccttattccgatctacacagagccttcccactgtggacacctcggcccaggcggcccctcagacctacgccgaatatgccatctcacagcctctggaaggggctggggccacgtgccccacagggtcagagcccctggcaggagagacgcccaaccaggccctgaaacccggggcaaaatccaacagcatcattgtgagccctcggcagaggggcaatcccgtactgaagttcgtgcgcaatgtgccctgggaatttggcgacgtaattcccgactatgtgctgggccagagcacctgtgccctgttcctcagcctccgctaccacaacctgcacccagactacatccatgggcggctgcagagcctggggaagaacttcgccttgcgggtcctgcttgtccaggtggatgtgaaagatccccagcaggccctcaaggagctggctaagatgtgtatcctggccgactgcacattgatcctcgcctggagccccgaggaagctgggcggtacctggagacctacaaggcctatgagcagaaaccagcggacctcctgatggagaagctagagcaggacttcgtctcccgggtgactgaatgtctgaccaccgtgaagtcagtcaacaaaacggacagtcagaccctcctgaccacatttggatctctggaacagctcatcgccgcatcaagagaagatctggccttatgcccaggcctgggccctcagaaagtaagagctctgggaaagaacccaaggagttgggggaaggagagagccccaaataaacacaacctgagaccccaaagttttaaggtgaaaaaagaaccaaagaccagacacagtggcttccgcctgtaatcccaacattttgggaggccaaggcgggaggactgcttgaggccagaagttggagaccagcctgggcaagtggacacctcatttttactaaaaataaaaaaaactagctgggaaaaatg

SEQ ID NO: 366746 - DNA, 1183 bp, Homo sapiens
ggcggggcgagccgaaggtggaggtcaaaggggcgtggcgttacagagcctctagcgctgggtgttggggacctgacgctatggagctctcggagttttgtgggggacggctgtgagtggggggttcctgctgcgggatgagaacgtagacgccagtggctcactcgctcctggcaccttccctttcaggctccagatggaccctgggaaggacaaagagggggtgccccagccctcagggccgccagcaaggaagaaatttgtgatacccctcgacgaggatgaggtccctcctggagtggccaagcccttattccgatctacacagagccttcccactgtggacacctcggcccaggcggcccctcagacctacgccgaatatgccatctcacagcctctggaaggggctggggccacgtgccccacagggtcagagcccctggcaggagagacgcccaaccaggccctgaaacccggggcaaaatccaacagcatcattgtgagccctcggcagaggggcaatcccgtactgaagttcgtgcgcaatgtgccctgggaatttggcgacgtaattcccgactatgtgctgggccagagcacctgtgccctgttcctcagcctccgctaccacaacctgcacccagactacatccatgggcggctgcagagcctggggaagaacttcgccttgcgggtcctgcttgtccaggtggatgtgaaagatccccagcaggccctcaaggagctggctaagatgtgtatcctggccgactgcacattgatcctcgcctggagccccgaggaagctgggcggtacctggagacctacaaggcctatgagcagaaaccagcggacctcctgatggagaagctagagcaggacttcgtctcccgggtgactgaatgtctgaccaccgtgaagtcagtcaacaaaacggacagtcagaccctcctgaccacatttggatctctggaacagctcatcgccgcatcaagagaagatctggccttatgcccaggcctgggccctcagaaagtaagagctctgggaaagaacccaaggagttgggggaaggagagagccccaaataaacacaacctgagaccccaaagttttaaggtgaaaaaagaaccaaagacctgagaagccaggagacctgagcaggagacctgagcagcc

SEQ ID NO: 366747 - DNA, 1276 bp, Homo sapiens
ggcggggcgagccgaaggtggaggtcaaaggggcgtggcgttacagagcctctagcgctgggtgttggggacctgacgctatggagctctcggagttttgtgggggacggctgtgagtggggggttcctgctgcgggatgagaacgtagacgccagtggctcactcgctcctggcaccttccctttcaggctccagatggaccctgggaaggacaaagagggggtgccccagccctcagggccgccagcaaggaagaaatttgtgatacccctcgacgaggatgaggtccctcctggagtggccaagcccttattccgatctacacagagccttcccactgtggacacctcggcccaggcggcccctcagacctacgccgaatatgccatctcacagcctctggaaggggctggggccacgtgccccacagggtcagagcccctggcaggagagacgcccaaccaggccctgaaacccggggcaaaatccaacagcatcattgtgagccctcggcagaggggcaatcccgtactgaagttcgtgcgcaatgtgccctgggaatttggcgacgtaattcccgactatgtgctgggccagagcacctgtgccctgttcctcagcctccgctaccacaacctgcacccagactacatccatgggcggctgcagagcctggggaagaacttcgccttgcgggtcctgcttgtccaggtggatgtgaaagatccccagcaggccctcaaggagctggctaagatgtgtatcctggccgactgcacattgatcctcgcctggagccccgaggaagctgggcggtacctggagacctacaaggcctatgagcagaaaccagcggacctcctgatggagaagctagagcaggacttcgtctcccgggtgactgaatgtctgaccaccgtgaagtcagtcaacaaaacggacagtcagaccctcctgaccacatttggatctctggggacctgagaggcgagaccactcgcgcccctgggttgcaaagttggggtctttattggcctccgggattctgctcctggcggtttctccaggctggtgatgggcaagccgggtgtaccaagtccatgatgcacatgaggagcatttgtagccatcactgaatcacctcatgactagcgggacaagcctcaaattcaccgcaggatttccggtaggttggattgtggggttggtgtttgcactccaaagaggtgctgtgatttccctgtgtctgtctgtctttctggcttgtcctgttcg

SEQ ID NO: 366748 - DNA, 1215 bp, Homo sapiens
ggcggggcgagccgaaggtggaggtcaaaggggcgtggcgttacagagcctctagcgctgggtgttggggacctgacgctatggagctctcggagttttgtgggggacggctgtgagtggggggttcctgctgcgggatgagaacgtagacgccagtggctcactcgctcctggcaccttccctttcaggctccagatggaccctgggaaggacaaagagggggtgccccagccctcagggccgccagcaaggaagaaatttgtgatacccctcgacgaggatgaggtccctcctggagtggccaagcccttattccgatctacacagagccttcccactgtggacacctcggcccaggcggcccctcagacctacgccgaatatgccatctcacagcctctggaaggggctggggccacgtgccccacagggtcagagcccctggcaggagagacgcccaaccaggccctgaaacccggggcaaaatccaacagcatcattgtgagccctcggcagaggggcaatcccgtactgaagttcgtgcgcaatgtgccctgggaatttggcgacgtaattcccgactatgtgctgggccagagcacctgtgccctgttcctcagcctccgctaccacaacctgcacccagactacatccatgggcggctgcagagcctggggaagaacttcgccttgcgggtcctgcttgtccaggtggatgtgaaagatccccagcaggccctcaaggagctggctaagatgtgtatcctggccgactgcacattgatcctcgcctggagccccgaggaagctgggcggtacctggagacctacaaggcctatgagcagaaaccagcggacctcctgatggagaagctagagcaggacttcgtctcccggtctctggaacagctcatcgccgcatcaagagaagatctggccttatgcccaggcctgggccctcagaaagtaagagctctgggaaagaacccaaggagttgggggaaggagagagccccaaataaacacaacctgagaccccaaagttttaaggtgaaaaaagaaccaaagaccagacacagtggcttccgcctgtaatcccaacattttgggaggccaaggcgggaggactgcttgaggccagaagttggagaccagcctgggcaagtggacacctcatttttactaaaaataaaaaaaactagctgggaaaaatg

SEQ ID NO: 366749 - DNA, 1022 bp, Homo sapiens
ggcggggcgagccgaaggtggaggtcaaaggggcgtggcgttacagagcctctagcgctgggtgttggggacctgacgctatggagctctcggagttttgtgggggacggctgtgagtggggggttcctgctgcgggatgagaacgtagacgccagtggctcactcgctcctggcaccttccctttcaggctccagatggaccctgggaaggacaaagagggggtgccccagccctcagggccgccagcaaggaagaaatttgtgatacccctcgacgaggatgaggtccctcctggagtggccaagcccttattccgatctacacagagccttcccactgtggacacctcggcccaggcggcccctcagacctacgccgaatatgccatctcacagcctctggaaggggctggggccacgtgccccacagggtcagagcccctggcaggagagacgcccaaccaggccctgaaacccggggcaaaatccaacagcatcattgtgagccctcggcagaggggcaatcccgtactgaagttcgtgcgcaatgtgccctgggaatttggcgacgtaattcccgactatgtgctgggccagagcacctgtgccctgttcctcagcctccgctaccacaacctgcacccagactacatccatgggcggctgcagagcctggggaagaacttcgccttgcgggtcctgcttgtccaggtggatgtgaaagatccccagcaggccctcaaggagctggctaagatgtgtatcctggccgactgcacattgatcctcgcctggagccccgaggaagctgggcggtacctggagacctacaaggcctatgagcagaaaccagcggacctcctgatggagaagctagagcaggacttcgtctcccggtctctggaacagctcatcgccgcatcaagagaagatctggccttatgcccaggcctgggccctcagaaacccggagggagaaaaaaatgaggaaccagtcattaaaggagctgtttcctgggta

SEQ ID NO: 366750 - DNA, 2537 bp, Homo sapiens
cagcactgggaacgtgtctgcgtcccttactgaaccgtaagctccgggaggacaacacggggctgtcgttggtcactgctgtgtcaccagcacggactcgcacaggaccgggaagagaggaagcgcgtggggggaataggtgtggaataaatgaatgaatgaggaaactgaagccaagtcaatgtctgagttggattcaaacttaagtctctccttactgagaggagggaccaagttggatctcctgcgatctgttctccactgagccctgccaggattctgggcacacagaagcgctcagtaagggctttgaaacttaacagtttgggagccagatcctcaggccacatctctctcctcccacgacctccgcggtcctccagaaccatagagagttgtacagagatcgccctgctctatgctctactctcctggggagcggggccagagaggccggaagtgctgcgagccctgggccacgctggccgtgctggcagtgggccgcctcgatccctctgcagtctttcccttgaggctccaagaccagcaggctccagatggaccctgggaaggacaaagagggggtgccccagccctcagggccgccagcaaggaagaaatttgtgatacccctcgacgaggatgaggtccctcctggagtggccaagcccttattccgatctacacagagccttcccactgtggacacctcggcccaggcggcccctcagacctacgccgaatatgccatctcacagcctctggaaggggctggggccacgtgccccacagggtcagagcccctggcaggagagacgcccaaccaggccctgaaacccggggcaaaatccaacagcatcattgtgagccctcggcagaggggcaatcccgtactgaagttcgtgcgcaatgtgccctgggaatttggcgacgtaattcccgactatgtgctgggccagagcacctgtgccctgttcctcagcctccgctaccacaacctgcacccagactacatccatgggcggctgcagagcctggggaagaacttcgccttgcgggtcctgcttgtccaggtggatgtgaaagatccccagcaggccctcaaggagctggctaagatgtgtatcctggccgactgcacattgatcctcgcctggaggtgagatgagggcttccctgcctcattcaggctccacctgggattggtccctgctcccccatcccaccctgcccagcccttcccttctccaattcctgtgtgggcctggtgcaggcactgcctctctctggccttcagtttcctcatctgtaaaacaaggtcttaatttttttttttttttttttgatacagagcctcactctgtcccctaggctgaagtgcagtggcacgatctcggctctgccttgggggttcaagcaattctgcctcagcctcccaagtagctgggattacaggtgtgcaccaccacgcccagctaatttttttgtatttttagtagggacgggttttgccatgttggccaggctggtcttgaaatcctgacctcaggtgatcctcccgccttaccctcccaaagtgctgggattacaggcgtgagccactgtgcccggttggaagctgaacatttcatgaggttggcttcttgctgcagcgggaaaataagcagtgtttctggttttcctcctgtcaaacccagtacaaacactttgtgtgctgacttcccttccaaaatagctaacatttcttcagcagtgccaggcgtggcttttggcacttacagagcattccagagtattctctgatcttcaaagtcataccatcctccccactttattattatttttttgagacagggtcttgctcttttgctgaggctggagtgcagtggtgctatcacaggttactgaagcctcaacttgacaggctcaggcagtcctcctgcctcagcctcccgagcagctgagactaaaggcacgcgccaccacacctggctaatttttaattttttgtggagacaacaccttgctatgttgtcccggctggtcttgaactcctgacctcaagtgatctgctcgcctcggcctcccaaaggatgggattacaggcaccagccactgcgcctggctggcctctggtttttaataaaacatgactagagtgactccatcttaaagtgagtagctaggcacttacaaggttcatgcttatggcctgaaaataaccacatcccaggctgaccaccaattataattacagaatatttatggccatacagaacatgttccaccaagcctgcagaatgtccaaatgtcctaagaatgcagcccccattacttaaatataacataaatgagcaagcttaggttgcaggattaatggtcgtggataacaccaatagcccctacctttagtgagcttatctgcacactccaagtttaactatagttccttatagtttcttataagtagaaatactaacaaagggctgtgggtttctccccctgctttctgaggacactctactctgtaaaggagt

SEQ ID NO: 366751 - DNA, 1051 bp, Homo sapiens
tggcgcgatctcggctcactgcaacctctgcctcccgggttcaagcgattctcctgcctcagcctccacagtagttgggattacaggatcacgtgataaggcactagcagatgtggttggaatccttgctgtgctgaatcctggctgtgtgaccccaagctccagatggaccctgggaaggacaaagagggggtgccccagccctcagggccgccagcaaggaagaaatttgtgatacccctcgacgaggatgaggtccctcctggagtggccaagcccttattccgatctacacagagccttcccactgtggacacctcggcccaggcggcccctcagacctacgccgaatatgccatctcacagcctctggaaggggctggggccacgtgccccacagggtcagagcccctggcaggagagacgcccaaccaggccctgaaacccggggcaaaatccaacagcatcattgtgagccctcggcagaggggcaatcccgtactgaagttcgtgcgcaatgtgccctgggaatttggcgacgtaattcccgactatgtgctgggccagagcacctgtgccctgttcctcagcctccgctaccacaacctgcacccagactacatccatgggcggctgcagagcctggggaagaacttcgccttgcgggtcctgcttgtccaggtggatgtgaaagatccccagcaggccctcaaggagctggctaagatgtgtatcctggccgactgcacattgatcctcgcctggagccccgaggaagctgggcggtacctggagacctacaaggcctatgagcagaaaccagcggacctcctgatggagaagctagagcaggacttcgtctcccggtctctggaacagctcatcgccgcatcaagagaagatctggccttatgcccaggcctgggccctcagaaagcccggaggctgtttgatgtcctgcacgagcccttcttgaaagtaccctgatgaccccagctgccaaggaaacccccagtgtaataataaatcgtcctcccaggccaggctcctg

SEQ ID NO: 366752 - DNA, 982 bp, Homo sapiens
ggcggggcgagccgaaggtggaggtcaaaggggcgtggcgttacagagcctctagcgctgggtgttggggacctgacgctatggagctctcggagttttgtgggggacggctgtgagtggggggttcctgctgcgggatgagaacgtagacgccagtggctcactcgctcctggcaccttccctttcaggctccagatggaccctgggaaggacaaagagggggtgccccagccctcagggccgccagcaaggaagaaatttgtgatacccctcgacgaggatgaggtccctcctggagtggccaagcccttattccgatctacacagagccttcccactgtggacacctcggcccaggcggcccctcagacctacgccgaatatgccatctcacagcctctggaaggggctggggccacgtgccccacagggtcagagcccctggcaggagagacgcccaaccaggccctgaaacccggggcaaaatccaacagcatcattgtgagccctcggcagaggggcaatcccgtactgaagttcgtgcgcaatgtgccctgggaatttggcgacgtaattcccgactatgtgctgggccagagcacctgtgccctgttcctcagcctccgctaccacaacctgcacccagactacatccatgggcggctgcagagcctggggaagaacttcgccttgcgggtcctgcttgtccaggtggatgtgaaagatccccagcaggccctcaaggagctggctaagatgtgtatcctggccgactgcacattgatcctcgcctggagtctctggaacagctcatcgccgcatcaagagaagatctggccttatgcccaggcctgggccctcagaaagcccggaggctgtttgatgtcctgcacgagcccttcttgaaagtaccctgatgaccccagctgccaaggaaacccccagtgtaataataaatcgtcctcccaggccaggctcctg

SEQ ID NO: 366753 - DNA, 515 bp, Homo sapiens
tgagatggagtctcactctcttgcccaggctggagtgcaatgacatgatctcggctcactgcaacctctgcctcccaggttcaagtgattctcctgcctgagcctcctgagtagctgggactacaggtgactgaatgtctgaccaccgtgaagtcagtcaacaaaacggacagtcagaccctcctgaccacatttggatctctggaacagctcatcgccgcatcaagagaagatctggccttatgcccaggcctgggccctcagaaagtaagagctctgggaaagaacccaaggagttgggggaaggagagagccccaaataaacacaacctgagaccccaaagttttaaggtgaaaaaagaaccaaagaccagacacagtggcttccgcctgtaatcccaacattttgggaggccaaggcgggaggactgcttgaggccagaagttggagaccagcctgggcaagtggacacctcatttttactaaaaataaaaaaaactagctgggaaaaatg

SEQ ID NO: 366754 - DNA, 272 bp, Homo sapiens
tagtagaaacgaggtttcaccatgttggccaggctggtctcgaactcctgacctcagatgatctgcctgcctcatcatcccaaagtgctgggattacaggcgtgagccaccgcgcccggcctagtattggcaattcttatgactgaccataatgaagcaaatctataatctgatacctcacctcccggctgccctgtatcctgttatcccagccccgaggaagctgggcggtacctggagacctacaaggcctatgagcagaaaccagcgga

SEQ ID NO: 366755 - DNA, 1600 bp, Homo sapiens
cagcactgggaacgtgtctgcgtcccttactgaaccgtaagctccgggaggacaacacggggctgtcgttggtcactgctgtgtcaccagcacggactcgcacaggaccgggaagagaggaagcgcgtggggggaataggtgtggaataaatgaatgaatgaggaaactgaagccaagtcaatgtctgagttggattcaaacttaagtctctccttactgagaggagggaccaagttggatctcctgcgatctgttctccactgagccctgccaggattctgggcacacagaagcgctcagtaagggctttgaaacttaacagtttgggagccagatcctcaggccacatctctctcctcccacgacctccgcggtcctccagaaccatagagagttgtacagagatcgccctgctctatgctctactctcctggggagcggggccagagaggccggaagtgctgcgagccctgggccacgctggccgtgctggcagtgggccgcctcgatccctctgcagtctttcccttgaggctccaagaccagcaggtgaggcctcgcggcgctgaaaccgtgaggcccggaccacaggctccagatggaccctgggaaggacaaagagggggtgccccagccctcagggccgccagcaaggaagaaatttgtgatacccctcgacgaggatgaggtccctcctggagtggccaagcccttattccgatctacacagagccttcccactgtggacacctcggcccaggcggcccctcagacctacgccgaatatgccatctcacagcctctggaaggggctggggccacgtgccccacagggtcagagcccctggcaggagagacgcccaaccaggccctgaaacccggggcaaaatccaacagcatcattgtgagccctcggcagaggggcaatcccgtactgaagttcgtgcgcaatgtgccctgggaatttggcgacgtaattcccgactatgtgctgggccagagcacctgtgccctgttcctcagcctccgctaccacaacctgcacccagactacatccatgggcggctgcagagcctggggaagaacttcgccttgcgggtcctgcttgtccaggtggatgtgaaagatccccagcaggccctcaaggagctggctaagatgtgtatcctggccgactgcacattgatcctcgcctggagccccgaggaagctgggcggtacctggagacctacaaggcctatgagcagaaaccagcggacctcctgatggagaagctagagcaggacttcgtctcccgggtgactgaatgtctgaccaccgtgaagtcagtcaacaaaacggacagtcagaccctcctgaccacatttggatctctggaacagctcatcgccgcatcaagagaagatctggccttatgcccaggcctgggccctcagaaagcccggaggctgtttgatgtcctgcacgagcccttcttgaaagtaccctgatgaccccagctgccaaggaaacccccagtgtaataataaatcgtcctcccaggccaggctcctgctggctgcgctggtgcagtctctggggagggattctgggggtg

SEQ ID NO: 366756 - DNA, 1154 bp, Homo sapiens
ggcggggcgagccgaaggtggaggtcaaaggggcgtggcgttacagagcctctagcgctgggtgttggggacctgacgctatggagctctcggagttttgtgggggacggctgtgagtggggggttcctgctgcgggatgagaacgtagacgccagtggctcactcgctcctggcaccttccctttcaggctccagatggaccctgggaaggacaaagagggggtgccccagccctcagggccgccagcaaggaagaaatttgtgatacccctcgacgaggatgaggtccctcctggagtggccaagcccttattccgatctacacagagccttcccactgtggacacctcggcccaggcggcccctcagacctacgccgaatatgccatctcacagcctctggaaggggctggggccacgtgccccacagggtcagagcccctggcaggagagacgcccaaccaggccctgaaacccggggcaaaatccaacagcatcattgtgagccctcggcagaggggcaatcccgtactgaagttcgtgcgcaatgtgccctgggaatttggcgacgtaattcccgactatgtgctgggccagagcacctgtgccctgttcctcagcctccgctaccacaacctgcacccagactacatccatgggcggctgcagagcctggggaagaacttcgccttgcgggtcctgcttgtccaggtggatgtgaaagatccccagcaggccctcaaggagctggctaagatgtgtatcctggccgactgcacattgatcctcgcctggagccccgaggaagctgggcggtacctggagacctacaaggcctatgagcagaaaccagcggacctcctgatggagaagctagagcaggacttcgtctcccgggtgactgaatgtctgaccaccgtgaagtcagtcaacaaaacggacagtcagaccctcctgaccacatttggatctctggaacagctcatcgccgcatcaagagaagatctggccttatgcccaggcctgggccctcagaaagcccggaggctgtttgatgtcctgcacgagcccttcttgaaagtaccctgatgaccccagctgccaaggaaacccccagtgtaataataaatcgtcctcccaggccaggctcctg

SEQ ID NO: 366757 - DNA, 1515 bp, Homo sapiens
cagcactgggaacgtgtctgcgtcccttactgaaccgtaagctccgggaggacaacacggggctgtcgttggtcactgctgtgtcaccagcacggactcgcacaggaccgggaagagaggaagcgcgtggggggaataggtgtggaataaatgaatgaatgaggaaactgaagccaagtcaatgtctgagttggattcaaacttaagtctctccttactgagaggagggaccaagttggatctcctgcgatctgttctccactgagccctgccaggattctgggcacacagaagcgctcagtaagggctttgaaacttaacagtttgggagccagatcctcaggccacatctctctcctcccacgacctccgcggtcctccagaaccatagagagttgtacagagatcgccctgctctatgctctactctcctggggagcggggccagagaggccggaagtgctgcgagccctgggccacgctggccgtgctggcagtgggccgcctcgatccctctgcagtctttcccttgaggctccaagaccagcaggctccagatggaccctgggaaggacaaagagggggtgccccagccctcagggccgccagcaaggaagaaatttgtgatacccctcgacgaggatgaggtccctcctggagtggccaagcccttattccgatctacacagagccttcccactgtggacacctcggcccaggcggcccctcagacctacgccgaatatgccatctcacagcctctggaaggggctggggccacgtgccccacagggtcagagcccctggcaggagagacgcccaaccaggccctgaaacccggggcaaaatccaacagcatcattgtgagccctcggcagaggggcaatcccgtactgaagttcgtgcgcaatgtgccctgggaatttggcgacgtaattcccgactatgtgctgggccagagcacctgtgccctgttcctcagcctccgctaccacaacctgcacccagactacatccatgggcggctgcagagcctggggaagaacttcgccttgcgggtcctgcttgtccaggtggatgtgaaagatccccagcaggccctcaaggagctggctaagatgtgtatcctggccgactgcacattgatcctcgcctggagccccgaggaagctgggcggtacctggagacctacaaggcctatgagcagaaaccagcggacctcctgatggagaagctagagcaggacttcgtctcccgggtgactgaatgtctgaccaccgtgaagtcagtcaacaaaacggacagtcagaccctcctgaccacatttggatctctggaacagctcatcgccgcatcaagagaagatctggccttatgcccaggcctgggccctcagaaagcccggaggctgtttgatgtcctgcacgagcccttcttgaaagtaccctgatgaccccagctgccaaggaaacccccagtgtaataataaatcgtcctcccaggccaggctcctg

SEQ ID NO: 366758 - DNA, 1123 bp, Homo sapiens
tggcgcgatctcggctcactgcaacctctgcctcccgggttcaagcgattctcctgcctcagcctccacagtagttgggattacaggatcacgtgataaggcactagcagatgtggttggaatccttgctgtgctgaatcctggctgtgtgaccccaagctccagatggaccctgggaaggacaaagagggggtgccccagccctcagggccgccagcaaggaagaaatttgtgatacccctcgacgaggatgaggtccctcctggagtggccaagcccttattccgatctacacagagccttcccactgtggacacctcggcccaggcggcccctcagacctacgccgaatatgccatctcacagcctctggaaggggctggggccacgtgccccacagggtcagagcccctggcaggagagacgcccaaccaggccctgaaacccggggcaaaatccaacagcatcattgtgagccctcggcagaggggcaatcccgtactgaagttcgtgcgcaatgtgccctgggaatttggcgacgtaattcccgactatgtgctgggccagagcacctgtgccctgttcctcagcctccgctaccacaacctgcacccagactacatccatgggcggctgcagagcctggggaagaacttcgccttgcgggtcctgcttgtccaggtggatgtgaaagatccccagcaggccctcaaggagctggctaagatgtgtatcctggccgactgcacattgatcctcgcctggagccccgaggaagctgggcggtacctggagacctacaaggcctatgagcagaaaccagcggacctcctgatggagaagctagagcaggacttcgtctcccgggtgactgaatgtctgaccaccgtgaagtcagtcaacaaaacggacagtcagaccctcctgaccacatttggatctctggaacagctcatcgccgcatcaagagaagatctggccttatgcccaggcctgggccctcagaaagcccggaggctgtttgatgtcctgcacgagcccttcttgaaagtaccctgatgaccccagctgccaaggaaacccccagtgtaataataaatcgtcctcccaggccaggctcctg

SEQ ID NO: 366759 - DNA, 1461 bp, Homo sapiens
cagcactgggaacgtgtctgcgtcccttactgaaccgtaagctccgggaggacaacacggggctgtcgttggtcactgctgtgtcaccagcacggactcgcacaggaccgggaagagaggaagcgcgtggggggaataggtgtggaataaatgaatgaatgaggaaactgaagccaagtcaatgtctgagttggattcaaacttaagtctctccttactgagaggagggaccaagttggatctcctgcgatctgttctccactgagccctgccaggattctgggcacacagaagcgctcagtaagggctttgaaacttaacagtttgggagccagatcctcaggccacatctctctcctcccacgacctccgcggtcctccagaaccatagagagttgtacagagatcgccctgctctatgctctactctcctggggagcggggccagagaggccggaagtgctgcgagccctgggccacgctggccgtgctggcagtgggccgcctcgatccctctgcagtctttcccttgaggctccaagaccagcaggctccagatggaccctgggaaggacaaagagggggtgccccagccctcagggccgccagcaaggaagaaatttgtgatacccctcgacgaggatgaggtccctcctggagtggccaagcccttattccgatctacacagagccttcccactgtggacacctcggcccaggcggcccctcagacctacgccgaatatgccatctcacagcctctggaaggggctggggccacgtgccccacagggtcagagcccctggcaggagagacgcccaaccaggccctgaaacccggggcattcgtgcgcaatgtgccctgggaatttggcgacgtaattcccgactatgtgctgggccagagcacctgtgccctgttcctcagcctccgctaccacaacctgcacccagactacatccatgggcggctgcagagcctggggaagaacttcgccttgcgggtcctgcttgtccaggtggatgtgaaagatccccagcaggccctcaaggagctggctaagatgtgtatcctggccgactgcacattgatcctcgcctggagccccgaggaagctgggcggtacctggagacctacaaggcctatgagcagaaaccagcggacctcctgatggagaagctagagcaggacttcgtctcccgggtgactgaatgtctgaccaccgtgaagtcagtcaacaaaacggacagtcagaccctcctgaccacatttggatctctggaacagctcatcgccgcatcaagagaagatctggccttatgcccaggcctgggccctcagaaagcccggaggctgtttgatgtcctgcacgagcccttcttgaaagtaccctgatgaccccagctgccaaggaaacccccagtgtaataataaatcgtcctcccaggccaggctcctg

SEQ ID NO: 366760 - DNA, 1594 bp, Homo sapiens
cagcactgggaacgtgtctgcgtcccttactgaaccgtaagctccgggaggacaacacggggctgtcgttggtcactgctgtgtcaccagcacggactcgcacaggaccgggaagagaggaagcgcgtggggggaataggtgtggaataaatgaatgaatgaggaaactgaagccaagtcaatgtctgagttggattcaaacttaagtctctccttactgagaggagggaccaagttggatctcctgcgatctgttctccactgagccctgccaggattctgggcacacagaagcgctcagtaagggctttgaaacttaacagtttgggagccagatcctcaggccacatctctctcctcccacgacctccgcggtcctccagaaccatagagagttgtacagagatcgccctgctctatgctctactctcctggggagcggggccagagaggccggaagtgctgcgagccctgggccacgctggccgtgctggcagtgggccgcctcgatccctctgcagtctttcccttgaggctccaagaccagcaggctccagatggaccctgggaaggacaaagagggggtgccccagccctcagggccgccagcaaggaagaaatttgtgatacccctcgacgaggatgaggtccctcctggagtggccaagcccttattccgatctacacagagccttcccactgtggacacctcggcccaggcggcccctcagacctacgccgaatatgccatctcacagcctctggaaggggctggggccacgtgccccacagggtcagagcccctggcaggagagacgcccaaccaggccctgaaacccggggcaaaatccaacagcatcattgtgagccctcggcagaggggcaatcccgtactgaagttcgtgcgcaatgtgccctgggaatttggcgacgtaattcccgactatgtgctgggccagagcacctgtgccctgttcctcagggcccctggcacctgttctccccttgaagcccaagtctcttcccctcttcatgaagaagccaggggtctggtcttctagcctccgctaccacaacctgcacccagactacatccatgggcggctgcagagcctggggaagaacttcgccttgcgggtcctgcttgtccaggtggatgtgaaagatccccagcaggccctcaaggagctggctaagatgtgtatcctggccgactgcacattgatcctcgcctggagccccgaggaagctgggcggtacctggagacctacaaggcctatgagcagaaaccagcggacctcctgatggagaagctagagcaggacttcgtctcccgggtgactgaatgtctgaccaccgtgaagtcagtcaacaaaacggacagtcagaccctcctgaccacatttggatctctggaacagctcatcgccgcatcaagagaagatctggccttatgcccaggcctgggccctcagaaagcccggaggctgtttgatgtcctgcacgagcccttcttgaaagtaccctgatgaccccagctgccaaggaaacccccagtgtaataataaatcgtcctcccaggccaggctcctg

SEQ ID NO: 366761 - DNA, 1197 bp, Homo sapiens
ggcggggcgagccgaaggtggaggtcaaaggggcgtggcgttacagagcctctagcgctgggtgttggggacctgacgctatggagctctcggagttttgtgggggacggctgtgagtggggggttcctgctgcgggatgagaacgtagacgccagtggctcactcgctcctggcaccttccctttcaggctccagatggaccctgggaaggacaaagagggggtgccccagccctcagggccgccagcaaggaagaaatttgtgatacccctcgacgaggatgaggtccctcctggagtggccaagcccttattccgatctacacagagccttcccactgtggacacctcggcccaggcggcccctcagacctacgccgaatatgccatctcacagcctctggaaggggctggggccacgtgccccacagggtcagagcccctggcaggagagacgcccaaccaggccctgaaacccggggcaaaatccaacagcatcattgtgagccctcggcagaggggcaatcccgtactgaagttcgtgcgcaatgtgccctgggaatttggcgacgtaattcccgactatgtgctgggccagagcacctgtgccctgttcctcagcctccgctaccacaacctgcacccagactacatccatgggcggctgcagagcctggggaagaacttcgccttgcgggtcctgcttgtccaggtggatgtgaaagatccccagcaggccctcaaggagctggctaagatgtgtatcctggccgactgcacattgatcctcgcctggagccccgaggaagctgggcggtacctggagacctacaaggcctatgagcagaaaccagcggacctcctgatggagaagctagagcaggacttcgtctcccgggtgactgaatgtctgaccaccgtgaagtcagtcaacaaaacggacagtcagaccctcctgaccacatttggatctctggaacagctcatcgccgcatcaagagaagatctggccttatgcccaggcctgggccctcagaaagcccggaggctgtttgatgtcctgcacgagcccttcttgaaagtaccctgatgaccccagctgccaaggaaacccccagtgtaataataaatcgtcctcccaggccaggctcctgctggctgcgctggtgcagtctctggggagggattctgggggtg

SEQ ID NO: 366762 - DNA, 1648 bp, Homo sapiens
cagcactgggaacgtgtctgcgtcccttactgaaccgtaagctccgggaggacaacacggggctgtcgttggtcactgctgtgtcaccagcacggactcgcacaggaccgggaagagaggaagcgcgtggggggaataggtgtggaataaatgaatgaatgaggaaactgaagccaagtcaatgtctgagttggattcaaacttaagtctctccttactgagaggagggaccaagttggatctcctgcgatctgttctccactgagccctgccaggattctgggcacacagaagcgctcagtaagggctttgaaacttaacagtttgggagccagatcctcaggccacatctctctcctcccacgacctccgcggtcctccagaaccatagagagttgtacagagatcgccctgctctatgctctactctcctggggagcggggccagagaggccggaagtgctgcgagccctgggccacgctggccgtgctggcagtgggccgcctcgatccctctgcagtctttcccttgaggctccaagaccagcaggctccagatggaccctgggaaggacaaagagggggtgccccagccctcagggccgccagcaaggaagaaatttgtgatacccctcgacgaggatgaggtccctcctggagtggccaagcccttattccgatctacacagagccttcccactgtggacacctcggcccaggcggcccctcagacctacgccgaatatgccatctcacagcctctggaaggggctggggccacgtgccccacagggtcagagcccctggcaggagagacgcccaaccaggccctgaaacccggggcaaaatccaacagcatcattgtgagccctcggcagaggggcaatcccgtactgaagttcgtgcgcaatgtgccctgggaatttggcgacgtaattcccgactatgtgctgggccagagcacctgtgccctgttcctcagcctccgctaccacaacctgcacccagactacatccatgggcggctgcagagcctggggaagaacttcgccttgcgggtcctgcttgtccaggtggatgtgaaagatccccagcaggccctcaaggagctggctaagatgtgtatcctggccgactgcacattgatcctcgcctggagccccgaggaagctgggcggtacctggagacctacaaggcctatgagcagaaaccagcggacctcctgatggagaagctagagcaggacttcgtctcccgggtgactgaatgtctgaccaccgtgaagtcagtcaacaaaacggacagtcagaccctcctgaccacatttggatctctggaacagctcatcgccgcatcaagagaagatctggccttatgcccaggcctgggccctcagaaagtaagagctctgggaaagaacccaaggagttgggggaaggagagagccccaaataaacacaacctgagaccccaaagttttaaggtgaaaaaagaaccaaagaccagacacagtggcttccgcctgtaatcccaacattttgggaggccaaggcgggaggactgcttgaggccagaagttggagaccagcctgggcaagtggacacctcatttttactaaaaataaaaaaaactagctgggaaaaatg

SEQ ID NO: 366763 - DNA, 1082 bp, Homo sapiens
ggcggggcgagccgaaggtggaggtcaaaggggcgtggcgttacagagcctctagcgctgggtgttggggacctgacgctatggagctctcggagttttgtgggggacggctgtgagtggggggttcctgctgcgggatgagaacgtagacgccagtggctcactcgctcctggcaccttccctttcaggctccagatggaccctgggaaggacaaagagggggtgccccagccctcagggccgccagcaaggaagaaatttgtgatacccctcgacgaggatgaggtccctcctggagtggccaagcccttattccgatctacacagagccttcccactgtggacacctcggcccaggcggcccctcagacctacgccgaatatgccatctcacagcctctggaaggggctggggccacgtgccccacagggtcagagcccctggcaggagagacgcccaaccaggccctgaaacccggggcaaaatccaacagcatcattgtgagccctcggcagaggggcaatcccgtactgaagttcgtgcgcaatgtgccctgggaatttggcgacgtaattcccgactatgtgctgggccagagcacctgtgccctgttcctcagcctccgctaccacaacctgcacccagactacatccatgggcggctgcagagcctggggaagaacttcgccttgcgggtcctgcttgtccaggtggatgtgaaagatccccagcaggccctcaaggagctggctaagatgtgtatcctggccgactgcacattgatcctcgcctggagccccgaggaagctgggcggtacctggagacctacaaggcctatgagcagaaaccagcggacctcctgatggagaagctagagcaggacttcgtctcccggtctctggaacagctcatcgccgcatcaagagaagatctggccttatgcccaggcctgggccctcagaaagcccggaggctgtttgatgtcctgcacgagcccttcttgaaagtaccctgatgaccccagctgccaaggaaacccccagtgtaataataaatcgtcctcccaggccaggctcctg

SEQ ID NO: 366764 - DNA, 1485 bp, Homo sapiens
cagcactgggaacgtgtctgcgtcccttactgaaccgtaagctccgggaggacaacacggggctgtcgttggtcactgctgtgtcaccagcacggactcgcacaggaccgggaagagaggaagcgcgtggggggaataggtgtggaataaatgaatgaatgaggaaactgaagccaagtcaatgtctgagttggattcaaacttaagtctctccttactgagaggagggaccaagttggatctcctgcgatctgttctccactgagccctgccaggattctgggcacacagaagcgctcagtaagggctttgaaacttaacagtttgggagccagatcctcaggccacatctctctcctcccacgacctccgcggtcctccagaaccatagagagttgtacagagatcgccctgctctatgctctactctcctggggagcggggccagagaggccggaagtgctgcgagccctgggccacgctggccgtgctggcagtgggccgcctcgatccctctgcagtctttcccttgaggctccaagaccagcaggtgaggcctcgcggcgctgaaaccgtgaggcccggaccacaggctccagatggaccctgggaaggacaaagagggggtgccccagccctcagggccgccagcaaggaagaaatttgtgatacccctcgacgaggatgaggtccctcctggagtggccaagcccttattccgatctacacagagccttcccactgtggacacctcggcccaggcggcccctcagacctacgccgaatatgccatctcacagcctctggaaggggctggggccacgtgccccacagggtcagagcccctggcaggagagacgcccaaccaggccctgaaacccggggcaaaatccaacagcatcattgtgagccctcggcagaggggcaatcccgtactgaagttcgtgcgcaatgtgccctgggaatttggcgacgtaattcccgactatgtgctgggccagagcacctgtgccctgttcctcagcctccgctaccacaacctgcacccagactacatccatgggcggctgcagagcctggggaagaacttcgccttgcgggtcctgcttgtccaggtggatgtgaaagatccccagcaggccctcaaggagctggctaagatgtgtatcctggccgactgcacattgatcctcgcctggagccccgaggaagctgggcggtacctggagacctacaaggcctatgagcagaaaccagcggacctcctgatggagaagctagagcaggacttcgtctcccggtctctggaacagctcatcgccgcatcaagagaagatctggccttatgcccaggcctgggccctcagaaagcccggaggctgtttgatgtcctgcacgagcccttcttgaaagtaccctgatgaccccagctgccaaggaaacccccagtgtaataataaatcgtcctcccaggccaggctcctg

SEQ ID NO: 366765 - DNA, 1173 bp, Homo sapiens
ggcggggcgagccgaaggtggaggtcaaaggggcgtggcgttacagagcctctagcgctgggtgttggggacctgacgctatggagctctcggagttttgtgggggacggctgtgagtggggggttcctgctgcgggatgagaacgtagacgccagtggctcactcgctcctggcaccttccctttcaggctccagatggaccctgggaaggacaaagagggggtgccccagccctcagggccgccagcaaggaagaaatttgtgatacccctcgacgaggatgaggtccctcctggagtggccaagcccttattccgatctacacagagccttcccactgtggacacctcggcccaggcggcccctcagacctacgccgaatatgccatctcacagcctctggaaggggctggggccacgtgccccacagggtcagagcccctggcaggagagacgcccaaccaggccctgaaacccggggcaaaatccaacagcatcattgtgagccctcggcagaggggcaatcccgtactgaagttcgtgcgcaatgtgccctgggaatttggcgacgtaattcccgactatgtgctgggccagagcacctgtgccctgttcctcagcctccgctaccacaacctgcacccagactacatccatgggcggctgcagagcctggggaagaacttcgccttgcgggtcctgcttgtccaggtggatgtgaaagatccccagcaggccctcaaggagctggctaagatgtgtatcctggccgactgcacattgatcctcgcctggagccccgaggaagctgggcggtacctggagacctacaaggcctatgagcagaaaccagcggacctcctgatggagaagctagagcaggacttcgtctcccggtctctggaacagctcatcgccgcatcaagagaagatctggccttatgcccaggcctgggccctcagaaagcccggaggctgtttgatgtcctgcacgagcccttcttgaaagtaccctgatgaccccagctgccaaggaaacccccagtgtaataataaatcgtcctcccaggccaggctcctgaagatagagaggatcatacagaaatattcatggaactaaataaacatttacaattacatgacaataatgcgatgaacataaacataatgac

SEQ ID NO: 366766 - DNA, 1430 bp, Homo sapiens
cagcactgggaacgtgtctgcgtcccttactgaaccgtaagctccgggaggacaacacggggctgtcgttggtcactgctgtgtcaccagcacggactcgcacaggaccgggaagagaggaagcgcgtggggggaataggtgtggaataaatgaatgaatgaggaaactgaagccaagtcaatgtctgagttggattcaaacttaagtctctccttactgagaggagggaccaagttggatctcctgcgatctgttctccactgagccctgccaggattctgggcacacagaagcgctcagtaagggctttgaaacttaacagtttgggagccagatcctcaggccacatctctctcctcccacgacctccgcggtcctccagaaccatagagagttgtacagagatcgccctgctctatgctctactctcctggggagcggggccagagaggccggaagtgctgcgagccctgggccacgctggccgtgctggcagtgggccgcctcgatccctctgcagtctttcccttgaggctccaagaccagcaggtgaggcctcgcggcgctgaaaccgtgaggcccggaccacaggctccagatggaccctgggaaggacaaagagggggtgccccagccctcagggccgccagcaaggaagaaatttgtgatacccctcgacgaggatgaggtccctcctggagtggccaagcccttattccgatctacacagagccttcccactgtggacacctcggcccaggcggcccctcagacctacgccgaatatgccatctcacagcctctggaaggggctggggccacgtgccccacagggtcagagcccctggcaggagagacgcccaaccaggccctgaaacccggggcaaaatccaacagcatcattgtgagccctcggcagaggggcaatcccgtactgaagttcgtgcgcaatgtgccctgggaatttggcgacgtaattcccgactatgtgctgggccagagcacctgtgccctgttcctcagcctccgctaccacaacctgcacccagactacatccatgggcggctgcagagcctggggaagaacttcgccttgcgggtcctgcttgtccaggtggatgtgaaagatccccagcaggccctcaaggagctggctaagatgtgtatcctggccgactgcacattgatcctcgcctggagccccgaggaagctgggcggtacctggagacctacaaggcctatgagcagaaaccagcggacctcctgatggagaagctagagcaggacttcgtctcccgggtgaggccacctcacctcccatccctgcctgggcctccccgcagctcctgggtggttgagcttcagttccaattttaaggcgactgtccattcatccctgggcctcgtctttcctggcccatcccaccg

SEQ ID NO: 366767 - DNA, 1274 bp, Homo sapiens
cagcactgggaacgtgtctgcgtcccttactgaaccgtaagctccgggaggacaacacggggctgtcgttggtcactgctgtgtcaccagcacggactcgcacaggaccgggaagagaggaagcgcgtggggggaataggtgtggaataaatgaatgaatgaggaaactgaagccaagtcaatgtctgagttggattcaaacttaagtctctccttactgagaggagggaccaagttggatctcctgcgatctgttctccactgagccctgccaggattctgggcacacagaagcgctcagtaagggctttgaaacttaacagtttgggagccagatcctcaggccacatctctctcctcccacgacctccgcggtcctccagaaccatagagagttgtacagagatcgccctgctctatgctctactctcctggggagcggggccagagaggccggaagtgctgcgagccctgggccacgctggccgtgctggcagtgggccgcctcgatccctctgcagtctttcccttgaggctccaagaccagcaggctccagatggaccctgggaaggacaaagagggggtgccccagccctcagggccgccagcaaggaagaaatttgtgatacccctcgacgaggatgaggtccctcctggagtggccaagcccttattccgatctacacagagccttcccactgtggacacctcggcccaggcggcccctcagacctacgccgaatatgccatctcacagcctctggaaggggctggggccacgtgccccacagggtcagagcccctggcaggagagacgcccaaccaggccctgaaacccggggcaaaatccaacagcatcattgtgagccctcggcagaggggcaatcccgtactgaagttcgtgcgcaatgtgccctgggaatttggcgacgtaattcccgactatgtgctgggccagagcacctgtgccctgttcctcagcctccgctaccacaacctgcacccagactacatccatgggcggctgcagagcctggggaagaacttcgccttgcgggtcctgcttgtccaggtggatgtgaaagatccccagcaggccctcaaggagctggctaagatgtgtatcctggccgactgcacattgatcctcgcctggaggcccggaggctgtttgatgtcctgcacgagcccttcttgaaagtaccctgatgaccccagctgccaaggaaacccccagtgtaataataaatcgtcctcccaggccaggctcctg

SEQ ID NO: 366768 - DNA, 1620 bp, Homo sapiens
tgcaatggcgctatcttggctcactgcaacgtctgcctcccgggttcaagcagttcccccacctcagcttccctagtagctgggattacaggcacctgccaccacgcctggctaatttttgtaattcctggcttcttggtttctaattctgattttctcctccagaaagatccccagcaggccctcaaggagctggctaagatgtgtatcctggccgactgcacattgatcctcgcctggaggtgagatgagggcttccctgcctcattcaggctccacctgggattggtccctgctcccccatcccaccctgcccagcccttcccttctccaattcctgtgtgggcctggtgcaggcactgcctctctctggccttcagtttcctcatctgtaaaacaaggtcttaatttttttttttttttttttgatacagagcctcactctgtcccctaggctgaagtgcagtggcacgatctcggctctgccttgggggttcaagcaattctgcctcagcctcccaagtagctgggattacaggtgtgcaccaccacgcccagctaatttttttgtatttttagtagggacgggttttgccatgttggccaggctggtcttgaaatcctgacctcaggtgatcctcccgccttaccctcccaaagtgctgggattacaggcgtgagccactgtgcccggttggaagctgaacatttcatgaggttggcttcttgctgcagcgggaaaataagcagtgtttctggttttcctcctgtcaaacccagtacaaacactttgtgtgctgacttcccttccaaaatagctaacatttcttcagcagtgccaggcgtggcttttggcacttacagagcattccagagtattctctgatcttcaaagtcataccatcctccccactttattattatttttttgagacagggtcttgctcttttgctgaggctggagtgcagtggtgctatcacaggttactgaagcctcaacttgacaggctcaggcagtcctcctgcctcagcctcccgagcagctgagactaaaggcacgcgccaccacacctggctaatttttaattttttgtggagacaacaccttgctatgttgtcccggctggtcttgaactcctgacctcaagtgatctgctcgcctcggcctcccaaaggatgggattacaggcaccagccactgcgcctggctggcctctggtttttaataaaacatgactagagtgactccatcttaaagtgagtagctaggcacttacaaggttcatgcttatggcctgaaaataaccacatcccaggctgaccaccaattataattacagaatatttatggccatacagaacatgttccaccaagcctgcagaatgtccaaatgtcctaagaatgcagcccccattacttaaatataacataaatgagcaagcttaggttgcaggattaatggtcgtggataacaccaatagcccctacctttagtgagcttatctgcacactccaagtttaactatagttccttatagtttcttataagtagaaatactaacaaagggctgtgggtttctccccctgctttctgaggacactctactctgtaaaggagt

SEQ ID NO: 366769 - DNA, 571 bp, Homo sapiens
ggcccctcgaggcgctctaacccaggctccgccctcgacttgctctaataaccaggctgcgctcctcgagatgctctaacggccaggccccgccttcaaatgctctaactccaggccccgcccctcgagcgccacaacagccgggccccaccccttgaggtgctttaacggccaggccccgccctgaaggcgttgtaacaaccaggctccgcccccaggcgctctaacggccaggcccagccgcttgaggctccccaacggccaggccgcgcccccgcgtgcgtgcgcggcccggcagagccgtgcgggcgcccgcgtactcactagctgaggtggcagtggttccaccaacatggagctctcgcagatgtcggagctcatggggctgtcggtgttgcttgggctgctggccctgatggcgacgggtaccgggtcccggagaagacgcgcgctgcaaagcaatggttccacttgaccaatcttcggatcagagcgacaatcgcgtcgagaactaaaatacacgctctgggtctgaaccaggacttttgctgcttcgatggatccggacctg

SEQ ID NO: 366770 - DNA, 2536 bp, Homo sapiens
ggcccctcgaggcgctctaacccaggctccgccctcgacttgctctaataaccaggctgcgctcctcgagatgctctaacggccaggccccgccttcaaatgctctaactccaggccccgcccctcgagcgccacaacagccgggccccaccccttgaggtgctttaacggccaggccccgccctgaaggcgttgtaacaaccaggctccgcccccaggcgctctaacggccaggcccagccgcttgaggctccccaacggccaggccgcgcccccgcgtgcgtgcgcggcccggcagagccgtgcgggcgcccgcgtactcactagctgaggtggcagtggttccaccaacatggagctctcgcagatgtcggagctcatggggctgtcggtgttgcttgggctgctggccctgatggcgacggcggcggtagcgcgggggtggctgcgcgcgggggaggagaggagcggccggcccgcctgccaaaaagcaaatggatttccacctgacaaatcttcgggatccaagaagcagaaacaatatcagcggattcggaaggagaagcctcaacaacacaacttcacccaccgcctcctggctgcagctctgaagagccacagcgggaacatatcttgcatggactttagcagcaatggcaaatacctggctacctgtgcagatgatcgcaccatccgcatctggagcaccaaggacttcctgcagcgagagcaccgcagcatgagagccaacgtggagctggaccacgccaccctggtgcgcttcagccctgactgcagagccttcatcgtctggctggccaacggggacaccctccgtgtcttcaagatgaccaagcgggaggatgggggctacaccttcacagccaccccagaggacttccctaaaaagcacaaggcgcctgtcatcgacattggcattgctaacacagggaagtttatcatgactgcctccagtgacaccactgtcctcatctggagcctgaagggtcaagtgctgtctaccatcaacaccaaccagatgaacaacacacacgctgctgtatctccctgtggcagatttgtagcctcgtgtggcttcaccccagatgtgaaggtttgggaagtctgctttggaaagaagggggagttccaggaggtggtgcgagccttcgaactaaagggccactccgcggctgtgcactcgtttgctttctccaacgactcacggaggatggcttctgtctccaaggatggtacatggaaactgtgggacacagatgtggaatacaagaagaagcaggacccctacttgctgaagacaggccgctttgaagaggcggcgggtgccgcgccgtgccgcctggccctctcccccaacgcccaggtcttggccttggccagtggcagtagtattcatctctacaatacccggcggggcgagaaggaggagtgctttgagcgggtccatggcgagtgtatcgccaacttgtcctttgacatcactggccgctttctggcctcctgtggggaccgggcggtgcggctgtttcacaacactcctggccaccgagccatggtggaggagatgcagggccacctgaagcgggcctccaacgagagcacccgccagaggctgcagcagcagctgacccaggcccaagagaccctgaagagcctgggtgccctgaagaagtgactctgggagggcccggcgcagaggattgaggaggagggatctggcctcctcatggcactgctgccatctttcctcccaggtggaagcctttcagaaggagtctcctggttttcttactggtggccctgcttcttcccattgaaactactcttgtctacttaggtctctctcttcttgctggctgtgactcctccctgactagtggccaaggtgcttttcttcctcccaggcccagtgggtggaatctgtccccacctggcactgaggagaatggtagagaggagaggagagagagagagaatgtgatttttggccttgtggcagcacatcctcacacccaaagaagtttgtaaatgttccagaacaacctagagaacacctgagtactaagcagcagttttgcaaggatgggagactgggatagcttcccatcacagaactgtgttccatcaaaaagacactaagggatttccttctgggcctcagttctatttgtaagatggagaataatcctctctgtgaactccttgcaaagatgatatgaggctaagagaatatcaagtccccaggtctggaagaaaagtagaaaagagtagtactattgtccaatgtcatgaaagtggtaaaagtgggaaccagtgtgctttgaaaccaaattagaaacacattccttgggaaggcaaagttttctgggacttgatcatacattttatatggttgggacttctctcttcgggagatgatatcttgtttaaggagacctcttttcagttcatcaagttcatcagatatttgagtgcccactctgtgcccaaataaatatgagctggggattaaata

SEQ ID NO: 366771 - DNA, 2508 bp, Homo sapiens
ggcccctcgaggcgctctaacccaggctccgccctcgacttgctctaataaccaggctgcgctcctcgagatgctctaacggccaggccccgccttcaaatgctctaactccaggccccgcccctcgagcgccacaacagccgggccccaccccttgaggtgctttaacggccaggccccgccctgaaggcgttgtaacaaccaggctccgcccccaggcgctctaacggccaggcccagccgcttgaggctccccaacggccaggccgcgcccccgcgtgcgtgcgcggcccggcagagccgtgcgggcgcccgcgtactcactagctgaggtggcagtggttccaccaacatggagctctcgcagatgtcggagctcatggggctgtcggtgttgcttgggctgctggccctgatggcgacggcggcggtagcgcgggggtggctgcgcgcgggggaggagaggagcggccggcccgcctgccaaaaagcaaatggatttccacctgacaaatcttcgggatccaagaagcagaaacaatatcagcggattcggaaggagaagcctcaacaacacaacttcacccaccgcctcctggctgcagctctgaagagccacagcgggaacatatcttgcatggactttagcagcaatggcaaatacctggctacctgtgcagatgatcgcaccatccgcatctggagcaccaaggacttcctgcagcgagagcaccgcagcatgagagccaacgtggagctggaccacgccaccctggtgcgcttcagccctgactgcagagccttcatcgtctggctggccaacggggacaccctccgtgtcttcaagatgaccaagcgggaggatgggggctacaccttcacagccaccccagaggacttccctaaaaagcacaaggcgcctgtcatcgacattggcattgctaacacagggaagtttatcatgactgcctccagtgacaccactgtcctcatctggagcctgaagggtcaagtgctgtctaccatcaacaccaaccagatgaacaacacacacgctgctgtatctccctgtggcagatttgtagcctcgtgtggcttcaccccagatgtgaaggtttgggaagtctgctttggaaagaagggggagttccaggaggtggtgcgagccttcgaactaaagggccactccgcggctgtgcactcgtttgctttctccaacgactcacggaggatggcttctgtctccaaggatggtacatggaaactgtgggacacagatgtggaatacaagaagaagcaggacccctacttgctgaagacaggccgctttgaagaggcggcgggtgccgcgccgtgccgcctggccctctcccccaacgcccaggtcttggccttggccagtggcagtagtattcatctctacaatacccggcggggcgagaaggaggagtgctttgagcgggtccatggcgagtgtatcgccaacttgtcctttgacatcactggccgctttctggcctcctgtggggaccgggcggtgcggctgtttcacaacactcctggccaccgagccatggtggaggagatgcagggccacctgaagcgggcctccaacgagagcacccgccagaggctgcagcagcagctgacccaggcccaagaaagtgactctgggagggcccggcgcagaggattgaggaggagggatctggcctcctcatggcactgctgccatctttcctcccaggtggaagcctttcagaaggagtctcctggttttcttactggtggccctgcttcttcccattgaaactactcttgtctacttaggtctctctcttcttgctggctgtgactcctccctgactagtggccaaggtgcttttcttcctcccaggcccagtgggtggaatctgtccccacctggcactgaggagaatggtagagaggagaggagagagagagagaatgtgatttttggccttgtggcagcacatcctcacacccaaagaagtttgtaaatgttccagaacaacctagagaacacctgagtactaagcagcagttttgcaaggatgggagactgggatagcttcccatcacagaactgtgttccatcaaaaagacactaagggatttccttctgggcctcagttctatttgtaagatggagaataatcctctctgtgaactccttgcaaagatgatatgaggctaagagaatatcaagtccccaggtctggaagaaaagtagaaaagagtagtactattgtccaatgtcatgaaagtggtaaaagtgggaaccagtgtgctttgaaaccaaattagaaacacattccttgggaaggcaaagttttctgggacttgatcatacattttatatggttgggacttctctcttcgggagatgatatcttgtttaaggagacctcttttcagttcatcaagttcatcagatatttgagtgcccactctgtgcccaaataaatatgagctggggattaaata

SEQ ID NO: 366772 - DNA, 2513 bp, Homo sapiens
ggcccctcgaggcgctctaacccaggctccgccctcgacttgctctaataaccaggctgcgctcctcgagatgctctaacggccaggccccgccttcaaatgctctaactccaggccccgcccctcgagcgccacaacagccgggccccaccccttgaggtgctttaacggccaggccccgccctgaaggcgttgtaacaaccaggctccgcccccaggcgctctaacggccaggcccagccgcttgaggctccccaacggccaggccgcgcccccgcgtgcgtgcgcggcccggcagagccgtgcgggcgcccgcgtactcactagctgaggtggcagtggttccaccaacatggagctctcgcagatgtcggagctcatggggctgtcggtgttgcttgggctgctggccctgatggcgacggcggcggtagcgcgggggtggctgcgcgcgggggaggagaggagcggccggcccgcctgccaaaaagcaaatggatttccacctgacaaatcttcgggatccaagaagcagaaacaatatcagcggattcggaaggagaagcctcaacaacacaacttcacccaccgcctcctggctgcagctctgaagagccacagcgggaacatatcttgcatggactttagcagcaatggcaaatacctggctacctgtgcagatgatcgcaccatccgcatctggagcaccaaggacttcctgcagcgagagcaccgcagcatgagagccaacgtggagctggaccacgccaccctgagccttcatcgtctggctggccaacggggacaccctccgtgtcttcaagatgaccaagcgggaggatgggggctacaccttcacagccaccccagaggacttccctaaaaagcacaaggcgcctgtcatcgacattggcattgctaacacagggaagtttatcatgactgcctccagtgacaccactgtcctcatctggagcctgaagggtcaagtgctgtctaccatcaacaccaaccagatgaacaacacacacgctgctgtatctccctgtggcagatttgtagcctcgtgtggcttcaccccagatgtgaaggtttgggaagtctgctttggaaagaagggggagttccaggaggtggtgcgagccttcgaactaaagggccactccgcggctgtgcactcgtttgctttctccaacgactcacggaggatggcttctgtctccaaggatggtacatggaaactgtgggacacagatgtggaatacaagaagaagcaggacccctacttgctgaagacaggccgctttgaagaggcggcgggtgccgcgccgtgccgcctggccctctcccccaacgcccaggtcttggccttggccagtggcagtagtattcatctctacaatacccggcggggcgagaaggaggagtgctttgagcgggtccatggcgagtgtatcgccaacttgtcctttgacatcactggccgctttctggcctcctgtggggaccgggcggtgcggctgtttcacaacactcctggccaccgagccatggtggaggagatgcagggccacctgaagcgggcctccaacgagagcacccgccagaggctgcagcagcagctgacccaggcccaagagaccctgaagagcctgggtgccctgaagaagtgactctgggagggcccggcgcagaggattgaggaggagggatctggcctcctcatggcactgctgccatctttcctcccaggtggaagcctttcagaaggagtctcctggttttcttactggtggccctgcttcttcccattgaaactactcttgtctacttaggtctctctcttcttgctggctgtgactcctccctgactagtggccaaggtgcttttcttcctcccaggcccagtgggtggaatctgtccccacctggcactgaggagaatggtagagaggagaggagagagagagagaatgtgatttttggccttgtggcagcacatcctcacacccaaagaagtttgtaaatgttccagaacaacctagagaacacctgagtactaagcagcagttttgcaaggatgggagactgggatagcttcccatcacagaactgtgttccatcaaaaagacactaagggatttccttctgggcctcagttctatttgtaagatggagaataatcctctctgtgaactccttgcaaagatgatatgaggctaagagaatatcaagtccccaggtctggaagaaaagtagaaaagagtagtactattgtccaatgtcatgaaagtggtaaaagtgggaaccagtgtgctttgaaaccaaattagaaacacattccttgggaaggcaaagttttctgggacttgatcatacattttatatggttgggacttctctcttcgggagatgatatcttgtttaaggagacctcttttcagttcatcaagttcatcagatatttgagtgcccactctgtgcccaaataaatatgagctggggattaaata

SEQ ID NO: 366773 - DNA, 2594 bp, Homo sapiens
ggcccctcgaggcgctctaacccaggctccgccctcgacttgctctaataaccaggctgcgctcctcgagatgctctaacggccaggccccgccttcaaatgctctaactccaggccccgcccctcgagcgccacaacagccgggccccaccccttgaggtgctttaacggccaggccccgccctgaaggcgttgtaacaaccaggctccgcccccaggcgctctaacggccaggcccagccgcttgaggctccccaacggccaggccgcgcccccgcgtgcgtgcgcggcccggcagagccgtgcgggcgcccgcgtactcactagctgaggtggcagtggttccaccaacatggagctctcgcagatgtcggagctcatggggctgtcggtgttgcttgggctgctggccctgatggcgacggcggcggtagcgcgggggtggctgcgcgcgggggaggagaggagcggccggcccgcctgtgggcagtaaatgcttatcagtgagtaactggagaacaacatggcccttccttataggccaaaaagcaaatggatttccacctgacaaatcttcgggatccaagaagcagaaacaatatcagcggattcggaaggagaagcctcaacaacacaacttcacccaccgcctcctggctgcagctctgaagagccacagcgggaacatatcttgcatggactttagcagcaatggcaaatacctggctacctgtgcagatgatcgcaccatccgcatctggagcaccaaggacttcctgcagcgagagcaccgcagcatgagagccaacgtggagctggaccacgccaccctggtgcgcttcagccctgactgcagagccttcatcgtctggctggccaacggggacaccctccgtgtcttcaagatgaccaagcgggaggatgggggctacaccttcacagccaccccagaggacttccctaaaaagcacaaggcgcctgtcatcgacattggcattgctaacacagggaagtttatcatgactgcctccagtgacaccactgtcctcatctggagcctgaagggtcaagtgctgtctaccatcaacaccaaccagatgaacaacacacacgctgctgtatctccctgtggcagatttgtagcctcgtgtggcttcaccccagatgtgaaggtttgggaagtctgctttggaaagaagggggagttccaggaggtggtgcgagccttcgaactaaagggccactccgcggctgtgcactcgtttgctttctccaacgactcacggaggatggcttctgtctccaaggatggtacatggaaactgtgggacacagatgtggaatacaagaagaagcaggacccctacttgctgaagacaggccgctttgaagaggcggcgggtgccgcgccgtgccgcctggccctctcccccaacgcccaggtcttggccttggccagtggcagtagtattcatctctacaatacccggcggggcgagaaggaggagtgctttgagcgggtccatggcgagtgtatcgccaacttgtcctttgacatcactggccgctttctggcctcctgtggggaccgggcggtgcggctgtttcacaacactcctggccaccgagccatggtggaggagatgcagggccacctgaagcgggcctccaacgagagcacccgccagaggctgcagcagcagctgacccaggcccaagagaccctgaagagcctgggtgccctgaagaagtgactctgggagggcccggcgcagaggattgaggaggagggatctggcctcctcatggcactgctgccatctttcctcccaggtggaagcctttcagaaggagtctcctggttttcttactggtggccctgcttcttcccattgaaactactcttgtctacttaggtctctctcttcttgctggctgtgactcctccctgactagtggccaaggtgcttttcttcctcccaggcccagtgggtggaatctgtccccacctggcactgaggagaatggtagagaggagaggagagagagagagaatgtgatttttggccttgtggcagcacatcctcacacccaaagaagtttgtaaatgttccagaacaacctagagaacacctgagtactaagcagcagttttgcaaggatgggagactgggatagcttcccatcacagaactgtgttccatcaaaaagacactaagggatttccttctgggcctcagttctatttgtaagatggagaataatcctctctgtgaactccttgcaaagatgatatgaggctaagagaatatcaagtccccaggtctggaagaaaagtagaaaagagtagtactattgtccaatgtcatgaaagtggtaaaagtgggaaccagtgtgctttgaaaccaaattagaaacacattccttgggaaggcaaagttttctgggacttgatcatacattttatatggttgggacttctctcttcgggagatgatatcttgtttaaggagacctcttttcagttcatcaagttcatcagatatttgagtgcccactctgtgcccaaataaatatgagctggggattaaata

SEQ ID NO: 366774 - DNA, 2377 bp, Homo sapiens
ggcccctcgaggcgctctaacccaggctccgccctcgacttgctctaataaccaggctgcgctcctcgagatgctctaacggccaggccccgccttcaaatgctctaactccaggccccgcccctcgagcgccacaacagccgggccccaccccttgaggtgctttaacggccaggccccgccctgaaggcgttgtaacaaccaggctccgcccccaggcgctctaacggccaggcccagccgcttgaggctccccaacggccaggccgcgcccccgcgtgcgtgcgcggcccggcagagccgtgcgggcgcccgcgtactcactagctgaggtggcagtggttccaccaacatggagctctcgcagatgtcggagctcatggggctgtcggtgttgcttgggctgctggccctgatggcgacggcggcggtagcgcgggggtggctgcgcgcgggggaggagaggagcggccggcccgcctgccaaaaagcaaatggatttccacctgacaaatcttcgggatccaagaagcagaaacaatatcagcggattcggaaggagaagcctcaacaacacaacttcacccaccgcctcctggctgcagctctgaagagccacagcgggaacatatcttgcatggactttagcagcaatggcaaatacctggctacctgtgcagatgatcgcaccatccgcatctggagcaccaaggacttcctgcagcgagagcaccgcagcatgagagccaacgtggagctggaccacgccaccctggtgcgcttcagccctgactgcagagccttcatcgtctggctggccaacggggacaccctccgtgtcttcaagatgaccaagcgggaggatgggggctacaccttcacagccaccccagaggacttccctaaaaagcacaaggcgcctgtcatcgacattggcattgctaacacagggaagtttatcatgactgcctccagtgacaccactgtcctcatctggagcctgaagggtcaagtgctgtctaccatcaacaccaaccagatgaacaacacacacgctgctgtatctccctgtggcagatttgtagcctcgtgtggcttcaccccagatgtgaaggtttgggaagtctgctttggaaagaagggggagttccaggaggtggtgcgagccttcgaactaaagggccactccgcggctgtgcactcgtttgctttctccaacgactcacggaggatggcttctgtctccaaggatggtacatggaaactgtgggacacagatgtggaatacaagaagaagcaggacccctacttgctgaagacaggccgctttgaagaggcggcgggtgccgcgccgtgccgcctggccctctcccccaacgcccaggtcttggccttggccagtggcagtagtattcatctctacaatacccggcggggcgagaaggaggagtgctttgagcgggtccatggcgagtgtatcgccaacttgtcctttgacatcactggccgctttctggcctcctgtggggaccgggcggtgcggctgtttcacaacactcctggccaccgagccatggtggaggagatgcagggccacctgaagcgggcctccaacgagagcacccgccagaggctgcagcagcagctgacccaggcccaagactgcttcttcccattgaaactactcttgtctacttaggtctctctcttcttgctggctgtgactcctccctgactagtggccaaggtgcttttcttcctcccaggcccagtgggtggaatctgtccccacctggcactgaggagaatggtagagaggagaggagagagagagagaatgtgatttttggccttgtggcagcacatcctcacacccaaagaagtttgtaaatgttccagaacaacctagagaacacctgagtactaagcagcagttttgcaaggatgggagactgggatagcttcccatcacagaactgtgttccatcaaaaagacactaagggatttccttctgggcctcagttctatttgtaagatggagaataatcctctctgtgaactccttgcaaagatgatatgaggctaagagaatatcaagtccccaggtctggaagaaaagtagaaaagagtagtactattgtccaatgtcatgaaagtggtaaaagtgggaaccagtgtgctttgaaaccaaattagaaacacattccttgggaaggcaaagttttctgggacttgatcatacattttatatggttgggacttctctcttcgggagatgatatcttgtttaaggagacctcttttcagttcatcaagttcatcagatatttgagtgcccactctgtgcccaaataaatatgagctggggattaaata

SEQ ID NO: 366775 - DNA, 2453 bp, Homo sapiens
cggcctcctcgtggtccgacctgcggtttgggcccgcggctggtggggcccggcgactccatgggcctcagtttctcctctggtaacgtgagcttcgcttccagagacggggacccgccttgccgggttaggcgcacctcctggggcgggactggctccaacctgggccccttactgcggctttctctgtggccgaggccaggccgtccccggggtggccaggagagcaccgtaaactcttcagcctgctccgtggccgcgatctcggaaaaagcaccaattctgtgatgtgcagcagcatttactgggcatctatgaccctgtgataggctttggggtctttttctgtaaggagtccagtaaaggagaagtacatctgtattatgaacacctaaatatgccaaaaagcaaatggatttccacctgacaaatcttcgggatccaagaagcagaaacaatatcagcggattcggaaggagaagcctcaacaacacaacttcacccaccgcctcctggctgcagctctgaagagccacagcgggaacatatcttgcatggactttagcagcaatggcaaatacctggctacctgtgcagatgatcgcaccatccgcatctggagcaccaaggacttcctgcagcgagagcaccgcagcatgagagccaacgtggagctggaccacgccaccctggtgcgcttcagccctgactgcagagccttcatcgtctggctggccaacggggacaccctccgtgtcttcaagatgaccaagcgggaggatgggggctacaccttcacagccaccccagaggacttccctaaaaagcacaaggcgcctgtcatcgacattggcattgctaacacagggaagtttatcatgactgcctccagtgacaccactgtcctcatctggagcctgaagggtcaagtgctgtctaccatcaacaccaaccagatgaacaacacacacgctgctgtatctccctgtggcagatttgtagcctcgtgtggcttcaccccagatgtgaaggtttgggaagtctgctttggaaagaagggggagttccaggaggtggtgcgagccttcgaactaaagggccactccgcggctgtgcactcgtttgctttctccaacgactcacggaggatggcttctgtctccaaggatggtacatggaaactgtgggacacagatgtggaatacaagaagaagcaggacccctacttgctgaagacaggccgctttgaagaggcggcgggtgccgcgccgtgccgcctggccctctcccccaacgcccaggtcttggccttggccagtggcagtagtattcatctctacaatacccggcggggcgagaaggaggagtgctttgagcgggtccatggcgagtgtatcgccaacttgtcctttgacatcactggccgctttctggcctcctgtggggaccgggcggtgcggctgtttcacaacactcctggccaccgagccatggtggaggagatgcagggccacctgaagcgggcctccaacgagagcacccgccagaggctgcagcagcagctgacccaggcccaagagaccctgaagagcctgggtgccctgaagaagtgactctgggagggcccggcgcagaggattgaggaggagggatctggcctcctcatggcactgctgccatctttcctcccaggtggaagcctttcagaaggagtctcctggttttcttactggtggccctgcttcttcccattgaaactactcttgtctacttaggtctctctcttcttgctggctgtgactcctccctgactagtggccaaggtgcttttcttcctcccaggcccagtgggtggaatctgtccccacctggcactgaggagaatggtagagaggagaggagagagagagagaatgtgatttttggccttgtggcagcacatcctcacacccaaagaagtttgtaaatgttccagaacaacctagagaacacctgagtactaagcagcagttttgcaaggatgggagactgggatagcttcccatcacagaactgtgttccatcaaaaagacactaagggatttccttctgggcctcagttctatttgtaagatggagaataatcctctctgtgaactccttgcaaagatgatatgaggctaagagaatatcaagtccccaggtctggaagaaaagtagaaaagagtagtactattgtccaatgtcatgaaagtggtaaaagtgggaaccagtgtgctttgaaaccaaattagaaacacattccttgggaaggcaaagttttctgggacttgatcatacattttatatggttgggacttctctcttcgggagatgatatcttgtttaaggagacctcttttcagttcatcaagttcatcagatatttgagtgcccactctgtgcccaaataaatatgagctggggattaaata

SEQ ID NO: 366776 - DNA, 2992 bp, Homo sapiens
ggcccctcgaggcgctctaacccaggctccgccctcgacttgctctaataaccaggctgcgctcctcgagatgctctaacggccaggccccgccttcaaatgctctaactccaggccccgcccctcgagcgccacaacagccgggccccaccccttgaggtgctttaacggccaggccccgccctgaaggcgttgtaacaaccaggctccgcccccaggcgctctaacggccaggcccagccgcttgaggctccccaacggccaggccgcgcccccgcgtgcgtgcgcggcccggcagagccgtgcgggcgcccgcgtactcactagctgaggtggcagtggttccaccaacatggagctctcgcagatgtcggagctcatggggctgtcggtgttgcttgggctgctggccctgatggcgacggcggcggtagcgcgggggtggctgcgcgcgggggaggagaggagcggccggcccgcctagacggggacccgccttgccgggttaggcgcacctcctggggcgggactggctccaacctgggccccttactgcggctttctctgtggccgaggccaggccgtccccggggtggccaggagagcaccgtaaactcttcagcctgctccgtggccgcgatctcggaaaaagcaccaattctgtgatgtgcagcagcatttactgggcatctatgaccctgtgataggctttggggtctttttctgtaaggagtccagtaaaggagaagtacatctgtattatgaacacctaaatatggcccaggagcttttttcctgttggaattggggagcatctgcagtcatttaccacatgccagctttgtgactcaattaagtatcttttacaaaagtgactggctccactcccccgcacaggactcaacagatgttgacttctcatccccgagttctttcaggccaaaaagcaaatggatttccacctgacaaatcttcgggatccaagaagcagaaacaatatcagcggattcggaaggagaagcctcaacaacacaacttcacccaccgcctcctggctgcagctctgaagagccacagcgggaacatatcttgcatggactttagcagcaatggcaaatacctggctacctgtgcagatgatcgcaccatccgcatctggagcaccaaggacttcctgcagcgagagcaccgcagcatgagagccaacgtggagctggaccacgccaccctggtgcgcttcagccctgactgcagagccttcatcgtctggctggccaacggggacaccctccgtgtcttcaagatgaccaagcgggaggatgggggctacaccttcacagccaccccagaggacttccctaaaaagcacaaggcgcctgtcatcgacattggcattgctaacacagggaagtttatcatgactgcctccagtgacaccactgtcctcatctggagcctgaagggtcaagtgctgtctaccatcaacaccaaccagatgaacaacacacacgctgctgtatctccctgtggcagatttgtagcctcgtgtggcttcaccccagatgtgaaggtttgggaagtctgctttggaaagaagggggagttccaggaggtggtgcgagccttcgaactaaagggccactccgcggctgtgcactcgtttgctttctccaacgactcacggaggatggcttctgtctccaaggatggtacatggaaactgtgggacacagatgtggaatacaagaagaagcaggacccctacttgctgaagacaggccgctttgaagaggcggcgggtgccgcgccgtgccgcctggccctctcccccaacgcccaggtcttggccttggccagtggcagtagtattcatctctacaatacccggcggggcgagaaggaggagtgctttgagcgggtccatggcgagtgtatcgccaacttgtcctttgacatcactggccgctttctggcctcctgtggggaccgggcggtgcggctgtttcacaacactcctggccaccgagccatggtggaggagatgcagggccacctgaagcgggcctccaacgagagcacccgccagaggctgcagcagcagctgacccaggcccaagagaccctgaagagcctgggtgccctgaagaagtgactctgggagggcccggcgcagaggattgaggaggagggatctggcctcctcatggcactgctgccatctttcctcccaggtggaagcctttcagaaggagtctcctggttttcttactggtggccctgcttcttcccattgaaactactcttgtctacttaggtctctctcttcttgctggctgtgactcctccctgactagtggccaaggtgcttttcttcctcccaggcccagtgggtggaatctgtccccacctggcactgaggagaatggtagagaggagaggagagagagagagaatgtgatttttggccttgtggcagcacatcctcacacccaaagaagtttgtaaatgttccagaacaacctagagaacacctgagtactaagcagcagttttgcaaggatgggagactgggatagcttcccatcacagaactgtgttccatcaaaaagacactaagggatttccttctgggcctcagttctatttgtaagatggagaataatcctctctgtgaactccttgcaaagatgatatgaggctaagagaatatcaagtccccaggtctggaagaaaagtagaaaagagtagtactattgtccaatgtcatgaaagtggtaaaagtgggaaccagtgtgctttgaaaccaaattagaaacacattccttgggaaggcaaagttttctgggacttgatcatacattttatatggttgggacttctctcttcgggagatgatatcttgtttaaggagacctcttttcagttcatcaagttcatcagatatttgagtgcccactctgtgcccaaataaatatgagctggggattaaata

SEQ ID NO: 366777 - DNA, 3577 bp, Homo sapiens
tcaggctcggtcccccggttactgtcatcgacattggcattgctaacacagggaagtttatcatgactgcctccagtgacaccactgtcctcatctggagcctgaagggtcaagtgctgtctaccatcaacaccaaccagatgaacaacacacacgctgctgtatctccctgtggcagatttgtagcctcgtgtggcttcaccccagatgtgaaggtttgggaagtctgctttggaaagaagggggagttccaggaggtggtgcgagccttcgaactaaagggccactccgcggctgtgcactcgtttgctttctccaacgactcacggaggatggcttctgtctccaaggatggtacatggaaactgtgggacacagatgtggaatacaagaagaagcaggacccctacttgctgaagacaggccgctttgaagaggcggcgggtgcggctgtttcacaacactcctggccaccgagccatggtggaggagatgcagggccacctgaagcgggcctccaacgagagcacccgccagaggctgcagcagcagctgacccaggcccaagagaccctgaagagcctgggtgccctgaagaagtgactctgggagggcccggcgcagaggattgaggaggagggatctggcctcctcatggcactgctgccatctttcctcccaggtggaagcctttcagaaggagtctcctggttttcttactggtggccctgcttcttcccattgaaactactcttgtctacttaggtctctctcttcttgctggctgtgactcctccctgactagtggccaaggtgcttttcttcctcccaggcccagtgggtggaatctgtccccacctggcactgaggagaatggtagagaggagaggagagagagagagaatgtgatttttggccttgtggcagcacatcctcacacccaaagaagtttgtaaatgttccagaacaacctagagaacacctgagtactaagcagcagttttgcaaggatgggagactgggatagcttcccatcacagaactgtgttccatcaaaaagacactaagggatttccttctgggcctcagttctatttgtaagatggagaataatcctctctgtgaactccttgcaaagatgatatgaggctaagagaatatcaagtccccaggtctggaagaaaagtagaaaagagtagtactattgtccaatgtcatgaaagtggtaaaagtgggaaccagtgtgctttgaaaccaaattagaaacacattccttgggaaggcaaagttttctgggacttgatcatacattttatatggttgggacttctctcttcgggagatgatatcttgtttaaggagacctcttttcagttcatcaagttcatcagatatttgagtgcccactctgtgcccaaataaatatgagctggggattaaatacgaataagacatggtttctgccatcaaagatggctggtgggagagagagatacacccttattaagtgctttgtgttagtttattcatagctattgttatatatgtcaaggcaagagaggaccagagcaggacagaggcaatgggtattgaagttgaaggggtacatttgataagagagtcggtattgagaagtttaaatttgtgaatttgaaggctgcgtgggtgtggcaggtaagggaaatgaggtatctgggaaggcttgagtgtaggcaaatttattcatcccaagtcaaactcttgatctctctcacgaaaactatgaccccccctggttgcccctgacctctcaatgttggaacaagccacaaccgtggagttatccttgatgactccccattcattatcccttctgtcccaccaccacagctgtcatctgttcaccagaacgttcttttggttacactccatgtgacatcctgaggctgttgcttctctccagcttttctgttaccatcctggtcctggctactgtcacctagtgggccactataatatggcttcctaatggatcttcctgcttcctctgttgcctcattacttttctatatagcagaatgatcttttgaaaatgtgaaccagatcacattattccctagttaaaaccccccaaggcttcccatcacacttggaataaaatccaaaagaatttttctaaaccaaaaatagtaaaaacaattttttttttctgacaatctcttgtcacccaggctggagtacaatggcgcaatctcggctcactgcaaccgccgcctcctaggttcaagcgattctcctgcctcagcctccagagtagctgggattacaggcatgtgccaccacgcctggctaatttttgtatttttagtagagacagggtttcacgatgttggccaggctgctctcgaactcctgacctcaaatgatccaccaccccccttggcctccccaagtgctgggattacaggtgtgagccatcgtgcctagctaaaaacacttaatccaaaattcttaccatggcctgcaaggtcctgtgtaacctggcttcgtcccccctctaaatgctatgaatgtcagatgggcaccgtaaatgtgtgaagggtcagttacctgggtgtaaggcagtagaaggtggggacagaagtgagctggagggcgggcttgtgtcctgcctgcaggatggggggtggctgctacttattcaggaatccagcagaaattgcttcacagaagctagaagtgagcaacttaaataactaaacactatctggaccaaacaaaacactaaggtcggcccgatgcagtccactactctcttattggcagcttctggctcactgttgaacccactggaatgagagcaccaccgggcagactcctggaccatcccactgtcagctctgtggtccaggcacagtacctgggacagtgtaagcactcaatgtgaaactcaagccaggggcaagccacagacctcccagtatcttctccgcgcatcttcccactcccagtctccattgtggttttgtatgttcctaaccacagacttttggcaatgctgtgcacacaaggcctgaggagtatttccttggcaattgtcagaagaatgagactaaaacacttcctttgcgcacctgttcttagaagcagctctggcattactcccgttgtgtatccaggacaggaagtggcagtagaatgttgagttactgaagtcagatgtcttcagttccagttccagctggagagcagatagtaggtccgttgacctctctgagcttgtttcctcagctgcaaaataagaatgaatcctgtgctacccaccttgccatgttgtgtttcagtgagacgagaaaacactaccaaaaagtcattccacagacttctgaggacagaaagtgccctcactcaagcttctcttgtaaccacagagaaggtgtctggatattaacatagagcagaggccaccaaggtttttcttttttttaatcaaaaatcctgcatgtgaaggcagtaattgtatcttaatattataatttcaacatctgtgggtgtgaaatttttcaaaaaaaaaatttggggaaatattttaaatggc

SEQ ID NO: 366778 - DNA, 2472 bp, Homo sapiens
ggcccctcgaggcgctctaacccaggctccgccctcgacttgctctaataaccaggctgcgctcctcgagatgctctaacggccaggccccgccttcaaatgctctaactccaggccccgcccctcgagcgccacaacagccgggccccaccccttgaggtgctttaacggccaggccccgccctgaaggcgttgtaacaaccaggctccgcccccaggcgctctaacggccaggcccagccgcttgaggctccccaacggccaggccgcgcccccgcgtgcgtgcgcggcccggcagagccgtgcgggcgcccgcgtactcactagctgaggtggcagtggttccaccaacatggagctctcgcagatgtcggagctcatggggctgtcggtgttgcttgggctgctggccctgatggcgacggcggcggtagcgcgggggtggctgcgcgcgggggaggagaggagcggccggcccgcctgccaaaaagcaaatggatttccacctgacaaatcttcgggatccaagaagcagaaacaatatcagcggattcggaaggagaagcctcaacaacacaacttcacccaccgcctcctggctgcagctctgaagagccacagcgggaacatatcttgcatggactttagcagcaatggcaaatacctggctacctgtgcagatgatcgcaccatccgcatctggagcaccaaggacttcctgcagcgagagcaccgcagcatgagagccaacgtggagctggaccacgccaccctggtgcgcttcagccctgactgcagagccttcatcgtctggctggccaacggggacaccctccgtgtcttcaagatgaccaagcgggaggatgggggctacaccttcacagccaccccagaggacttccctaaaaagcacaaggcgcctgtcatcgacattggcattgctaacacagggaagtttatcatgactgcctccagtgacaccactgtcctcatctggagcctgaagggtcaagtgctgtctaccatcaacaccaaccagatgaacaacacacacgctgctgtatctccctgtggcagatttgtagcctcgtgtggcttcaccccagatgtgaaggtttgggaagtctgctttggaaagaagggggagttccaggaggtggtgcgagccttcgaactaaagggccactccgcggctgtgcactcgtttgctttctccaacgactcacggaggatggcttctgtctccaaggatggtacatggaaactgtgggacacagatgtggaatacaagaagaagcaggacccctacttgctgaagacaggccgctttgaagaggcggcgggtgccgcgccgtgccgcctggccctctcccccaacgcccaggtcttggccttggccagtggcagtagtattcatctctacaatacccggcggggcgagaaggaggagtgctttgagcgggtccatggcgagtgtatcgccaacttgtcctttgacatcactggccgctttctggcctcctgtggggaccgggcggtgcggctgtttcacaacactcctggccaccgagccatggtggaggagatgcagggccacctgaagcgggcctccaacgagagcacccgccagaggctgcagcagcagctgacccaggcccaagagaccctgaagagcctgggtgccctgaagaagtgactctgggagggcccggcgcagaggattgaggaggagggatctggcctcctcatggcactgctgccatctttcctcccaggtggaagcctttcagaaggagtctcctggttttcttactggtggccctgcttcttcccattgaaactactcttgtctacttaggtctctctcttcttgctggctgtgactcctccctgactagtggccaaggtgcttttcttcctcccaggcccagtgggtggaatctgtccccacctggcactgaggagaatggtagagaggagaggagagagagagagaatgtgatttttggccttgtggcagcacatcctcacacccaaagaagtttgtaaatgttccagaacaacctaaaaaaaaaaaaaaaaaaaaaaaaaaaaaaaacaaaaaaaaaaaacaaaaaaaaaaaaaggggggcgcgcgcgcgccctcaagagagttttccccgcggggggcccccgtcgtcccgggcctcacccgagcattcttcggggacaacaagggggcccccaaaagagaggaggcgccatataatacacccacgagcccgggggcgcggtattaacaacaggccagagcggggaaacaaaggggagcagccagcgggagcatttcgctgtgaaacaggagaccctactaactattgggggcgtggtgagaacaaaattggggggcacaaaaattccccttacaggaatatttaagacagccctccaggggacaatatattaaaattttccagaggttacatatgtcgt

SEQ ID NO: 366779 - DNA, 2442 bp, Homo sapiens
ggcccctcgaggcgctctaacccaggctccgccctcgacttgctctaataaccaggctgcgctcctcgagatgctctaacggccaggccccgccttcaaatgctctaactccaggccccgcccctcgagcgccacaacagccgggccccaccccttgaggtgctttaacggccaggccccgccctgaaggcgttgtaacaaccaggctccgcccccaggcgctctaacggccaggcccagccgcttgaggctccccaacggccaggccgcgcccccgcgtgcgtgcgcggcccggcagagccgtgcgggcgcccgcgtactcactagctgaggtggcagtggttccaccaacatggagctctcgcagatgtcggagctcatggggctgtcggtgttgcttgggctgctggccctgatggcgacggcggcggtagcgcgggggtggctgcgcgcgggggaggagaggagcggccggcccgcctagacggggacccgccttgccgggttaggcgcacctcctggggcgggactggctccaacctgggccccttactgcggctttctctgtggccgaggccaggccgtccccggggtggccaggagagcaccgtaaactcttcagcctgctccgtggccgcgatctcggaaaaagcaccaattctgtgatgtgcagcagcatttactgggcatctatgaccctgtgataggctttggggtctttttctgtaaggagtccagtaaaggagaagtacatctgtattatgaacacctaaatatggcccaggagcttttttcctgttggaattggggagcatctgcagtcatttaccacatgccagctttgtgactcaattaagtatcttttacaaaagtgactggctccactcccccgcacaggactcaacagatgttgacttctcatccccgagttctttcaggccaaaaagcaaatggatttccacctgacaaatcttcgggatccaagaagcagaaacaatatcagcggattcggaaggagaagcctcaacaacacaacttcacccaccgcctcctggctgcagctctgaaggagccttcgaactaaagggccactccgcggctgtgcactcgtttgctttctccaacgactcacggaggatggcttctgtctccaaggatggtacatggaaactgtgggacacagatgtggaatacaagaagaagcaggacccctacttgctgaagacaggccgctttgaagaggcggcgggtgccgcgccgtgccgcctggccctctcccccaacgcccaggtcttggccttggccagtggcagtagtattcatctctacaatacccggcggggcgagaaggaggagtgctttgagcgggtccatggcgagtgtatcgccaacttgtcctttgacatcactggccgctttctggcctcctgtggggaccgggcggtgcggctgtttcacaacactcctggccaccgagccatggtggaggagatgcagggccacctgaagcgggcctccaacgagagcacccgccagaggctgcagcagcagctgacccaggcccaagagaccctgaagagcctgggtgccctgaagaagtgactctgggagggcccggcgcagaggattgaggaggagggatctggcctcctcatggcactgctgccatctttcctcccaggtggaagcctttcagaaggagtctcctggttttcttactggtggccctgcttcttcccattgaaactactcttgtctacttaggtctctctcttcttgctggctgtgactcctccctgactagtggccaaggtgcttttcttcctcccaggcccagtgggtggaatctgtccccacctggcactgaggagaatggtagagaggagaggagagagagagagaatgtgatttttggccttgtggcagcacatcctcacacccaaagaagtttgtaaatgttccagaacaacctagagaacacctgagtactaagcagcagttttgcaaggatgggagactgggatagcttcccatcacagaactgtgttccatcaaaaagacactaagggatttccttctgggcctcagttctatttgtaagatggagaataatcctctctgtgaactccttgcaaagatgatatgaggctaagagaatatcaagtccccaggtctggaagaaaagtagaaaagagtagtactattgtccaatgtcatgaaagtggtaaaagtgggaaccagtgtgctttgaaaccaaattagaaacacattccttgggaaggcaaagttttctgggacttgatcatacattttatatggttgggacttctctcttcgggagatgatatcttgtttaaggagacctcttttcagttcatcaagttcatcagatatttgagtgcccactctgtgcccaaataaatatgagctggggattaaata

SEQ ID NO: 366780 - DNA, 672 bp, Homo sapiens
cagggccgctagagatggttgtgcacattactccctacatagggatgtctggccaaggatccacactccactggccgtgctgtgtacccgcccagcagcatcacccaacccagagagtgcgccttttccactctacatgaaggtgctctgtggacttactgtaaacagcctcctcagtagtcagtcagtagtagagacagaatccaaacccaggtctgattccaaagcctctgttttgtttctgttttctgtttgtttttttttgagacagggtcttgctctgtcactcaggatggaatgcagtagtgttgtgatcatagcttactgcagcctcgaactcctgggctcaaatgatccaaagcattgggattacaggcatgagccaccatacccagccagccaaagcctctgtttttgcccatatcacactcattctcctccagaagacaagggccatatctggttaatctcctgctgttccactcaatgcctggctcatcataggtgggcagtaaatgcttatcagtgagtaactggagaacaacatggcccttccttataggccaaaaagcaaatggatttccacctgacaaatcttcgggatccaagaagcagaaacaatatcagcggattcggaaggagaagcctcaacaacacaacttcacccaccgc

SEQ ID NO: 366781 - DNA, 4476 bp, Homo sapiens
ggcccctcgaggcgctctaacccaggctccgccctcgacttgctctaataaccaggctgcgctcctcgagatgctctaacggccaggccccgccttcaaatgctctaactccaggccccgcccctcgagcgccacaacagccgggccccaccccttgaggtgctttaacggccaggccccgccctgaaggcgttgtaacaaccaggctccgcccccaggcgctctaacggccaggcccagccgcttgaggctccccaacggccaggccgcgcccccgcgtgcgtgcgcggcccggcagagccgtgcgggcgcccgcgtactcactagctgaggtggcagtggttccaccaacatggagctctcgcagatgtcggagctcatggggctgtcggtgttgcttgggctgctggccctgatggcgacggcggcggtagcgcgggggtggctgcgcgcgggggaggagaggagcggccggcccgcctgccaaaaagcaaatggatttccacctgacaaatcttcgggatccaagaagcagaaacaatatcagcggattcggaaggagaagcctcaacaacacaacttcacccaccgcctcctggctgcagctctgaagagccacagcgggaacatatcttgcatggactttagcagcaatggcaaatacctggctacctgtgcagatgatcgcaccatccgcatctggagcaccaaggacttcctgcagcgagagcaccgcagcatgagagccaacgtggagctggaccacgccaccctggtgcgcttcagccctgactgcagagccttcatcgtctggctggccaacggggacaccctccgtgtcttcaagatgaccaagcgggaggatgggggctacaccttcacagccaccccagaggacttccctaaaaagcacaaggcgcctgtcatcgacattggcattgctaacacagggaagtttatcatgactgcctccagtgacaccactgtcctcatctggagcctgaagggtcaagtgctgtctaccatcaacaccaaccagatgaacaacacacacgctgctgtatctccctgtggcagatttgtagcctcgtgtggcttcaccccagatgtgaaggtttgggaagtctgctttggaaagaagggggagttccaggaggtggtgcgagccttcgaactaaagggccactccgcggctgtgcactcgtttgctttctccaacgactcacggaggatggcttctgtctccaaggatggtacatggaaactgtgggacacagatgtggaatacaagaagaagcaggacccctacttgctgaagacaggccgctttgaagaggcggcgggtgcggctgtttcacaacactcctggccaccgagccatggtggaggagatgcagggccacctgaagcgggcctccaacgagagcacccgccagaggctgcagcagcagctgacccaggcccaagagaccctgaagagcctgggtgccctgaagaagtgactctgggagggcccggcgcagaggattgaggaggagggatctggcctcctcatggcactgctgccatctttcctcccaggtggaagcctttcagaaggagtctcctggttttcttactggtggccctgcttcttcccattgaaactactcttgtctacttaggtctctctcttcttgctggctgtgactcctccctgactagtggccaaggtgcttttcttcctcccaggcccagtgggtggaatctgtccccacctggcactgaggagaatggtagagaggagaggagagagagagagaatgtgatttttggccttgtggcagcacatcctcacacccaaagaagtttgtaaatgttccagaacaacctagagaacacctgagtactaagcagcagttttgcaaggatgggagactgggatagcttcccatcacagaactgtgttccatcaaaaagacactaagggatttccttctgggcctcagttctatttgtaagatggagaataatcctctctgtgaactccttgcaaagatgatatgaggctaagagaatatcaagtccccaggtctggaagaaaagtagaaaagagtagtactattgtccaatgtcatgaaagtggtaaaagtgggaaccagtgtgctttgaaaccaaattagaaacacattccttgggaaggcaaagttttctgggacttgatcatacattttatatggttgggacttctctcttcgggagatgatatcttgtttaaggagacctcttttcagttcatcaagttcatcagatatttgagtgcccactctgtgcccaaataaatatgagctggggattaaatacgaataagacatggtttctgccatcaaagatggctggtgggagagagagatacacccttattaagtgctttgtgttagtttattcatagctattgttatatatgtcaaggcaagagaggaccagagcaggacagaggcaatgggtattgaagttgaaggggtacatttgataagagagtcggtattgagaagtttaaatttgtgaatttgaaggctgcgtgggtgtggcaggtaagggaaatgaggtatctgggaaggcttgagtgtaggcaaatttattcatcccaagtcaaactcttgatctctctcacgaaaactatgaccccccctggttgcccctgacctctcaatgttggaacaagccacaaccgtggagttatccttgatgactccccattcattatcccttctgtcccaccaccacagctgtcatctgttcaccagaacgttcttttggttacactccatgtgacatcctgaggctgttgcttctctccagcttttctgttaccatcctggtcctggctactgtcacctagtgggccactataatatggcttcctaatggatcttcctgcttcctctgttgcctcattacttttctatatagcagaatgatcttttgaaaatgtgaaccagatcacattattccctagttaaaaccccccaaggcttcccatcacacttggaataaaatccaaaagaatttttctaaaccaaaaatagtaaaaacaattttttttttctgacaatctcttgtcacccaggctggagtacaatggcgcaatctcggctcactgcaaccgccgcctcctaggttcaagcgattctcctgcctcagcctccagagtagctgggattacaggcatgtgccaccacgcctggctaatttttgtatttttagtagagacagggtttcacgatgttggccaggctgctctcgaactcctgacctcaaatgatccaccaccccccttggcctccccaagtgctgggattacaggtgtgagccatcgtgcctagctaaaaacacttaatccaaaattcttaccatggcctgcaaggtcctgtgtaacctggcttcgtcccccctctaaatgctatgaatgtcagatgggcaccgtaaatgtgtgaagggtcagttacctgggtgtaaggcagtagaaggtggggacagaagtgagctggagggcgggcttgtgtcctgcctgcaggatggggggtggctgctacttattcaggaatccagcagaaattgcttcacagaagctagaagtgagcaacttaaataactaaacactatctggaccaaacaaaacactaaggtcggcccgatgcagtccactactctcttattggcagcttctggctcactgttgaacccactggaatgagagcaccaccgggcagactcctggaccatcccactgtcagctctgtggtccaggcacagtacctgggacagtgtaagcactcaatgtgaaactcaagccaggggcaagccacagacctcccagtatcttctccgcgcatcttcccactcccagtctccattgtggttttgtatgttcctaaccacagacttttggcaatgctgtgcacacaaggcctgaggagtatttccttggcaattgtcagaagaatgagactaaaacacttcctttgcgcacctgttcttagaagcagctctggcattactcccgttgtgtatccaggacaggaagtggcagtagaatgttgagttactgaagtcagatgtcttcagttccagttccagctggagagcagatagtaggtccgttgacctctctgagcttgtttcctcagctgcaaaataagaatgaatcctgtgctacccaccttgccatgttgtgtttcagtgagacgagaaaacactaccaaaaagtcattccacagacttctgaggacagaaagtgccctcactcaagcttctcttgtaaccacagagaaggtgtctggatattaacatagagcagaggccaccaaggtttttcttttttttaatcaaaaatcctgcatgtgaaggcagtaattgtatcttaatattataatttcaacatctgtgggtgtgaaatttttcaaaaaaaaaatttggggaaatattttaaatggc

SEQ ID NO: 366782 - DNA, 2697 bp, Homo sapiens
ggcccctcgaggcgctctaacccaggctccgccctcgacttgctctaataaccaggctgcgctcctcgagatgctctaacggccaggccccgccttcaaatgctctaactccaggccccgcccctcgagcgccacaacagccgggccccaccccttgaggtgctttaacggccaggccccgccctgaaggcgttgtaacaaccaggctccgcccccaggcgctctaacggccaggcccagccgcttgaggctccccaacggccaggccgcgcccccgcgtgcgtgcgcggcccggcagagccgtgcgggcgcccgcgtactcactagctgaggtggcagtggttccaccaacatggagctctcgcagatgtcggagctcatggggctgtcggtgttgcttgggctgctggccctgatggcgacggcggcggtagcgcgggggtggctgcgcgcgggggaggagaggagcggccggcccgcctggcccaggagcttttttcctgttggaattggggagcatctgcagtcatttaccacatgccagctttgtgactcaattaagtatcttttacaaaagtgactggctccactcccccgcacaggactcaacagatgttgacttctcatccccgagttctttcaggccaaaaagcaaatggatttccacctgacaaatcttcgggatccaagaagcagaaacaatatcagcggattcggaaggagaagcctcaacaacacaacttcacccaccgcctcctggctgcagctctgaagagccacagcgggaacatatcttgcatggactttagcagcaatggcaaatacctggctacctgtgcagatgatcgcaccatccgcatctggagcaccaaggacttcctgcagcgagagcaccgcagcatgagagccaacgtggagctggaccacgccaccctggtgcgcttcagccctgactgcagagccttcatcgtctggctggccaacggggacaccctccgtgtcttcaagatgaccaagcgggaggatgggggctacaccttcacagccaccccagaggacttccctaaaaagcacaaggcgcctgtcatcgacattggcattgctaacacagggaagtttatcatgactgcctccagtgacaccactgtcctcatctggagcctgaagggtcaagtgctgtctaccatcaacaccaaccagatgaacaacacacacgctgctgtatctccctgtggcagatttgtagcctcgtgtggcttcaccccagatgtgaaggtttgggaagtctgctttggaaagaagggggagttccaggaggtggtgcgagccttcgaactaaagggccactccgcggctgtgcactcgtttgctttctccaacgactcacggaggatggcttctgtctccaaggatggtacatggaaactgtgggacacagatgtggaatacaagaagaagcaggacccctacttgctgaagacaggccgctttgaagaggcggcgggtgccgcgccgtgccgcctggccctctcccccaacgcccaggtcttggccttggccagtggcagtagtattcatctctacaatacccggcggggcgagaaggaggagtgctttgagcgggtccatggcgagtgtatcgccaacttgtcctttgacatcactggccgctttctggcctcctgtggggaccgggcggtgcggctgtttcacaacactcctggccaccgagccatggtggaggagatgcagggccacctgaagcgggcctccaacgagagcacccgccagaggctgcagcagcagctgacccaggcccaagagaccctgaagagcctgggtgccctgaagaagtgactctgggagggcccggcgcagaggattgaggaggagggatctggcctcctcatggcactgctgccatctttcctcccaggtggaagcctttcagaaggagtctcctggttttcttactggtggccctgcttcttcccattgaaactactcttgtctacttaggtctctctcttcttgctggctgtgactcctccctgactagtggccaaggtgcttttcttcctcccaggcccagtgggtggaatctgtccccacctggcactgaggagaatggtagagaggagaggagagagagagagaatgtgatttttggccttgtggcagcacatcctcacacccaaagaagtttgtaaatgttccagaacaacctagagaacacctgagtactaagcagcagttttgcaaggatgggagactgggatagcttcccatcacagaactgtgttccatcaaaaagacactaagggatttccttctgggcctcagttctatttgtaagatggagaataatcctctctgtgaactccttgcaaagatgatatgaggctaagagaatatcaagtccccaggtctggaagaaaagtagaaaagagtagtactattgtccaatgtcatgaaagtggtaaaagtgggaaccagtgtgctttgaaaccaaattagaaacacattccttgggaaggcaaagttttctgggacttgatcatacattttatatggttgggacttctctcttcgggagatgatatcttgtttaaggagacctcttttcagttcatcaagttcatcagatatttgagtgcccactctgtgcccaaataaatatgagctggggattaaata

SEQ ID NO: 366783 - DNA, 3255 bp, Homo sapiens
ggcccctcgaggcgctctaacccaggctccgccctcgacttgctctaataaccaggctgcgctcctcgagatgctctaacggccaggccccgccttcaaatgctctaactccaggccccgcccctcgagcgccacaacagccgggccccaccccttgaggtgctttaacggccaggccccgccctgaaggcgttgtaacaaccaggctccgcccccaggcgctctaacggccaggcccagccgcttgaggctccccaacggccaggccgcgcccccgcgtgcgtgcgcggcccggcagagccgtgcgggcgcccgcgtactcactagctgaggtggcagtggttccaccaacatggagctctcgcagatgtcggagctcatggggctgtcggtgttgcttgggctgctggccctgatggcgacggcggcggtagcgcgggggtggctgcgcgcgggggaggagaggagcggccggcccgcctgccaaaaagcaaatggatttccacctgacaaatcttcgggatccaagaagcagaaacaatatcagcggattcggaaggagaagcctcaacaacacaacttcacccaccgcctcctggctgcagctctgaagagccacagcgggaacatatcttgcatggactttagcagcaatggcaaatacctggctacctgtgcagatgatcgcaccatccgcatctggagcaccaaggacttcctgcagcgagagcaccgcagcatgagagccaacgtggagctggaccacgccaccctggtgcgcttcagccctgactgcagagccttcatcgtctggctggccaacggggacaccctccgtgtcttcaagatgaccaagcgggaggatgggggctacaccttcacagccaccccagaggacttccctaaaaagcacaaggcgcctgtcatcgacattggcattgctaacacagggaagtttatcatgactgcctccagtgacaccactgtcctcatctggagcctgaagggtcaagtgctgtctaccatcaacaccaaccagatgaacaacacacacgctgctgtatctccctgtggcagatttgtagcctcgtgtggcttcaccccagatgtgaaggtttgggaagtctgctttggaaagaagggggagttccaggaggtggtgcgagccttcgaactaaagggccactccgcggctgtgcactcgtttgctttctccaacgactcacggaggatggcttctgtctccaaggatggtacatggaaactgtgggacacagatgtggaatacaagaagaagcaggacccctacttgctgaagacaggccgctttgaagaggcggcgggtgccgcgccgtgccgcctggccctctcccccaacgcccaggtcttggccttggccagtggcagtagtattcatctctacaatacccggcggggcgagaaggaggagtgctttgagcgggtccatggcgagtgtatcgccaacttgtcctttgacatcactggccgctttctggcctcctgtggggaccgggcggtgcggctgtttcacaacactcctggccaccgagccatggtggaggagatgcagggccacctgaagcgggcctccaacgagagcacccgccagaggctgcagcagcagctgacccaggcccaagagaccctgaagagcctgggtgccctgaagaagtgactctgggagggcccggcgcagaggattgaggaggagggatctggcctcctcatggcactgctgccatctttcctcccaggtggaagcctttcagaaggagtctcctggttttcttactggtggccctgcttcttcccattgaaactactcttgtctacttaggtctctctcttcttgctggctgtgactcctccctgactagtggccaaggtgcttttcttcctcccaggcccagtgggtggaatctgtccccacctggcactgaggagaatggtagagaggagaggagagagagagagaatgtgatttttggccttgtggcagcacatcctcacacccaaagaagtttgtaaatgttccagaacaacctagagaacacctgagtactaagcagcagttttgcaaggatgggagactgggatagcttcccatcacagaactgtgttccatcaaaaagacactaagggatttccttctgggcctcagttctatttgtaagatggagaataatcctctctgtgaactccttgcaaagatgatatgaggctaagagaatatcaagtccccaggtctggaagaaaagtagaaaagagtagtactattgtccaatgtcatgaaagtggtaaaagtgggaaccagtgtgctttgaaaccaaattagaaacacattccttgggaaggcaaagttttctgggacttgatcatacattttatatggttgggacttctctcttcgggagatgatatcttgtttaaggagacctcttttcagttcatcaagttcatcagatatttgagtgcccactctgtgcccaaataaatatgagctggggattaaatacgaataagacatggtttctgccatcaaagatggctggtgggagagagagatacacccttattaagtgctttgtgttagtttattcatagctattgttatatatgtcaaggcaagagaggaccagagcaggacagaggcaatgggtattgaagttgaaggggtacatttgataagagagtcggtattgagaagtttaaatttgtgaatttgaaggctgcgtgggtgtggcaggtaagggaaatgaggtatctgggaaggcttgagtgtaggcaaatttattcatcccaagtcaaactcttgatctctctcacgaaaactatgaccccccctggttgcccctgacctctcaatgttggaacaagccacaaccgtggagttatccttgatgactccccattcattatcccttctgtcccaccaccacagctgtcatctgttcaccagaacgttcttttggttacactccatgtgacatcctgaggctgttgcttctctccagcttttctgttaccatcctggtcctggctactgtcacctagtgggccactataatatggcttcctaatggatcttcctgcttcctctgttgcctcattacttttctatatagcagaatgatcttttgaaaatgtgaaccagatcacattattccctagttaaaaccccccaaggcttcccatcacacttggaataaaatccaaaagaatttttctaaacca

SEQ ID NO: 366784 - DNA, 2676 bp, Homo sapiens
ggcccctcgaggcgctctaacccaggctccgccctcgacttgctctaataaccaggctgcgctcctcgagatgctctaacggccaggccccgccttcaaatgctctaactccaggccccgcccctcgagcgccacaacagccgggccccaccccttgaggtgctttaacggccaggccccgccctgaaggcgttgtaacaaccaggctccgcccccaggcgctctaacggccaggcccagccgcttgaggctccccaacggccaggccgcgcccccgcgtgcgtgcgcggcccggcagagccgtgcgggcgcccgcgtactcactagctgaggtggcagtggttccaccaacatggagctctcgcagatgtcggagctcatggggctgtcggtgttgcttgggctgctggccctgatggcgacggcggcggtagcgcgggggtggctgcgcgcgggggaggagaggagcggccggcccgcctgccaaaaagcaaatggatttccacctgacaaatcttcgggatccaagaagcagaaacaatatcagcggattcggaaggagaagcctcaacaacacaacttcacccaccgcctcctggctgcagctctgaagagccacagcgggaacatatcttgcatggactttagcagcaatggcaaatacctggctacctgtgcagatgatcgcaccatccgcatctggagcaccaaggacttcctgcagcgagagcaccgcagcatgagagccaacgtggagctggaccacgccaccctggtgcgcttcagccctgactgcagagccttcatcgtctggctggccaacggggacaccctccgtgtcttcaagatgaccaagcgggaggatgggggctacaccttcacagccaccccagaggacttccctaaaaagcacaaggcgcctgtcatcgacattggcattgctaacacagggaagtttatcatgactgcctccagtgacaccactgtcctcatctggagcctgaagggtcaagtgctgtctaccatcaacaccaaccagatgaacaacacacacgctgctgtatctccctgtggcagatttgtagcctcgtgtggcttcaccccagatgtgaaggtttgggaagtctgctttggaaagaagggggagttccaggaggtggtgcgagccttcgaactaaagggccactccgcggctgtgcactcgtttgctttctccaacgactcacggaggatggcttctgtctccaaggatggtacatggaaactgtgggacacagatgtggaatacaagaagaagcaggacccctacttgctgaagacaggccgctttgaagaggcggcgggtgccgcgccgtgccgcctggccctctcccccaacgcccaggtcttggccttggccagtggcagtagtattcatctctacaatacccggcggggcgagaaggaggagtgctttgagcgggtccatggcgagtgtatcgccaacttgtcctttgacatcactggccgctttctggcctcctgtggggaccgggcggtgcggctgtttcacaacactcctggccaccgagccatggtggaggagatgcagggccacctgaagcgggcctccaacgagagcacccgccagaggctgcagcagcagctgacccaggcccaagagaccctgaagagcctgggtgccctgaagaagtgactctgggagggcccggcgcagaggattgaggaggagggatctggcctcctcatggcactgctgccatctttcctcccaggtggaagcctttcagaaggagtctcctggttttcttactggtggccctgcttcttcccattgaaactactcttgtctacttaggtctctctcttcttgctggctgtgactcctccctgactagtggccaaggtgcttttcttcctcccaggcccagtgggtggaatctgtccccacctggcactgaggagaatggtagagaggagaggagagagagagagaatgtgatttttggccttgtggcagcacatcctcacacccaaagaagtttgtaaatgttccagaacaacctagagaacacctgagtactaagcagcagttttgcaaggatgggagactgggatagcttcccatcacagaactgtgttccatcaaaaagacactaagggatttccttctgggcctcagttctatttgtaagatggagaataatcctctctgtgaactccttgcaaagatgatatgaggctaagagaatatcaagtccccaggtctggaagaaaagtagaaaagagtagtactattgtccaatgtcatgaaagtggtaaaagtgggaaccagtgtgctttgaaaccaaattagaaacacattccttgggaaggcaaagttttctgggacttgatcatacattttatatggttgggacttctctcttcgggagatgatatcttgtttaaggagacctcttttcagttcatcaagttcatcagatatttgagtgcccactctgtgcccaaataaatatgagctggggattaaatacaacaaacaccaaccatcaaaaaacacccgggttttcttttgtggggcgggagagagatttaaaatgccagggcctttttctctccccctctttacaagggggaatcccgccatgagggaattatccgacactcaaaaac

SEQ ID NO: 366785 - DNA, 2297 bp, Homo sapiens
cggcctcctcgtggtccgacctgcggtttgggcccgcggctggtggggcccggcgactccatgggcctcagtttctcctctgggcccaggagcttttttcctgttggaattggggagcatctgcagtcatttaccacatgccagctttgtgactcaattaagtatcttttacaaaagtgactggctccactcccccgcacaggactcaacagatgttgacttctcatccccgagttctttcaggccaaaaagcaaatggatttccacctgacaaatcttcgggatccaagaagcagaaacaatatcagcggattcggaaggagaagcctcaacaacacaacttcacccaccgcctcctggctgcagctctgaagagccacagcgggaacatatcttgcatggactttagcagcaatggcaaatacctggctacctgtgcagatgatcgcaccatccgcatctggagcaccaaggacttcctgcagcgagagcaccgcagcatgagagccaacgtggagctggaccacgccaccctggtgcgcttcagccctgactgcagagccttcatcgtctggctggccaacggggacaccctccgtgtcttcaagatgaccaagcgggaggatgggggctacaccttcacagccaccccagaggacttccctaaaaagcacaaggcgcctgtcatcgacattggcattgctaacacagggaagtttatcatgactgcctccagtgacaccactgtcctcatctggagcctgaagggtcaagtgctgtctaccatcaacaccaaccagatgaacaacacacacgctgctgtatctccctgtggcagatttgtagcctcgtgtggcttcaccccagatgtgaaggtttgggaagtctgctttggaaagaagggggagttccaggaggtggtgcgagccttcgaactaaagggccactccgcggctgtgcactcgtttgctttctccaacgactcacggaggatggcttctgtctccaaggatggtacatggaaactgtgggacacagatgtggaatacaagaagaagcaggacccctacttgctgaagacaggccgctttgaagaggcggcgggtgccgcgccgtgccgcctggccctctcccccaacgcccaggtcttggccttggccagtggcagtagtattcatctctacaatacccggcggggcgagaaggaggagtgctttgagcgggtccatggcgagtgtatcgccaacttgtcctttgacatcactggccgctttctggcctcctgtggggaccgggcggtgcggctgtttcacaacactcctggccaccgagccatggtggaggagatgcagggccacctgaagcgggcctccaacgagagcacccgccagaggctgcagcagcagctgacccaggcccaagagaccctgaagagcctgggtgccctgaagaagtgactctgggagggcccggcgcagaggattgaggaggagggatctggcctcctcatggcactgctgccatctttcctcccaggtggaagcctttcagaaggagtctcctggttttcttactggtggccctgcttcttcccattgaaactactcttgtctacttaggtctctctcttcttgctggctgtgactcctccctgactagtggccaaggtgcttttcttcctcccaggcccagtgggtggaatctgtccccacctggcactgaggagaatggtagagaggagaggagagagagagagaatgtgatttttggccttgtggcagcacatcctcacacccaaagaagtttgtaaatgttccagaacaacctagagaacacctgagtactaagcagcagttttgcaaggatgggagactgggatagcttcccatcacagaactgtgttccatcaaaaagacactaagggatttccttctgggcctcagttctatttgtaagatggagaataatcctctctgtgaactccttgcaaagatgatatgaggctaagagaatatcaagtccccaggtctggaagaaaagtagaaaagagtagtactattgtccaatgtcatgaaagtggtaaaagtgggaaccagtgtgctttgaaaccaaattagaaacacattccttgggaaggcaaagttttctgggacttgatcatacattttatatggttgggacttctctcttcgggagatgatatcttgtttaaggagacctcttttcagttcatcaagttcatcagatatttgagtgcccactctgtgcccaaataaatatgagctggggattaaata

SEQ ID NO: 366786 - DNA, 4451 bp, Homo sapiens
ggcccctcgaggcgctctaacccaggctccgccctcgacttgctctaataaccaggctgcgctcctcgagatgctctaacggccaggccccgccttcaaatgctctaactccaggccccgcccctcgagcgccacaacagccgggccccaccccttgaggtgctttaacggccaggccccgccctgaaggcgttgtaacaaccaggctccgcccccaggcgctctaacggccaggcccagccgcttgaggctccccaacggccaggccgcgcccccgcgtgcgtgcgcggcccggcagagccgtgcgggcgcccgcgtactcactagctgaggtggcagtggttccaccaacatggagctctcgcagatgtcggagctcatggggctgtcggtgttgcttgggctgctggccctgatggcgacggcggcggtagcgcgggggtggctgcgcgcgggggaggagaggagcggccggcccgcctgccaaaaagcaaatggatttccacctgacaaatcttcgggatccaagaagcagaaacaatatcagcggattcggaaggagaagcctcaacaacacaacttcacccaccgcctcctggctgcagctctgaagagccacagcgggaacatatcttgcatggactttagcagcaatggcaaatacctggctacctgtgcagatgatcgcaccatccgcatctggagcaccaaggacttcctgcagcgagagcaccgcagcatgagagccaacgtggagctggaccacgccaccctggtgcgcttcagccctgactgcagagccttcatcgtctggctggccaacggggacaccctccgtgtcttcaagatgaccaagcgggaggatgggggctacaccttcacagccaccccagaggacttccctaaaaagcacaaggcgcctgtcatcgacattggcattgctaacacagtgacaccactgtcctcatctggagcctgaagggtcaagtgctgtctaccatcaacaccaaccagatgaacaacacacacgctgctgtatctccctgtggcagatttgtagcctcgtgtggcttcaccccagatgtgaaggtttgggaagtctgctttggaaagaagggggagttccaggaggtggtgcgagccttcgaactaaagggccactccgcggctgtgcactcgtttgctttctccaacgactcacggaggatggcttctgtctccaaggatggtacatggaaactgtgggacacagatgtggaatacaagaagaagcaggacccctacttgctgaagacaggccgctttgaagaggcggcgggtgcggctgtttcacaacactcctggccaccgagccatggtggaggagatgcagggccacctgaagcgggcctccaacgagagcacccgccagaggctgcagcagcagctgacccaggcccaagagaccctgaagagcctgggtgccctgaagaagtgactctgggagggcccggcgcagaggattgaggaggagggatctggcctcctcatggcactgctgccatctttcctcccaggtggaagcctttcagaaggagtctcctggttttcttactggtggccctgcttcttcccattgaaactactcttgtctacttaggtctctctcttcttgctggctgtgactcctccctgactagtggccaaggtgcttttcttcctcccaggcccagtgggtggaatctgtccccacctggcactgaggagaatggtagagaggagaggagagagagagagaatgtgatttttggccttgtggcagcacatcctcacacccaaagaagtttgtaaatgttccagaacaacctagagaacacctgagtactaagcagcagttttgcaaggatgggagactgggatagcttcccatcacagaactgtgttccatcaaaaagacactaagggatttccttctgggcctcagttctatttgtaagatggagaataatcctctctgtgaactccttgcaaagatgatatgaggctaagagaatatcaagtccccaggtctggaagaaaagtagaaaagagtagtactattgtccaatgtcatgaaagtggtaaaagtgggaaccagtgtgctttgaaaccaaattagaaacacattccttgggaaggcaaagttttctgggacttgatcatacattttatatggttgggacttctctcttcgggagatgatatcttgtttaaggagacctcttttcagttcatcaagttcatcagatatttgagtgcccactctgtgcccaaataaatatgagctggggattaaatacgaataagacatggtttctgccatcaaagatggctggtgggagagagagatacacccttattaagtgctttgtgttagtttattcatagctattgttatatatgtcaaggcaagagaggaccagagcaggacagaggcaatgggtattgaagttgaaggggtacatttgataagagagtcggtattgagaagtttaaatttgtgaatttgaaggctgcgtgggtgtggcaggtaagggaaatgaggtatctgggaaggcttgagtgtaggcaaatttattcatcccaagtcaaactcttgatctctctcacgaaaactatgaccccccctggttgcccctgacctctcaatgttggaacaagccacaaccgtggagttatccttgatgactccccattcattatcccttctgtcccaccaccacagctgtcatctgttcaccagaacgttcttttggttacactccatgtgacatcctgaggctgttgcttctctccagcttttctgttaccatcctggtcctggctactgtcacctagtgggccactataatatggcttcctaatggatcttcctgcttcctctgttgcctcattacttttctatatagcagaatgatcttttgaaaatgtgaaccagatcacattattccctagttaaaaccccccaaggcttcccatcacacttggaataaaatccaaaagaatttttctaaaccaaaaatagtaaaaacaattttttttttctgacaatctcttgtcacccaggctggagtacaatggcgcaatctcggctcactgcaaccgccgcctcctaggttcaagcgattctcctgcctcagcctccagagtagctgggattacaggcatgtgccaccacgcctggctaatttttgtatttttagtagagacagggtttcacgatgttggccaggctgctctcgaactcctgacctcaaatgatccaccaccccccttggcctccccaagtgctgggattacaggtgtgagccatcgtgcctagctaaaaacacttaatccaaaattcttaccatggcctgcaaggtcctgtgtaacctggcttcgtcccccctctaaatgctatgaatgtcagatgggcaccgtaaatgtgtgaagggtcagttacctgggtgtaaggcagtagaaggtggggacagaagtgagctggagggcgggcttgtgtcctgcctgcaggatggggggtggctgctacttattcaggaatccagcagaaattgcttcacagaagctagaagtgagcaacttaaataactaaacactatctggaccaaacaaaacactaaggtcggcccgatgcagtccactactctcttattggcagcttctggctcactgttgaacccactggaatgagagcaccaccgggcagactcctggaccatcccactgtcagctctgtggtccaggcacagtacctgggacagtgtaagcactcaatgtgaaactcaagccaggggcaagccacagacctcccagtatcttctccgcgcatcttcccactcccagtctccattgtggttttgtatgttcctaaccacagacttttggcaatgctgtgcacacaaggcctgaggagtatttccttggcaattgtcagaagaatgagactaaaacacttcctttgcgcacctgttcttagaagcagctctggcattactcccgttgtgtatccaggacaggaagtggcagtagaatgttgagttactgaagtcagatgtcttcagttccagttccagctggagagcagatagtaggtccgttgacctctctgagcttgtttcctcagctgcaaaataagaatgaatcctgtgctacccaccttgccatgttgtgtttcagtgagacgagaaaacactaccaaaaagtcattccacagacttctgaggacagaaagtgccctcactcaagcttctcttgtaaccacagagaaggtgtctggatattaacatagagcagaggccaccaaggtttttcttttttttaatcaaaaatcctgcatgtgaaggcagtaattgtatcttaatattataatttcaacatctgtgggtgtgaaatttttcaaaaaaaaaatttggggaaatattttaaatggc

SEQ ID NO: 366787 - DNA, 4382 bp, Homo sapiens
ggcccctcgaggcgctctaacccaggctccgccctcgacttgctctaataaccaggctgcgctcctcgagatgctctaacggccaggccccgccttcaaatgctctaactccaggccccgcccctcgagcgccacaacagccgggccccaccccttgaggtgctttaacggccaggccccgccctgaaggcgttgtaacaaccaggctccgcccccaggcgctctaacggccaggcccagccgcttgaggctccccaacggccaggccgcgcccccgcgtgcgtgcgcggcccggcagagccgtgcgggcgcccgcgtactcactagctgaggtggcagtggttccaccaacatggagctctcgcagatgtcggagctcatggggctgtcggtgttgcttgggctgctggccctgatggcgacggcggcggtagcgcgggggtggctgcgcgcgggggaggagaggagcggccggcccgcctagacggggacccgccttgccgggttaggcgcacctcctggggcgggactggctccaacctgggccccttactgcggctttctctgtggccgaggccaggccgtccccggggtggccaggagagcaccgtaaactcttcagcctgctccgtggccgcgatctcggaaaaagcaccaattctgtgatgtgcagcagcatttactgggcatctatgaccctgtgataggctttggggtctttttctgtaaggagtccagtaaaggagaagtacatctgtattatgaacacctaaatatggcccaggagcttttttcctgttggaattggggagcatctgcagtcatttaccacatgccagctttgtgactcaattaagtatcttttacaaaagtgactggctccactcccccgcacaggactcaacagatgttgacttctcatccccgagttctttcaggccaaaaagcaaatggatttccacctgacaaatcttcgggatccaagaagcagaaacaatatcagcggattcggaaggagaagcctcaacaacacaacttcacccaccgcctcctggctgcagctctgaaggagccttcgaactaaagggccactccgcggctgtgcactcgtttgctttctccaacgactcacggaggatggcttctgtctccaaggatggtacatggaaactgtgggacacagatgtggaatacaagaagaagcaggacccctacttgctgaagacaggccgctttgaagaggcggcgggtgcggctgtttcacaacactcctggccaccgagccatggtggaggagatgcagggccacctgaagcgggcctccaacgagagcacccgccagaggctgcagcagcagctgacccaggcccaagagaccctgaagagcctgggtgccctgaagaagtgactctgggagggcccggcgcagaggattgaggaggagggatctggcctcctcatggcactgctgccatctttcctcccaggtggaagcctttcagaaggagtctcctggttttcttactggtggccctgcttcttcccattgaaactactcttgtctacttaggtctctctcttcttgctggctgtgactcctccctgactagtggccaaggtgcttttcttcctcccaggcccagtgggtggaatctgtccccacctggcactgaggagaatggtagagaggagaggagagagagagagaatgtgatttttggccttgtggcagcacatcctcacacccaaagaagtttgtaaatgttccagaacaacctagagaacacctgagtactaagcagcagttttgcaaggatgggagactgggatagcttcccatcacagaactgtgttccatcaaaaagacactaagggatttccttctgggcctcagttctatttgtaagatggagaataatcctctctgtgaactccttgcaaagatgatatgaggctaagagaatatcaagtccccaggtctggaagaaaagtagaaaagagtagtactattgtccaatgtcatgaaagtggtaaaagtgggaaccagtgtgctttgaaaccaaattagaaacacattccttgggaaggcaaagttttctgggacttgatcatacattttatatggttgggacttctctcttcgggagatgatatcttgtttaaggagacctcttttcagttcatcaagttcatcagatatttgagtgcccactctgtgcccaaataaatatgagctggggattaaatacgaataagacatggtttctgccatcaaagatggctggtgggagagagagatacacccttattaagtgctttgtgttagtttattcatagctattgttatatatgtcaaggcaagagaggaccagagcaggacagaggcaatgggtattgaagttgaaggggtacatttgataagagagtcggtattgagaagtttaaatttgtgaatttgaaggctgcgtgggtgtggcaggtaagggaaatgaggtatctgggaaggcttgagtgtaggcaaatttattcatcccaagtcaaactcttgatctctctcacgaaaactatgaccccccctggttgcccctgacctctcaatgttggaacaagccacaaccgtggagttatccttgatgactccccattcattatcccttctgtcccaccaccacagctgtcatctgttcaccagaacgttcttttggttacactccatgtgacatcctgaggctgttgcttctctccagcttttctgttaccatcctggtcctggctactgtcacctagtgggccactataatatggcttcctaatggatcttcctgcttcctctgttgcctcattacttttctatatagcagaatgatcttttgaaaatgtgaaccagatcacattattccctagttaaaaccccccaaggcttcccatcacacttggaataaaatccaaaagaatttttctaaaccaaaaatagtaaaaacaattttttttttctgacaatctcttgtcacccaggctggagtacaatggcgcaatctcggctcactgcaaccgccgcctcctaggttcaagcgattctcctgcctcagcctccagagtagctgggattacaggcatgtgccaccacgcctggctaatttttgtatttttagtagagacagggtttcacgatgttggccaggctgctctcgaactcctgacctcaaatgatccaccaccccccttggcctccccaagtgctgggattacaggtgtgagccatcgtgcctagctaaaaacacttaatccaaaattcttaccatggcctgcaaggtcctgtgtaacctggcttcgtcccccctctaaatgctatgaatgtcagatgggcaccgtaaatgtgtgaagggtcagttacctgggtgtaaggcagtagaaggtggggacagaagtgagctggagggcgggcttgtgtcctgcctgcaggatggggggtggctgctacttattcaggaatccagcagaaattgcttcacagaagctagaagtgagcaacttaaataactaaacactatctggaccaaacaaaacactaaggtcggcccgatgcagtccactactctcttattggcagcttctggctcactgttgaacccactggaatgagagcaccaccgggcagactcctggaccatcccactgtcagctctgtggtccaggcacagtacctgggacagtgtaagcactcaatgtgaaactcaagccaggggcaagccacagacctcccagtatcttctccgcgcatcttcccactcccagtctccattgtggttttgtatgttcctaaccacagacttttggcaatgctgtgcacacaaggcctgaggagtatttccttggcaattgtcagaagaatgagactaaaacacttcctttgcgcacctgttcttagaagcagctctggcattactcccgttgtgtatccaggacaggaagtggcagtagaatgttgagttactgaagtcagatgtcttcagttccagttccagctggagagcagatagtaggtccgttgacctctctgagcttgtttcctcagctgcaaaataagaatgaatcctgtgctacccaccttgccatgttgtgtttcagtgagacgagaaaacactaccaaaaagtcattccacagacttctgaggacagaaagtgccctcactcaagcttctcttgtaaccacagagaaggtgtctggatattaacatagagcagaggccaccaaggtttttcttttttttaatcaaaaatcctgcatgtgaaggcagtaattgtatcttaatattataatttcaacatctgtgggtgtgaaatttttcaaaaaaaaaatttggggaaatattttaaatggc

SEQ ID NO: 366788 - DNA, 1519 bp, Homo sapiens
ttttacaggaacaacatgctccgaaaatgaagttttaaaggcttctgggttgtatggcagatttgtagcctcgtgtggcttcaccccagatgtgaaggtttgggaagtctgctttggaaagaagggggagttccaggaggtggtgcgagccttcgaactaaagggccactccgcggctgtgcactcgtttgctttctccaacgactcacggaggatggcttctgtctccaaggatggtacatggaaactgtgggacacagatgtggaatacaagaagaagcaggacccctacttgctgaagacaggccgctttgaagaggcggcgggtgccgcgccgtgccgcctggccctctcccccaacgcccaggtcttggccttggccagtggcagtagtattcatctctacaatacccggcggggcgagaaggaggagtgctttgagcgggtccatggcgagtgtatcgccaacttgtcctttgacatcactggccgctttctggcctcctgtggggaccgggcggtgcggctgtttcacaacactcctggccaccgagccatggtggaggagatgcagggccacctgaagcgggcctccaacgagagcacccgccagaggctgcagcagcagctgacccaggcccaagagaccctgaagagcctgggtgccctgaagaagtgactctgggagggcccggcgcagaggattgaggaggagggatctggcctcctcatggcactgctgccatctttcctcccaggtggaagcctttcagaaggagtctcctggttttcttactggtggccctgcttcttcccattgaaactactcttgtctacttaggtctctctcttcttgctggctgtgactcctccctgactagtggccaaggtgcttttcttcctcccaggcccagtgggtggaatctgtccccacctggcactgaggagaatggtagagaggagaggagagagagagagaatgtgatttttggccttgtggcagcacatcctcacacccaaagaagtttgtaaatgttccagaacaacctagagaacacctgagtactaagcagcagttttgcaaggatgggagactgggatagcttcccatcacagaactgtgttccatcaaaaagacactaagggatttccttctgggcctcagttctatttgtaagatggagaataatcctctctgtgaactccttgcaaagatgatatgaggctaagagaatatcaagtccccaggtctggaagaaaagtagaaaagagtagtactattgtccaatgtcatgaaagtggtaaaagtgggaaccagtgtgctttgaaaccaaattagaaacacattccttgggaaggcaaagttttctgggacttgatcatacattttatatggttgggacttctctcttcgggagatgatatcttgtttaaggagacctcttttcagttcatcaagttcatcagatatttgagtgcccactctgtgcccaaataaatatgagctggggattaaata

SEQ ID NO: 366789 - DNA, 971 bp, Homo sapiens
tgagacggagtctcactctgtcgcccaggctggagtgcagtggcatgatcttggctcactgcaacccctgcctatcgggttcaagcaattctcccgcctcagcctcctgagtagctgggattacaggcacacgccactacacctggctgatttttgtatttttagtagagacggggtttcaccatgttggtcaggctgatctggaactcctgacttcgtgatccgcctgcctcggcctcccaaagttctgggattacaggcgtgagccactgcgcccagccaggaactggctttttaaaggaattttgtgtggacccttttacaaataaccataattctttttttattttttctgagacagagtctcgctgtgttgctcaggctgaagtgattctcctgtctcagcctccttcacctcccaggttcaagtaattctcctgtctcagcctcccgagtagctgggatacaggcacacaccaccatgcctggctagtttttttgtatttttagtagagacaggggtttcaccatgttggccaggctggtcttgaactcctgacctcaggtgatctacccgcctcggcctcccaaaatgttggcattacaggccaccacacccggcaataactgattcttaatgcacctggttcttaggtttggatttggggtttcaaattcaaatcaaagtctcctggggtataagggcccttggagatcatttgaaccaagctctagctcctttggtcttggggacagctccaattactagaacatgatttaaattgagccacacagtcctttgcctggggattttgcagcctgtacttactggaggcatttccgtgttcgcacagcaggcccttctgatcagctctcaggccttgctgacctcctgggccaacactgagccattagcccctgtcagctatgtcttgctggtggctttagtagggacataggagggcctctca

SEQ ID NO: 366790 - DNA, 3008 bp, Homo sapiens
cccaagtttgttgtgaccggcgggggacgccggtggtggcggcagcggcggctgcgggggcaccgggccgcggcgccaccatggcggtgcgacaggcgctgggccgcggcctgcagctgggtcgagcgctgctgctgcgcttcacgggcaagcccggccgggcctacggcttggggcggccgggcccggcggcgggctgtgtccgcggggagcgtccaggctgggccgcaggaccgggcgcggagcctcgcagggtcgggctcgggctccctaaccgtctccgcttcttccgccagtcggtggccgggctggcggcgcggttgcagcggcagttcgtggtgcgggcctggggctgcgcgggcccttgcggccgggcagtctttctggccttcgggctagggctgggcctcatcgaggaaaaacaggcggagagccggcgggcggtctcggcctgtcaggagatccaggcaatttttacccagaaaagcaagccggggcctgacccgttggacacgagacgcttgcagggctttcggctggaggagtatctgatagggcagtccattggtaagggctgcagtgctgctgtgtatgaagccaccatgcctacattgccccagaacctggaggtgacaaagagcaccgggttgcttccagggagaggcccaggtaccagtgcaccaggagaagggcaggagcgagctccgggggcccctgccttccccttggccatcaagatgatgtggaacatctcggcaggttcctccagcgaagccatcttgaacacaatgagccaggagctggtcccagcgagccgagtggccttggctggggagtatggagcagtcacttacagaaaatccaagagaggtcccaagcaactagcccctcaccccaacatcatccgggttctccgcgccttcacctcttccgtgccgctgctgccaggggccctggtcgactaccctgatgtgctgccctcacgcctccaccctgaaggcctgggccatggccggacgctgttcctcgttatgaagaactatccctgtaccctgcgccagtacctttgtgtgaacacacccagcccccgcctcgccgccatgatgctgctgcagctgctggaaggcgtggaccatctggttcaacagggcatcgcgcacagagacctgaaatccgacaacatccttgtggagctggacccagacggctgcccctggctggtgatcgcagattttggctgctgcctggctgatgagagcatcggcctgcagttgcccttcagcagctggtacgtggatcggggcggaaacggctgtctgatggccccagaggtgagtcccgagtgtgtcatgcgccatcggcagcccttcccccacatgtccactgaatgcaggagactcgatgccttgtgataacccaacacctccatcttttctgacccataatttggcacaagttccttccctgccactttgctttcctccggcgttccctcatgttccaggagaatgcaagtcctgtcacataaaccaggtggtctaagcagaccccttctgggtctgagccacagctcactcaagctctgggttccttgggacagagttcagattagcccatggatcaggtgatgtgcaggacatgaaaaggttagatgggcgggcagcgtgatgtctcacccactgcttctgagcaggtgtccacggcccgtcctggccccagggcagtgattgactacagcaaggctgatgcctgggcagtgggagccatcgcctatgaaatcttcgggcttgtcaatcccttctacggccagggcaaggcccaccttgaaagccgcagctaccaagaggctcagctacctgcactgcccgagtcagtgcctccagacgtgagacagttggtgagggcactgctccagcgagaggccagcaagagaccatctgcccgagtagccgcaaatgtgcttcatctaagcctctggggtgaacatattctagccctgaagaatctgaagttagacaagatggttggctggctcctccaacaatcggccgccactttgttggccaacaggctcacagagaagtgttgtgtggaaacaaaaatgaagatgctctttctggctaacctggagtgtgaaacgctctgccaggcagccctcctcctctgctcatggagggcagccctgtgatgtccctgcatggagctggtgaattactaaaagaacttggcatcctctgtgtcgtgatggtctgtgaatggtgagggtgggagtcaggagacaagacagcgcagagagggctggttagccggaaaaggcctcgggcttggcaaatggaagaacttgagtgagagttcagtctgcagtcctgtgctcacagacatctgaaaagtgaatggccaagctggtctagtagatgaggctggactgaggaggggtaggcctgcatccacagagaggatccaggccaaggcactggctgtcagtggcagagtttggctgtgacctttgcccctaacacgaggaactcgtttgaagggggcagcgtagcatgtctgatttgccacctggatgaaggcagacatcaacatgggtcagcacgttcagttacgggagtgggaaattacatgaggcctgggcctctgcgttcccaagctgtgcgttctggaccagctactgaattattaatctcacttagcgaaagtgacggatgagcagtaagtaagtaagtgtggggatttaaacttgagggtttccctcctgactagcctctcttacaggaattgtgaaatattaaatgcaaatttacaactgcagatgacgtatgtgccttgaactgaatatttggctttaagaatgattcttatactctgaaggtgagaatattttgtgggcaggtatcaacattggggaagagatttcatgtctaactaactaactttatacatgatttttaggaagctattgcctaaatcagcgtcaacatgcagtaaaggttgtcttcaactga

SEQ ID NO: 366791 - DNA, 2625 bp, Homo sapiens
cccaagtttgttgtgaccggcgggggacgccggtggtggcggcagcggcggctgcgggggcaccgggccgcggcgccaccatggcggtgcgacaggcgctgggccgcggcctgcagctgggtcgagcgctgctgctgcgcttcacgggcaagcccggccgggcctacggcttggggcggccgggcccggcggcgggctgtgtccgcggggagcgtccaggctgggccgcaggaccgggcgcggagcctcgcagggtcgggctcgggctccctaaccgtctccgcttcttccgccagtcggtggccgggctggcggcgcggttgcagcggcagttcgtggtgcgggcctggggctgcgcgggcccttgcggccgggcagtctttctggccttcgggctagggctgggcctcatcgaggaaaaacaggcggagagccggcgggcggtctcggcctgtcaggagatccaggcaatttttacccagaaaagcaagccggggcctgacccgttggacacgagacgcttgcagggctttcggctggaggagtatctgatagggcagtccattggtaagggctgcagtgctgctgtgtatgaagccaccatgcctacattgccccagaacctggaggtgacaaagagcaccgggttgcttccagggagaggcccaggtaccagtgcaccaggagaagggcaggagcgagctccgggggcccctgccttccccttggccatcaagatgatgtggaacatctcggcaggttcctccagcgaagccatcttgaacacaatgagccaggagctggtcccagcgagccgagtggccttggctggggagtatggagcagtcacttacagaaaatccaagagaggtcccaagcaactagcccctcaccccaacatcatccgggttctccgcgccttcacctcttccgtgccgctgctgccaggggccctggtcgactaccctgatgtgctgccctcacgcctccaccctgaaggcctgggccatggccggacgctgttcctcgttatgaagaactatccctgtaccctgcgccagtacctttgtgtgaacacacccagcccccgcctcgccgccatgatgctgctgcagctgctggaaggcgtggaccatctggttcaacagggcatcgcgcacagagacctgaaatccgacaacatccttgtggagctggacccagacggctgcccctggctggtgatcgcagattttggctgctgcctggctgatgagagcatcggcctgcagttgcccttcagcagctggtacgtggatcggggcggaaacggctgtctgatggccccagagcccagggcagtgattgactacagcaaggctgatgcctgggcagtgggagccatcgcctatgaaatcttcgggcttgtcaatcccttctacggccagggcaaggcccaccttgaaagccgcagctaccaagaggctcagctacctgcactgcccgagtcagtgcctccagacgtgagacagttggtgagggcactgctccagcgagaggccagcaagagaccatctgcccgagtagccgcaaatgtgcttcatctaagcctctggggtgaacatattctagccctgaagaatctgaagttagacaagatggttggctggctcctccaacaatcggccgccactttgttggccaacaggctcacagagaagtgttgtgtggaaacaaaaatgaagatgctctttctggctaacctggagtgtgaaacgctctgccaggcagccctcctcctctgctcatggagggcagccctgtgatgtccctgcatggagctggtgaattactaaaagaacttggcatcctctgtgtcgtgatggtctgtgaatggtgagggtgggagtcaggagacaagacagcgcagagagggctggttagccggaaaaggcctcgggcttggcaaatggaagaacttgagtgagagttcagtctgcagtcctgtgctcacagacatctgaaaagtgaatggccaagctggtctagtagatgaggctggactgaggaggggtaggcctgcatccacagagaggatccaggccaaggcactggctgtcagtggcagagtttggctgtgacctttgcccctaacacgaggaactcgtttgaagggggcagcgtagcatgtctgatttgccacctggatgaaggcagacatcaacatgggtcagcacgttcagttacgggagtgggaaattacatgaggcctgggcctctgcgttcccaagctgtgcgttctggaccagctactgaattattaatctcacttagcgaaagtgacggatgagcagtaagtaagtaagtgtggggatttaaacttgagggtttccctcctgactagcctctcttacaggaattgtgaaatattaaatgcaaatttacaactgcagatgacgtatgtgccttgaactgaatatttggctttaagaatgattcttatactctgaaggtgagaatattttgtgggcaggtatcaacattggggaagagatttcatgtctaactaactaactttatacatgatttttaggaagctattgcctaaatcagcgtcaacatgcagtaaaggttgtcttcaactga

SEQ ID NO: 366792 - DNA, 2368 bp, Homo sapiens
tcctatacacacatacctatggtaaagtttaatttataaattaggcacagtaaaaaattaaagataacataaaatagaataattatgacaatatactgtaataaaagttatgtgaatgtggtctctctctctctcctctctctaaatatcttcttgtactcacctattctcaaactgtagataactgaaattgcagaaagcaaaactgtggataaggttggggctactgcaactcagccaaggacttacagtggcagacctggaatgcaaacccaggcagtctgataccagggtttctccacctgtgttctgccacatgggatggataggatggatgggtgtacggatggacggacggacagacggatggacaaatggattgaaggatgggtaggggagtcatcagatgtgttctccaacaccatgtacagtacctggcacatagcaaatctatgataaacatttgatagtaagtgaataatgaatgtcagtgccagtgttggtgtggccttaggttattctttccaggtgttgtatctgatgctggcctcatatgtttgtctcacttggctgactagaaaatccaagagaggtcccaagcaactagcccctcaccccaacatcatccgggttctccgcgccttcacctcttccgtgccgctgctgccaggggccctggtcgactaccctgatgtgctgccctcacgcctccaccctgaaggcctgggccatggccggacgctgttcctcgttatgaagaactatccctgtaccctgcgccagtacctttgtgtgaacacacccagcccccgcctcgccgccatgatgctgctgcagctgctggaaggcgtggaccatctggttcaacagggcatcgcgcacagagacctgaaatccgacaacatccttgtggagctggacccagacggctgcccctggctggtgatcgcagattttggctgctgcctggctgatgagagcatcggcctgcagttgcccttcagcagctggtacgtggatcggggcggaaacggctgtctgatggccccagaggtgtccacggcccgtcctggccccagggcagtgattgactacagcaaggctgatgcctgggcagtgggagccatcgcctatgaaatcttcgggcttgtcaatcccttctacggccagggcaaggcccaccttgaaagccgcagctaccaagaggctcagctacctgcactgcccgagtcagtgcctccagacgtgagacagttggtgagggcactgctccagcgagaggccagcaagagaccatctgcccgagtagccgcaaatgtgcttcatctaagcctctggggtgaacatattctagccctgaagaatctgaagttagacaagatggttggctggctcctccaacaatcggccgccactttgttggccaacaggctcacagagaagtgttgtgtggaaacaaaaatgaagatgctctttctggctaacctggagtgtgaaacgctctgccaggcagccctcctcctctgctcatggagggcagccctgtgatgtccctgcatggagctggtgaattactaaaagaacttggcatcctctgtgtcgtgatggtctgtgaatggtgagggtgggagtcaggagacaagacagcgcagagagggctggttagccggaaaaggcctcgggcttggcaaatggaagaacttgagtgagagttcagtctgcagtcctgtgctcacagacatctgaaaagtgaatggccaagctggtctagtagatgaggctggactgaggaggggtaggcctgcatccacagagaggatccaggccaaggcactggctgtcagtggcagagtttggctgtgacctttgcccctaacacgaggaactcgtttgaagggggcagcgtagcatgtctgatttgccacctggatgaaggcagacatcaacatgggtcagcacgttcagttacgggagtgggaaattacatgaggcctgggcctctgcgttcccaagctgtgcgttctggaccagctactgaattattaatctcacttagcgaaagtgacggatgagcagtaagtaagtaagtgtggggatttaaacttgagggtttccctcctgactagcctctcttacaggaattgtgaaatattaaatgcaaatttacaactgcagatgacgtatgtgccttgaactgaatatttggctttaagaatgattcttatactctgaaggtgagaatattttgtgggcaggtatcaacattggggaagagatttcatgtctaactaactaactttatacatgatttttaggaagctattgcctaaatcagcgtcaacatgcagtaaaggttgtcttcaactga

SEQ ID NO: 366793 - DNA, 2037 bp, Homo sapiens
cccaagtttgttgtgaccggcgggggacgccggtggtggcggcagcggcggctgcgggggcaccgggccgcggcgccaccatggcggtgcgacaggcgctgggccgcggcctgcagctgggtcgagcgctgctgctgcgcttcacgggcaagcccggccgggcctacggcttggggcggccgggcccggcggcgggctgtgtccgcggggagcgtccaggctgggccgcaggaccgggcgcggagcctcgcagggtcgggctcgggctccctaaccgtctccgcttcttccgccagtcggtggccgggctggcggcgcggttgcagcggcagttcgtggtgcgggcctggggctgcgcgggcccttgcggccgggcagtctttctggccttcgggggccatggccggacgctgttcctcgttatgaagaactatccctgtaccctgcgccagtacctttgtgtgaacacacccagcccccgcctcgccgccatgatgctgctgcagctgctggaaggcgtggaccatctggttcaacagggcatcgcgcacagagacctgaaatccgacaacatccttgtggagctggacccagacggctgcccctggctggtgatcgcagattttggctgctgcctggctgatgagagcatcggcctgcagttgcccttcagcagctggtacgtggatcggggcggaaacggctgtctgatggccccagaggtgtccacggcccgtcctggccccagggcagtgattgactacagcaaggctgatgcctgggcagtgggagccatcgcctatgaaatcttcgggcttgtcaatcccttctacggccagggcaaggcccaccttgaaagccgcagctaccaagaggctcagctacctgcactgcccgagtcagtgcctccagacgtgagacagttggtgagggcactgctccagcgagaggccagcaagagaccatctgcccgagtagccgcaaatgtgcttcatctaagcctctggggtgaacatattctagccctgaagaatctgaagttagacaagatggttggctggctcctccaacaatcggccgccactttgttggccaacaggctcacagagaagtgttgtgtggaaacaaaaatgaagatgctctttctggctaacctggagtgtgaaacgctctgccaggcagccctcctcctctgctcatggagggcagccctgtgatgtccctgcatggagctggtgaattactaaaagaacttggcatcctctgtgtcgtgatggtctgtgaatggtgagggtgggagtcaggagacaagacagcgcagagagggctggttagccggaaaaggcctcgggcttggcaaatggaagaacttgagtgagagttcagtctgcagtcctgtgctcacagacatctgaaaagtgaatggccaagctggtctagtagatgaggctggactgaggaggggtaggcctgcatccacagagaggatccaggccaaggcactggctgtcagtggcagagtttggctgtgacctttgcccctaacacgaggaactcgtttgaagggggcagcgtagcatgtctgatttgccacctggatgaaggcagacatcaacatgggtcagcacgttcagttacgggagtgggaaattacatgaggcctgggcctctgcgttcccaagctgtgcgttctggaccagctactgaattattaatctcacttagcgaaagtgacggatgagcagtaagtaagtaagtgtggggatttaaacttgagggtttccctcctgactagcctctcttacaggaattgtgaaatattaaatgcaaatttacaactgcagatgacgtatgtgccttgaactgaatatttggctttaagaatgattcttatactctgaaggtgagaatattttgtgggcaggtatcaacattggggaagagatttcatgtctaactaactaactttatacatgatttttaggaagctattgcctaaatcagcgtcaacatgcagtaaaggttgtcttcaactga

SEQ ID NO: 366794 - DNA, 2212 bp, Homo sapiens
cccaagtttgttgtgaccggcgggggacgccggtggtggcggcagcggcggctgcgggggcaccgggccgcggcgccaccatggcggtgcgacaggcgctgggccgcggcctgcagctgggtcgagcgctgctgctgcgcttcacgggcaagcccggccgggcctacggcttggggcggccgggcccggcggcgggctgtgtccgcggggagcgtccaggctgggccgcaggaccgggcgcggagcctcgcagggtcgggctcgggctccctaaccgtctccgcttcttccgccagtcggtggccgggctggcggcgcggttgcagcggcagttcgtggtgcgggcctggggctgcgcgggcccttgcggccgggcagtctttctggccttcgggctagggctgggcctcatcgaggaaaaacaggcggagagccggcgggcggtctcggcctgtcaggagatccaggcaatttttacccagaaaagcaagccggggcctgacccgttggacacgagacgcttgcagggctttcggctggaggagtatctgatagggcagtccattggtaagggctgcagtgctgctgtgtatgaagccaccatgcctacattgccccagaacctggaggtgacaaagagcaccgggttgcttccagggagaggcccaggtaccagtgcaccaggagaagggcaggagcgagctccgggggcccctgccttccccttggccatcaagatgatgtggaacatctcggcaggttcctccagcgaagccatcttgaacacaatgagccaggagctggtcccagcgagccgagtggccttggctggggagtatggagcagtcacttacagaaaatccaagagaggtcccaagcaactagcccctcaccccaacatcatccgggttctccgcgccttcacctcttccgtgccgctgctgccaggggccctggtcgactaccctgatgtgctgccctcacgcctccaccctgaaggcctgggccatggccggacgctgttcctcgttatgaagaactatccctgtaccctgcgccagtacctttgtgtgaacacacccagcccccgcctcgccgccatgatgctgctgcagctgctggaaggcgtggaccatctggttcaacagggcatcgcgcacagagacctgaaatccgacaacatccttgtggagctggacccagacggctgcccctggctggtgatcgcagattttggctgctgcctggctgatgagagcatcggcctgcagttgcccttcagcagctggtacgtggatcggggcggaaacggctgtctgatggccccagaggtgtccacggcccgtcctggccccagggcagtgattgactacagcaaggctgatgcctgggcagtgggagccatcgcctatgaaatcttcgggcttgtcaatcccttctacggccagggcaaggcccaccttgaaagccgcagctaccaagaggctcagctacctgcactgcccgagtcagtgcctccagacgtgagacagttggtgagggcactgctccagcgagaggccagcaagagaccatctgcccgagtagccgcaaatgtgcttcatctaagcctctggggtgaacatattctagccctgaagaatctgaagttagacaagatggttggctggctcctccaacaatcggccgccactttgttggccaacaggctcacagagaagtgttgtgtggaaacaaaaatgaagatgctctttctggctaacctggagtgtgaaacgctctgccaggcagccctcctcctctgctcatggagggcagccctgtgatgtccctgcatggagctggtgaattactaaaagaacttggcatcctctgtgtcgtgatggtctgtgaatggtgagggtgggagtcaggagacaagacagcgcagagagggctggttagccggaaaaggcctcgggcttggcaaatggaagaacttgagtgagagttcagtctgcagtcctgtgctcacagacatctgaaaagtgaatggccaagctggtctagtagatgaggctggactgaggaggggtaggcctgcatccacagagaggatccaggccaaggcactggctgtcagtggcagaagcaggaagcagcaggaagcggcagaagcaggaagcaggcagaagcaggaagcagcagaagcaggaagcggcagaacagaacg

SEQ ID NO: 366795 - DNA, 1872 bp, Homo sapiens
cccaagtttgttgtgaccggcgggggacgccggtggtggcggcagcggcggctgcgggggcaccgggccgcggcgccaccatggcggtgcgacaggcgctgggccgcggcctgcagctgggtcgagcgctgctgctgcgcttcacgggcaagcccggccgggcctacggcttggggcggccgggcccggcggcgggctgtgtccgcggggagcgtccaggctgggccgcaggaccgggcgcggagcctcgcagggtcgggctcgggctccctaaccgtctccgcttcttccgccagtcggtggccgggctggcggcgcggttgcagcggcagttcgtggtgcgggcctggggctgcgcgggcccttgcggccgggcagtctttctggccttcgggctagggctgggcctcatcgaggaaaaacaggcggagagccggcgggcggtctcggcctgtcaggagatccaggcaatttttacccagaaaagcaagccggggcctgacccgttggacacgagacgcttgcagggctttcggctggaggagtatctgatagggcagtccattggtaagggctgcagtgctgctgtgtatgaagccaccatgcctacattgccccagaacctggaggtgacaaagagcaccgggttgcttccagggagaggcccaggtaccagtgcaccaggagaagggcaggagcgagctccgggggcccctgccttccccttggccatcaagatgatgtggaacatctcggcaggttcctccagcgaagccatcttgaacacaatgagccaggagctggtcccagcgagccgagtggccttggctggggagtatggagcagtcacttacagaaaatccaagagaggtcccaagcaactagcccctcaccccaacatcatccgggttctccgcgccttcacctcttccgtgccgctgctgccaggggccctggtcgactaccctgatgtgctgccctcacgcctccaccctgaaggcctgggccatggccggacgctgttcctcgttatgaagaactatccctgtaccctgcgccagtacctttgtgtgaacacacccagcccccgcctcgccgccatgatgctgctgcagctgctggaaggcgtggaccatctggttcaacagggcatcgcgcacagagacctgaaatccgacaacatccttgtggagctggacccagacggctgcccctggctggtgatcgcagattttggctgctgcctggctgatgagagcatcggcctgcagttgcccttcagcagctggtacgtggatcggggcggaaacggctgtctgatggccccagaggtgtccacggcccgtcctggccccagggcagtgattgactacagcaaggctgatgcctgggcagtgggagccatcgcctatgaaatcttcgggcttgtcaatcccttctacggccagggcaaggcccaccttgaaagccgcagctaccaagaggctcagctacctgcactgcccgagtcagtgcctccagacgtgagacagttggtgagggcactgctccagcgagaggccagcaagagaccatctgcccgagtagccgcaaatgtgcttcatctaagcctctggggtgaacatattctagccctgaagaatctgaagttagacaagatggttggctggctcctccaacaatcggccgccactttgttggccaacaggctcacagagaagtgttgtgtggaaacaaaaatgaagatgctctttctggctaacctggagtgtgaaacgctctgccaggcagccctcctcctctgctcatggagggcagccctgtgatgtccctgcatggagctggtgaattactaaaagaacttggcatcct

SEQ ID NO: 366796 - DNA, 1511 bp, Homo sapiens
agctgagccatacctgcatcccagcactgttctgccactccgttaactgctctctgtacgtggcctgctatcttggtgcgcagtgaaggttagaataacagctgcaaccagttatgaaatgatagaggagactacttacctggttcaagggaccagatagctgtgcacaagaggcactaggctttccacccagggggaaaggctatttcaacaatgcatgctgccccatgcagaggtgtacacatggaaaagcttggagcacgggtaggggacaggcagtatttgtcacctgagtgaagggcatcagtaggagatagggtagaggaagaattgggttgggaccagagaagggaagaccctcactaacaaagcaggctttgggttgagactgtgttaacagatgttctagctacagcttcccttcctgttgcagagaccatctgcccgagtagccgcaaatgtgcttcatctaagcctctggggtgaacatattctagccctgaagaatctgaagttagacaagatggttggctggctcctccaacaatcggccgccactttgttggccaacaggctcacagagaagtgttgtgtggaaacaaaaatgaagatgctctttctggctaacctggagtgtgaaacgctctgccaggcagccctcctcctctgctcatggagggcagccctgtgatgtccctgcatggagctggtgaattactaaaagaacttggcatcctctgtgtcgtgatggtctgtgaatggtgagggtgggagtcaggagacaagacagcgcagagagggctggttagccggaaaaggcctcgggcttggcaaatggaagaacttgagtgagagttcagtctgcagtcctgtgctcacagacatctgaaaagtgaatggccaagctggtctagtagatgaggctggactgaggaggggtaggcctgcatccacagagaggatccaggccaaggcactggctgtcagtggcagagtttggctgtgacctttgcccctaacacgaggaactcgtttgaagggggcagcgtagcatgtctgatttgccacctggatgaaggcagacatcaacatgggtcagcacgttcagttacgggagtgggaaattacatgaggcctgggcctctgcgttcccaagctgtgcgttctggaccagctactgaattattaatctcacttagcgaaagtgacggatgagcagtaagtaagtaagtgtggggatttaaacttgagggtttccctcctgactagcctctcttacaggaattgtgaaatattaaatgcaaatttacaactgcagatgacgtatgtgccttgaactgaatatttggctttaagaatgattcttatactctgaaggtgagaatattttgtgggcaggtatcaacattggggaagagatttcatgtctaactaactaactttatacatgatttttaggaagctattgcctaaatcagcgtcaacatgcagtaaaggttgtcttcaactga

SEQ ID NO: 366797 - DNA, 1905 bp, Homo sapiens
cccaagtttgttgtgaccggcgggggacgccggtggtggcggcagcggcggctgcgggggcaccgggccgcggcgccaccatggcggtgcgacaggcgctgggccgcggcctgcagctgggtcgagcgctgctgctgcgcttcacgggcaagcccggccgggcctacggcttggggcggccgggcccggcggcgggctgtgtccgcggggagcgtccaggctgggccgcaggaccgggcgcggagcctcgcagggtcgggctcgggctccctaaccgtctccgcttcttccgccagtcggtggccgggctggcggcgcggttgcagcggcagttcgtggtgcgggcctggggctgcgcgggcccttgcggccgggcagtctttctggccttcgggctagggctgggcctcatcgaggaaaaacaggcggagagccggcgggcggtctcggcctgtcaggagatccaggcaatttttacccagaaaagcaagccggggcctgacccgttggacacgagacgcttgcagggctttcggctggaggagtatctgatagggcagtccattggtaagggctgcagtgctgctgtgtatgaagccaccatgcctacattgccccagaacctggaggtgacaaagagcaccgggttgcttccagggagaggcccaggtaccagtgcaccaggagaagggcaggagcgagctccgggggcccctgccttccccttggccatcaagatgatgtggaacatctcggcaggttcctccagcgaagccatcttgaacacaatgagccaggagctggtcccagcgagccgagtggccttggctggggagtatggagcagtcacttacagaaaatccaagagaggtcccaagcaactagcccctcaccccaacatcatccgggttctccgcgccttcacctcttccgtgccgctgctgccaggggccctggtcgactaccctgatgtgctgccctcacgcctccaccctgaaggcctgggccatggccggacgctgttcctcgttatgaagaactatccctgtaccctgcgccagtacctttgtgtgaacacacccagcccccgcctcgccgccatgatgctgctgcagctgctggaaggcgtggaccatctggttcaacagggcatcgcgcacagagacctgaaatccgacaacatccttgtggagctggacccagacggctgcccctggctggtgatcgcagattttggctgctgcctggctgatgagagcatcggcctgcagttgcccttcagcagctggtacgtggatcggggcggaaacggctgtctgatggccccagaggtgtccacggcccgtcctggccccagggcagtgattgactacagcaaggctgatgcctgggcagtgggagccatcgcctatgaaatcttcgggcttgtcaatcccttctacggccagggcaaggcccaccttgaaagccgcagctaccaagaggctcagctacctgcactgcccgagtcagtgcctccagacgtgagacagttggtgagggcactgctccagcgagaggccagcaaggtgaggctgtccccggcttcgaggggacggtgtgggtagaaacctctgttctcgttccagagtgaaggtcaggtttgggccagagccacagtgacagatcctctgtgttaggaaggtaaaggctagttacaagagaacaaaaaacagattttaatgtaggtaggagtaggagcactagccaccacagcatagtcagaatcctagcagttcaactcctgtggcttttttagttgctgaaaaagttgttcagaggccagacacggtggcttacacctataatcacagctccaattactagaacatgatttaaattgagccacacagtcctttgctgggg

SEQ ID NO: 366798 - DNA, 849 bp, Homo sapiens
ttcaagaccagcctggacaacatagggagacctcatctctacaataaaattggctgggcgcggtagtgcgcagacctgtgtcgtgatggtctgtgaatggtgagggtgggagtcaggagacaagacagcgcagagagggctggttagccggaaaaggcctcgggcttggcaaatggaagaacttgagtgagagttcagtctgcagtcctgtgctcacagacatctgaaaagtgaatggccaagctggtctagtagatgaggctggactgaggaggggtaggcctgcatccacagagaggatccaggccaaggcactggctgtcagtggcagagtttggctgtgacctttgcccctaacacgaggaactcgtttgaagggggcagcgtagcatgtctgatttgccacctggatgaaggcagacatcaacatgggtcagcacgttcagttacgggagtgggaaattacatgaggcctgggcctctgcgttcccaagctgtgcgttctggaccagctactgaattattaatctcacttagcgaaagtgacggatgagcagtaagtaagtaagtgtggggatttaaacttgagggtttccctcctgactagcctctcttacaggaattgtgaaatattaaatgcaaatttacaactgcagatgacgtatgtgccttgaactgaatatttggctttaagaatgattcttatactctgaaggtgagaatattttgtgggcaggtatcaacattggggaagagatttcatgtctaactaactaactttatacatgatttttaggaagctattgcctaaatcagcgtcaacatgcagtaaaggttgtcttcaactga

SEQ ID NO: 366799 - DNA, 1666 bp, Homo sapiens
cccaagtttgttgtgaccggcgggggacgccggtggtggcggcagcggcggctgcgggggcaccgggccgcggcgccaccatggcggtgcgacaggcgctgggccgcggcctgcagctgggtcgagcgctgctgctgcgcttcacgggcaagcccggccgggcctacggcttggggcggccgggcccggcggcgggctgtgtccgcggggagcgtccaggctgggccgcaggaccgggcgcggagcctcgcagggtcgggctcgggctccctaaccgtctccgcttcttccgccagtcggtggccgggctggcggcgcggttgcagcggcagttcgtggtgcgggcctggggctgcgcgggcccttgcggccgggcagtctttctggccttcgggctagggctgggcctcatcgaggaaaaacaggcggagagccggcgggcggtctcggcctgtcaggagatccaggcaatttttacccagaaaagcaagccggggcctgacccgttggacacgagacgcttgcagggctttcggctggaggagtatctgatagggcagtccattggtaagggctgcagtgctgctgtgtatgaagccaccatgcctacattgccccagaacctggaggtgacaaagagcaccgggttgcttccagggagaggcccaggtaccagtgcaccaggagaagggcaggagcgagctccgggggcccctgccttccccttggccatcaagatgatgtggaacatctcggcaggttcctccagcgaagccatcttgaacacaatgagccaggagctggtcccagcgagccgagtggccttggctggggagtatggagcagtcacttacagaaaatccaagagaggtcccaagcaactagcccctcaccccaacatcatccgggttctccgcgccttcacctcttccgtgccgctgctgccaggggccctggtcgactaccctgatgtgctgccctcacgcctccaccctgaaggcctgggccatggccggacgctgttcctcgttatgaagaactatccctgtaccctgcgccagtacctttgtgtgaacacacccagcccccgcctcgccgccatgatgctgctgcagctgctggaaggcgtggaccatctggttcaacagggcatcgcgcacagagacctgaaatccgacaacatccttgtggagctggacccagacggctgcccctggctggtgatcgcagattttggctgctgcctggctgatgagagcatcggcctgcagttgcccttcagcagctggtacgtggatcggggcggaaacggctgtctgatggccccagaggtgtccacggcccgtcctggccccagggcagtgattgactacagcaaggctgatgcctgggcagtgggagccatcgcctatgaaatatattctagccctgaagaatctgaagttagacaagatggttggctggctcctccaacaatcggccgccactttgttggccaacaggctcacagagaagtgttgtgtggaaacaaaaatgaagatgctctttctggctaacctggagtgtgaaacgctctgccaggcagccctcctcctctgctcatggagggcagccctgtgatgtccctgcatggagctggtgaattactaaaagaacttggcatcct

SEQ ID NO: 366800 - DNA, 2646 bp, Homo sapiens
cccaagtttgttgtgaccggcgggggacgccggtggtggcggcagcggcggctgcgggggcaccgggccgcggcgccaccatggcggtgcgacaggcgctgggccgcggcctgcagctgggtcgagcgctgctgctgcgcttcacgggcaagcccggccgggcctacggcttggggcggccgggcccggcggcgggctgtgtccgcggggagcgtccaggctgggccgcaggaccgggcgcggagcctcgcagggtcgggctcgggctccctaaccgtctccgcttcttccgccagtcggtggccgggctggcggcgcggttgcagcggcagttcgtggtgcgggcctggggctgcgcgggcccttgcggccgggcagtctttctggccttcgggctagggctgggcctcatcgaggaaaaacaggcggagagccggcgggcggtctcggcctgtcaggagatccaggcaatttttacccagaaaagcaagccggggcctgacccgttggacacgagacgcttgcagggctttcggctggaggagtatctgatagggcagtccattggtaagggctgcagtgctgctgtgtatgaagccaccatgcctacattgccccagaacctggaggtgacaaagagcaccgggttgcttccagggagaggcccaggtaccagtgcaccaggagaagggcaggagcgagctccgggggcccctgccttccccttggccatcaagatgatgtggaacatctcggcaggttcctccagcgaagccatcttgaacacaatgagccaggagctggtcccagcgagccgagtggccttggctggggagtatggagcagtcacttacagaaaatccaagagaggtcccaagcaactagcccctcaccccaacatcatccgggttctccgcgccttcacctcttccgtgccgctgctgccaggggccctggtcgactaccctgatgtgctgccctcacgcctccaccctgaaggcctgggccatggccggacgctgttcctcgttatgaagaactatccctgtaccctgcgccagtacctttgtgtgaacacacccagcccccgcctcgccgccatgatgctgctgcagctgctggaaggcgtggaccatctggttcaacagggcatcgcgcacagagacctgaaatccgacaacatccttgtggagctggacccagacggctgcccctggctggtgatcgcagattttggctgctgcctggctgatgagagcatcggcctgcagttgcccttcagcagctggtacgtggatcggggcggaaacggctgtctgatggccccagaggtgtccacggcccgtcctggccccagggcagtgattgactacagcaaggctgatgcctgggcagtgggagccatcgcctatgaaatcttcgggcttgtcaatcccttctacggccagggcaaggcccaccttgaaagccgcagctaccaagaggctcagctacctgcactgcccgagtcagtgcctccagacgtgagacagttggtgagggcactgctccagcgagaggccagcaagagaccatctgcccgagtagccgcaaatgtgcttcatctaagcctctggggtgaacatattctagccctgaagaatctgaagttagacaagatggttggctggctcctccaacaatcggccgccactttgttggccaacaggctcacagagaagtgttgtgtggaaacaaaaatgaagatgctctttctggctaacctggagtgtgaaacgctctgccaggcagccctcctcctctgctcatggagggcagccctgtgatgtccctgcatggagctggtgaattactaaaagaacttggcatcctctgtgtcgtgatggtctgtgaatggtgagggtgggagtcaggagacaagacagcgcagagagggctggttagccggaaaaggcctcgggcttggcaaatggaagaacttgagtgagagttcagtctgcagtcctgtgctcacagacatctgaaaagtgaatggccaagctggtctagtagatgaggctggactgaggaggggtaggcctgcatccacagagaggatccaggccaaggcactggctgtcagtggcagagtttggctgtgacctttgcccctaacacgaggaactcgtttgaagggggcagcgtagcatgtctgatttgccacctggatgaaggcagacatcaacatgggtcagcacgttcagttacgggagtgggaaattacatgaggcctgggcctctgcgttcccaagctgtgcgttctggaccagctactgaattattaatctcacttagcgaaagtgacggatgagcagtaagtaagtaagtgtggggatttaaacttgagggtttccctcctgactagcctctcttacaggaattgtgaaatattaaatgcaaatttacaactgcagatgacgtatgtgccttgaactgaatatttggctttaagaatgattcttatactctgaaggtgagaatattttgtgggcaggtatcaacattggggaagagatttcatgtctaactaactaactttatacatgatttttaggaagctattgcctaaatcagcgtcaacatgcagtaaaggttgtcttcaactga

SEQ ID NO: 366801 - DNA, 2827 bp, Homo sapiens
cccaagtttgttgtgaccggcgggggacgccggtggtggcggcagcggcggctgcgggggcaccgggccgcggcgccaccatggcggtgcgacaggcgctgggccgcggcctgcagctgggtcgagcgctgctgctgcgcttcacgggcaagcccggccgggcctacggcttggggcggccgggcccggcggcgggctgtgtccgcggggagcgtccaggctgggccgcaggaccgggcgcggagcctcgcagggtcgggctcgggctccctaaccgtctccgcttcttccgccagtcggtggccgggctggcggcgcggttgcagcggcagttcgtggtgcgggcctggggctgcgcgggcccttgcggccgggcagtctttctggccttcgggctagggctgggcctcatcgaggaaaaacaggcggagagccggcgggcggtctcggcctgtcaggagatccaggcaatttttacccagaaaagcaagccggggcctgacccgttggacacgagacgcttgcagggctttcggctggaggagtatctgatagggcagtccattggtaagggctgcagtgctgctgtgtatgaagccaccatgcctacattgccccagaacctggaggtgacaaagagcaccgggttgcttccagggagaggcccaggtaccagtgcaccaggagaagggcaggagcgagctccgggggcccctgccttccccttggccatcaagatgatgtggaacatctcggcaggttcctccagcgaagccatcttgaacacaatgagccaggagctggtcccagcgagccgagtggccttggctggggagtatggagcagtcacttacagaaaatccaagagaggtcccaagcaactagcccctcaccccaacatcatccgggttctccgcgccttcacctcttccgtgccgctgctgccaggggccctggtcgactaccctgatgtgctgccctcacgcctccaccctgaaggcctgggccatggccggacgctgttcctcgttatgaagaactatccctgtaccctgcgccagtacctttgtgtgaacacacccagcccccgcctcgccgccatgatgctgctgcagctgctggaaggcgtggaccatctggttcaacagggcatcgcgcacagagacctgaaatccgacaacatccttgtggagctggacccagacggctgcccctggctggtgatcgcagattttggctgctgcctggctgatgagagcatcggcctgcagttgcccttcagcagctggtacgtggatcggggcggaaacggctgtctgatggccccagaggtgtccacggcccgtcctggccccagggcagtgattgactacagcaaggctgatgcctgggcagtgggagccatcgcctatgaaatcttcgggcttgtcaatcccttctacggccagggcaaggcccaccttgaaagccgcagctaccaagaggctcagctacctgcactgcccgagtcagtgcctccagacgtgagacagttggtgagggcactgctccagcgagaggccagcaagagaccatctgcccgagtagccgcaaatgtgcttcatctaagcctctggggtgaacatattctagccctgaagaatctgaagttagacaagatggttggctggctcctccaacaatcggccgccactttgttggccaacaggctcacagagaagtgttgtgtggaaacaaaaatgaagatgctctttctggctaacctggagtgtgaaacgctctgccaggcagccctcctcctctgctcatggagggcagccctgtgatgtccctgcatggagctggtgaattactaaaagaacttggcatcctctgtgtcgtgatggtctgtgaatggtgagggtgggagtcaggagacaagacagcgcagagagggctggttagccggaaaaggcctcgggcttggcaaatggaagaacttgagtgagagttcagtctgcagtcctgtgctcacagacatctgaaaagtgaatggccaagctggtctagtagatgaggctggactgaggaggggtaggcctgcatccacagagaggatccaggccaaggcactggctgtcagtggcagagtttggctgtgacctttgcccctaacacgaggaactcgtttgaagggggcagcgtagcatgtctgatttgccacctggatgaaggcagacatcaacatgggtcagcacgttcagttacgggagtgggaaattacatgaggcctgggcctctgcgttcccaagctgtgcgttctggaccagctactgaattattaatctcacttagcgaaagtgacggatgagcagtaagtaagtaagtgtggggatttaaacttgagggtttccctcctgactagcctctcttacaggaattgtgaaatattaaatgcaaatttacaactgcagatgacgtatgtgccttgaactgaatatttggctttaagaatgattcttatactctgaaggtgagaatattttgtgggcaggtatcaacattggggaagagatttcatgtctaactaactaactttatacatgatttttaggaagctattgcctaaatcagcgtcaacatgcagtaaaggttgtcttcaactgagctgttctagttttctcttccccagcactgtcatctagattttccatttcagtaattcccacccctcggtctactagcaacaacaactttcttgtatcctttgaggagacgttagggagaaccatcatcatttcacagttaaaagaaagacagtccagtcctaggcaaaatttcatgaagc

SEQ ID NO: 366802 - DNA, 2598 bp, Homo sapiens
cccaagtttgttgtgaccggcgggggacgccggtggtggcggcagcggcggctgcgggggcaccgggccgcggcgccaccatggcggtgcgacaggcgctgggccgcggcctgcagctgggtcgagcgctgctgctgcgcttcacgggcaagcccggccgggcctacggcttggggcggccgggcccggcggcgggctgtgtccgcggggagcgtccaggctgggccgcaggaccgggcgcggagcctcgcagggtcgggctcgggctccctaaccgtctccgcttcttccgccagtcggtggccgggctggcggcgcggttgcagcggcagttcgtggtgcgggcgctagggctgggcctcatcgaggaaaaacaggcggagagccggcgggcggtctcggcctgtcaggagatccaggcaatttttacccagaaaagcaagccggggcctgacccgttggacacgagacgcttgcagggctttcggctggaggagtatctgatagggcagtccattggtaagggctgcagtgctgctgtgtatgaagccaccatgcctacattgccccagaacctggaggtgacaaagagcaccgggttgcttccagggagaggcccaggtaccagtgcaccaggagaagggcaggagcgagctccgggggcccctgccttccccttggccatcaagatgatgtggaacatctcggcaggttcctccagcgaagccatcttgaacacaatgagccaggagctggtcccagcgagccgagtggccttggctggggagtatggagcagtcacttacagaaaatccaagagaggtcccaagcaactagcccctcaccccaacatcatccgggttctccgcgccttcacctcttccgtgccgctgctgccaggggccctggtcgactaccctgatgtgctgccctcacgcctccaccctgaaggcctgggccatggccggacgctgttcctcgttatgaagaactatccctgtaccctgcgccagtacctttgtgtgaacacacccagcccccgcctcgccgccatgatgctgctgcagctgctggaaggcgtggaccatctggttcaacagggcatcgcgcacagagacctgaaatccgacaacatccttgtggagctggacccagacggctgcccctggctggtgatcgcagattttggctgctgcctggctgatgagagcatcggcctgcagttgcccttcagcagctggtacgtggatcggggcggaaacggctgtctgatggccccagaggtgtccacggcccgtcctggccccagggcagtgattgactacagcaaggctgatgcctgggcagtgggagccatcgcctatgaaatcttcgggcttgtcaatcccttctacggccagggcaaggcccaccttgaaagccgcagctaccaagaggctcagctacctgcactgcccgagtcagtgcctccagacgtgagacagttggtgagggcactgctccagcgagaggccagcaagagaccatctgcccgagtagccgcaaatgtgcttcatctaagcctctggggtgaacatattctagccctgaagaatctgaagttagacaagatggttggctggctcctccaacaatcggccgccactttgttggccaacaggctcacagagaagtgttgtgtggaaacaaaaatgaagatgctctttctggctaacctggagtgtgaaacgctctgccaggcagccctcctcctctgctcatggagggcagccctgtgatgtccctgcatggagctggtgaattactaaaagaacttggcatcctctgtgtcgtgatggtctgtgaatggtgagggtgggagtcaggagacaagacagcgcagagagggctggttagccggaaaaggcctcgggcttggcaaatggaagaacttgagtgagagttcagtctgcagtcctgtgctcacagacatctgaaaagtgaatggccaagctggtctagtagatgaggctggactgaggaggggtaggcctgcatccacagagaggatccaggccaaggcactggctgtcagtggcagagtttggctgtgacctttgcccctaacacgaggaactcgtttgaagggggcagcgtagcatgtctgatttgccacctggatgaaggcagacatcaacatgggtcagcacgttcagttacgggagtgggaaattacatgaggcctgggcctctgcgttcccaagctgtgcgttctggaccagctactgaattattaatctcacttagcgaaagtgacggatgagcagtaagtaagtaagtgtggggatttaaacttgagggtttccctcctgactagcctctcttacaggaattgtgaaatattaaatgcaaatttacaactgcagatgacgtatgtgccttgaactgaatatttggctttaagaatgattcttatactctgaaggtgagaatattttgtgggcaggtatcaacattggggaagagatttcatgtctaactaactaactttatacatgatttttaggaagctattgcctaaatcagcgtcaacatgcagtaaaggttgtcttcaactga

SEQ ID NO: 366803 - DNA, 2581 bp, Homo sapiens
  misc_feature (2508)..(2508): n is a, c, g, or t
cccaagtttgttgtgaccggcgggggacgccggtggtggcggcagcggcggctgcgggggcaccgggccgcggcgccaccatggcggtgcgacaggcgctgggccgcggcctgcagctgggtcgagcgctgctgctgcgcttcacgggcaagcccggccgggcctacggcttggggcggccgggcccggcggcgggctgtgtccgcggggagcgtccaggctgggccgcaggaccgggcgcggagcctcgcagggtcgggctcgggctccctaaccgtctccgcttcttccgccagtcggtggccgggctggcggcgcggttgcagcggcagttcgtggtgcgggcctggggctgcgcgggcccttgcggccgggcagtctttctggccttcgggctagggctgggcctcatcgaggaaaaacaggcggagagccggcgggcggtctcggcctgtcaggagatccaggcaatttttacccagaaaagcaagccggggcctgacccgttggacacgagacgcttgcagggctttcggctggaggagtatctgatagggcagtccattggtaagggctgcagtgctgctgtgtatgaagccaccatgcctacattgccccagaacctggaggtgacaaagagcaccgggttgcttccagggagaggcccaggtaccagtgcaccaggagaagggcaggagcgagctccgggggcccctgccttccccttggccatcaagatgatgtggaacatctcggcaggttcctccagcgaagccatcttgaacacaatgagccaggagctggtcccagcgagccgagtggccttggctggggagtatggagcagtcacttacagaaaatccaagagaggtcccaagcaactagcccctcaccccaacatcatccgggttctccgcgccttcacctcttccgtgccgctgctgccaggggccctggtcgactaccctgatgtgctgccctcacgcctccaccctgaaggcctgggccatggccggacgctgttcctcgttatgaagaactatccctgtaccctgcgccagtacctttgtgtgaacacacccagcccccgcctcgccgccatgatgctgctgcagctgctggaaggcgtggaccatctggttcaacagggcatcgcgcacagagacctgaaatccgacaacatccttgtggagctggacccagacggctgcccctggctggtgatcgcagattttggctgctgcctggctgatgagagcatcggcctgcagttgcccttcagcagctggtacgtggatcggggcggaaacggctgtctgatggccccagaggtgtccacggcccgtcctggccccagggcagtgattgactacagcaaggctgatgcctgggcagtgggagccatcgcctatgaaatcttcgggcttgtcaatcccttctacggccagggcaaggcccaccttgaaagccgcagctaccaagaggctcagctacctgcactgcccgagtcagtgcctccagacgtgagacagttggtgagggcactgctccagcgagaggccagcaagagaccatctgcccgagtagccgcaaatgtgcttcatctaagcctctggggtgaacatattctagccctgaagaatctgaagttagacaagatggttggctggctcctccaacaatcggccgccactttgttggccaacaggctcacagagaagtgttgtgtggaaacaaaaatgaagatgctctttctggctaacctggagtgtgaaacgctctgccaggcagccctcctcctctgctcatggagggcagccctgtgatgtccctgcatggagctggtgaattactaaaagaacttggcatcctctgtgtcgtgatggtctgtgaatggtgagggtgggagtcaggagacaagacagcgcagagagggctggttagccggaaaaggcctcgggcttggcaaatggaagaacttgagtgagagttcagtctgcagtcctgtgctcacagacatctgaaaagtgaatggccaagctggtctagtagatgaggctggactgaggaggggtaggcctgcatccacagagaggatccaggccaaggcactggctgtcagtggcagagtttggctgtgacctttgcccctaacacgaggaactcgtttgaagggggcagcgtagcatgtctgatttgccacctggatgaaggcagacatcaacatgggtcagcacgttcagttacgggagtgggaaattacatgaggcctgggcctctgcgttcccaagctgtgcgttctggaccagctactgaattattaatctcacttagcgaaagtgacggatgagcagtaagtaagtaagtgtggggatttaaacttgagggtttccctcctgactagcctctcttacaggaattgtgaaatattaaatgcaaatttacaacttgcaaaaaaaaaaaaaaaaaacttcagggggggccccggtccccaattcgccttatgangaggcgtatttcaattcacttggccggcggtttaaacgttgggactgggaaaaacctgggcgttaccaaactg

SEQ ID NO: 366804 - DNA, 1774 bp, Homo sapiens
cccaagtttgttgtgaccggcgggggacgccggtggtggcggcagcggcggctgcgggggcaccgggccgcggcgccaccatggcggtgcgacaggcgctgggccgcggcctgcagctgggtcgagcgctggggccatggccggacgctgttcctcgttatgaagaactatccctgtaccctgcgccagtacctttgtgtgaacacacccagcccccgcctcgccgccatgatgctgctgcagctgctggaaggcgtggaccatctggttcaacagggcatcgcgcacagagacctgaaatccgacaacatccttgtggagctggacccagacggctgcccctggctggtgatcgcagattttggctgctgcctggctgatgagagcatcggcctgcagttgcccttcagcagctggtacgtggatcggggcggaaacggctgtctgatggccccagaggtgtccacggcccgtcctggccccagggcagtgattgactacagcaaggctgatgcctgggcagtgggagccatcgcctatgaaatcttcgggcttgtcaatcccttctacggccagggcaaggcccaccttgaaagccgcagctaccaagaggctcagctacctgcactgcccgagtcagtgcctccagacgtgagacagttggtgagggcactgctccagcgagaggccagcaagagaccatctgcccgagtagccgcaaatgtgcttcatctaagcctctggggtgaacatattctagccctgaagaatctgaagttagacaagatggttggctggctcctccaacaatcggccgccactttgttggccaacaggctcacagagaagtgttgtgtggaaacaaaaatgaagatgctctttctggctaacctggagtgtgaaacgctctgccaggcagccctcctcctctgctcatggagggcagccctgtgatgtccctgcatggagctggtgaattactaaaagaacttggcatcctctgtgtcgtgatggtctgtgaatggtgagggtgggagtcaggagacaagacagcgcagagagggctggttagccggaaaaggcctcgggcttggcaaatggaagaacttgagtgagagttcagtctgcagtcctgtgctcacagacatctgaaaagtgaatggccaagctggtctagtagatgaggctggactgaggaggggtaggcctgcatccacagagaggatccaggccaaggcactggctgtcagtggcagagtttggctgtgacctttgcccctaacacgaggaactcgtttgaagggggcagcgtagcatgtctgatttgccacctggatgaaggcagacatcaacatgggtcagcacgttcagttacgggagtgggaaattacatgaggcctgggcctctgcgttcccaagctgtgcgttctggaccagctactgaattattaatctcacttagcgaaagtgacggatgagcagtaagtaagtaagtgtggggatttaaacttgagggtttccctcctgactagcctctcttacaggaattgtgaaatattaaatgcaaatttacaactgcagatgacgtatgtgccttgaactgaatatttggctttaagaatgattcttatactctgaaggtgagaatattttgtgggcaggtatcaacattggggaagagatttcatgtctaactaactaactttatacatgatttttaggaagctattgcctaaatcagcgtcaacatgcagtaaaggttgtcttcaactga

SEQ ID NO: 366805 - DNA, 2623 bp, Homo sapiens
cccaagtttgttgtgaccggcgggggacgccggtggtggcggcagcggcggctgcgggggcaccgggccgcggcgccaccatggcggtgcgacaggcgctgggccgcggcctgcagctgggtcgagcgctgctgctgcgcttcacgggcaagcccggccgggcctacggcttggggcggccgggcccggcggcgggctgtgtccgcggggagcgtccaggctgggccgcaggaccgggcgcggagcctcgcagggtcgggctcgggctccctaaccgtctccgcttcttccgccagtcggtggccgggctggcggcgcggttgcagcggcagttcgtggtgcgggcctggggctgcgcgggcccttgcggccgggcagtctttctggccttcgggctagggctgggcctcatcgaggaaaaacaggcggagagccggcgggcggtctcggcctgtcaggagatccaggcaatttttacccagaaaagcaagccggggcctgacccgttggacacgagacgcttgcagggctttcggctggaggagtatctgatagggcagtccattggtaagggctgcagtgctgctgtgtatgaagccaccatgcctacattgccccagaacctggaggtgacaaagagcaccgggttgcttccagggagaggcccaggtaccagtgcaccaggagaagggcaggagcgagctccgggggcccctgccttccccttggccatcaagatgatgtggaacatctcggcaggttcctccagcgaagccatcttgaacacaatgagccaggagctggtcccagcgagccgagtggccttggctggggagtatggagcagtcacttacagaaaatccaagagaggtcccaagcaactagcccctcaccccaacatcatccgggttctccgcgccttcacctcttccgtgccgctgctgccaggggccctggtcgactaccctgatgtgctgccctcacgcctccaccctgaaggcctgggccatggccggacgctgttcctcgttatgaagaactatccctgtaccctgcgccagtacctttgtgtgaacacacccagcccccgcctcgccgccatgatgctgctgcagctgctggaaggcgtggaccatctggttcaacagggcatcgcgcacagagacctgaaatccgacaacatccttgtggagctggacccagacggctgcccctggctggtgatcgcagattttggctgctgcctggctgatgagagcatcggcctgcagttgcccttcagcagctggtacgtggatcggggcggaaacggctgtctgatggccccagaggtgtccacggcccgtcctggccccagggcagtgattgactacagcaaggctgatgcctgggcagtgggagccatcgcctatgaaatcttcgggcttgtcaatcccttctacggccagggcaaggcccaccttgaaagccgcagctaccaagaggctcagctacctgcactgcccgagtcagtgcctccagacgtgagacagttggtgagggcactgctccagcgagaggccagcaagagaccatctgcccgagtagccgcaaatgtgcttcatctaagcctctggggtgaacatattctagccctgaagaatctgaagttagacaagatggttggctggctcctccaacaatcggccgccactttgttggccaacaggctcacagagaagtgttgtgtggaaacaaaaatgaagatgctctttctggctaacctggagtgtgaaacgctctgccaggcagccctcctcctctgctcatggagggcagccctgtgatgtccctgcatggagctggtgaattactaaaagaacttggcatcctctgtgtcgtgatggtctgtgaatggtgagggtgggagtcaggagacaagacagcgcagagagggctggttagccggaaaaggcctcgggcttggcaaatggaagaacttgagtgagagttcagtctgcagtcctgtgctcacagacatctgaaaagtgaatggccaagctggtctagtagatattacatgaggcctgggcctctgcgttcccaagctgtgcgttctggaccagctactgaattattaatctcacttagcgaaagtgacggatgagcagtaagtaagtaagtgtggggatttaaacttgagggtttccctcctgactagcctctcttacaggaattgtgaaatattaaatgcaaatttacaactgcagatgacgtatgtgccttgaactgaatatttggctttaagaatgattcttatactctgaaggtgagaatattttgtgggcaggtatcaacattggggaagagatttcatgtctaactaactaactttatacatgatttttaggaagctattgcctaaatcagcgtcaacatgcagtaaaggttgtcttcaactgagctgttctagttttctcttccccagcactgtcatctagattttccatttcagtaattcccacccctcggtctactagcaacaacaactttcttgtatcctttgaggagacgttagggagaaccatcatcatttcacagttaaaagaaagacagtccagtcctaggcaaaatttcatgaagc

SEQ ID NO: 366806 - DNA, 2107 bp, Homo sapiens
cccaagtttgttgtgaccggcgggggacgccggtggtggcggcagcggcggctgcgggggcaccgggccgcggcgccaccatggcggtgcgacaggcgctgggccgcggcctgcagctgggtcgagcgctgctgctgcgcttcacgggcaagcccggccgggcctacggcttggggcggccgggcccggcggcgggctgtgtccgcggggagcgtccaggctgggccgcaggaccgggcgcggagcctcgcagggtcgggctcgggctccctaaccgtctccgcttcttccgccagtcggtggccgggctggcggcgcggttgcagcggcagttcgtggtgcgggcctggggctgcgcgggcccttgcggccgggcagtctttctggccttcgggctagggctgggcctcatcgaggaaaaacaggcggagagccggcgggcggtctcggcctgtcaggagatccaggcaatttttacccagaaaagcaagccggggcctgacccgttggacacgagacgcttgcagggctttcggctggaggagtatctgatagggcagtccattggtaagggctgcagtgctgctgtgtatgaagccaccatgcctacattgccccagaacctggaggtgacaaagagcaccgggttgcttccagggagaggcccaggtaccagtgcaccaggagaagggcaggagcgagctccgggggcccctgccttccccttggccatcaagatgatgtggaacatctcggcaggttcctccagcgaagccatcttgaacacaatgagccaggagctggtcccagcgagccgagtggccttggctggggagtatggagcagtcacttacagaaaatccaagagaggtcccaagcaactagcccctcaccccaacatcatccgggttctccgcgccttcacctcttccgtgccgctgctgccaggggccctggtcgactaccctgatgtgctgccctcacgcctccaccctgaaggcctgggccatggccggacgctgttcctcgttatgaagaactatccctgtaccctgcgccagtacctttgtgtgaacacacccagcccccgcctcgccgccatgatgctgctgcagctgctggaaggcgtggaccatctggttcaacagggcatcgcgcacagagacctgaaatccgacaacatccttgtggagctggacccagacggctgcccctggctggtgatcgcagattttggctgctgcctggctgatgagagcatcggcctgcagttgcccttcagcagctggtacgtggatcggggcggaaacggctgtctgatggccccagaggtgtccacggcccgtcctggccccagggcagtgattgactacagcaaggctgatgcctgggcagtgggagccatcgcctatgaaatcttcgggcttgtcaatcccttctacggccagggcaaggcccaccttgaaagccgcagctaccaagaggctcagctacctgcactgcccgagtcagtgcctccagacgtgagacagttggtgagggcactgctccagcgagaggccagcaaggtgaggctgtccccggcttcgaggggacggtgtgggtagaaacctctgttctcgttccagagtgaaggtcaggtttgggccagagccacagtgacagatcctctgtgttaggaaggtaaaggctagttacaagagaacaaaaaacagattttaatgtaggtaggagtaggagcactagccaccacagcatagtcagaatcctagcagttcaactcctgtggcttttttagttgctgaaaaagttgttcagaggccagacacggtggcttacacctataatcacagcactttgggaggctgaggcgggtggatcacttgggaccaggagttccagtccagcctggccaacatggtaaaaccccgtctgtactaaaaatacaaaaattagctgagtgtcgtggcacacgcctgtaattccaggtactcgggaggctgaagtaggagaatcgtttgaaccctggaggcagaggttgcagtgagccaagattgcaccactgcactctggcctaggtgacagtgcaagtctttgtctcaaaaaa

SEQ ID NO: 366807 - DNA, 1726 bp, Homo sapiens
cccaagtttgttgtgaccggcgggggacgccggtggtggcggcagcggcggctgcgggggcaccgggccgcggcgccaccatggcggtgcgacaggcgctgggccgcggcctgcagctgggtcgagcgctgctgctgcgcttcacgggcaagcccggccgggcctacggcttggggcggccgggcccggcggcgggctgtgtccgcggggagcgtccaggctgggccgcaggaccgggcgcggagcctcgcagggtcgggctcgggctccctaaccgtctccgcttcttccgccagtcggtggccgggctggcggcgcggttgcagcggcagttcgtggtgcgggcctggggctgcgcgggcccttgcggccgggcagtctttctggccttcgggctagggctgggcctcatcgaggaaaaacaggcggagagccggcgggcggtctcggcctgtcaggagatccaggcaatttttacccagaaaagcaagccggggcctgacccgttggacacgagacgcttgcagggctttcggctggaggagtatctgatagggcagtccattggtaagggctgcagtgctgctgtgtatgaagccaccatgcctacattgccccagaacctggaggtgacaaagagcaccgggttgcttccagggagaggcccaggtaccagtgcaccaggagaagggcaggagcgagctccgggggcccctgccttccccttggccatcaagatgatgtggaacatctcggcaggttcctccagcgaagccatcttgaacacaatgagccaggagctggtcccagcgagccgagtggccttggctggggagtatggagcagtcacttacagaaaatccaagagaggtcccaagcaactagcccctcaccccaacatcatccgggttctccgcgccttcacctcttccgtgccgctgctgccaggggccctggtcgactaccctgatgtgctgccctcacgcctccaccctgaaggcctgggccatggccggacgctgttcctcgttatgaagaactatccctgtaccctgcgccagtacctttgtgtgaacacacccagcccccgcctcgccgccatgatgctgctgcagctgctggaaggcgtggaccatctggttcaacagggcatcgcgcacagagacctgaaatccgacaacatccttgtggagctggacccaggtaggaacctgctgcaccatcagagctctccaggggcactagagggtgggtcaggagcatttaggactgactcttcaggtcctctctggttttgtgttctaagtcatgtctttatttagctccgcacacaagaggttagcaatctctcccttagaacggggtttttttttctctctttgcagagagacagcacttcccaagttcctttctctagcccacttaaagaacaaggacctcagtgctgcaagttttcctaggtaaataaagaggcccggcacagtggctgacacctgtaatcccaacactttgggaggcttgcttgaggattgcttgaggccagcagtttgagaccagcctgggaaacagagtgagatcccttcttggaggcatttccgtgttcgcacagcaggcccttctgatcagctctcaggccttgctgacctcctgggccaacactgagccattagcccctgtcagctatgtcttgctggtggctttagtagggacataggagggcctctca

SEQ ID NO: 366808 - DNA, 1208 bp, Homo sapiens
agtgcagacacgtgatgcgggggagggcggggcgtggcaggagcaagcgtctgccgcggtggccgggtgccgatttgacaagatcaaagctgcaggaaaatggacagtgaggttcagagagatggaaggatcttggatttgattgatgatgcttggcgagaagacaagctgccttatgaggatgtcgcaataccactgaatgagcttcctgaacctgaacaagacaatggtggcaccacagaatctgtcaaagaacaagaaatgaagtggacagacttagccttacagtacctccatgagaatgttccccccattggaaactgacgcttggctcctttcttgtggatggattttctcaaagtacacagataaagcatggtttgtttcagtctccaaattcaaacctttgagtaataaatcagcactcaaaaatgtacacccatttagtttgtggtagcaaagtgcaatgcgaaattgaatgagaaactgagatttctcagtaatggtgaatatttcgctctttaaacctaaaactcttcattgagtagcttatatttgaacatgattggttaaacatttgcctctacctctgattttgctttgctgtcaaagtttaacaccttccaactacttatgtgtgtcctgtaacacaggtgattgaacgtatgagagggaaaggcaaagaaaaaggaagccagacactaggagaattattaacttctcatacttccccacattgagaagcattcggagtgtatttagcctgtagatgttgtgatatgcaaatatcccattccctggttactggcattcctaagattcttcatggtattttcaaactttggataaatttacagattagaaagatatctgacagttaatctctgttctccttacaaattccttttgtgctgctggaaaggatctttggctaggtggatgactagttttattcaaagccttttctcaaagccctttcagttacaaccaccccactatggaatcagtatttagttatacatttgtataagaacctgtattttgaaaaacacattcatgtatatttattcctggaattatttgcctgttaaacagtgtctttcatgttctctccccagattgtaaactctgtaagaagctgcttgtatctgtatcccttgttgaaactctgaaaacactgaataactaaaatctcttctcatcctttt

SEQ ID NO: 366809 - DNA, 1840 bp, Homo sapiens
agtgcagacacgtgatgcgggggagggcggggcgtggcaggagcaagcgtctgccgcggtggccgggtgccggtaagggtttccagcgcccccggcctaggttttggaggcgcgggaatgcgttcgttgctcagtgtcggacttccccctattcccatcggccgaggctgtcactttacgctcataaccgtttttctttactgcactcgtgtcgggaggaaagggacttgcgtggcacccccagacctccccgtctccgcttccacgtttggtacatcctgcctgaggcaggaagccgcagctgagggacggcctgtcgtacggtgcggatggtggtggcctgcgaggctcatttctagcaaggaacaaggctttcccgctttgattttataaatattatgtttacaaagctgtaatatatagaaattgataagacgtgtccctgtccctggaaacgcaggcaccgcgtgtttggaaagacattcatctgggctgtttgacagactccccagttggtgccatgctctgtgcttagggaactgtgagacccctggaggggtgggtaccgggaccgcactcagcctggggtttggaggcggcctcctataggaagcgacctgggacctaagatttttagactgactgtgggttcactggaataaaaaggaagaaacaaagagcattgcaggcatcgggactgtcacatttgacaagatcaaagctgcaggaaaatggacagtgaggttcagagagatggaaggatcttggatttgattgatgatgcttggcgagaagacaagctgccttatgaggatgtcgcaataccactgaatgagcttcctgaacctgaacaagacaatggtggcaccacagaatctgtcaaagaacaagaaatgaagtggacagacttagccttacagtacctccatgagaatgttccccccattggaaactgacgcttggctcctttcttgtggatggattttctcaaagtacacagataaagcatggtttgtttcagtctccaaattcaaacctttgagtaataaatcagcactcaaaaatgtacacccatttagtttgtggtagcaaagtgcaatgcgaaattgaatgagaaactgagatttctcagtaatggtgaatatttcgctctttaaacctaaaactcttcattgagtagcttatatttgaacatgattggttaaacatttgcctctacctctgattttgctttgctgtcaaagtttaacaccttccaactacttatgtgtgtcctgtaacacaggtgattgaacgtatgagagggaaaggcaaagaaaaaggaagccagacactaggagaattattaacttctcatacttccccacattgagaagcattcggagtgtatttagcctgtagatgttgtgatatgcaaatatcccattccctggttactggcattcctaagattcttcatggtattttcaaactttggataaatttacagattagaaagatatctgacagttaatctctgttctccttacaaattccttttgtgctgctggaaaggatctttggctaggtggatgactagttttattcaaagccttttctcaaagccctttcagttacaaccaccccactatggaatcagtatttagttatacatttgtataagaacctgtattttgaaaaacacattcatgtatatttattcctggaattatttgcctgttaaacagtgtctttcatgttctctccccagattgtaaactctgtaagaagctgcttgtatctgtatcccttgttgaaactctgaaaacactgaataactaaaatctcttctcatcctttt

SEQ ID NO: 366810 - DNA, 805 bp, Homo sapiens
agtgcagacacgtgatgcgggggagggcggggcgtggcaggagcaagcgtctgccgcggtggccgggtgccgatttgacaagatcaaagctgcaggaaaatggacagtgaggttcagagagatggaaggatcttggatttgattgatgatgcttggcgagaagacaagctgccttatgaggatgtcgcaataccactgaatgagcttcctgaacctgaacaagacaatggtggcaccacagaatctgtcaaagaacaagaaatgaagtggacagacttagccttacagtacctccatgagaatgttccccccattggaaactgacgcttggctcctttcttgtggatggattttctcaaagtacacagataaagcatggtttgtttcagtctccaaattcaaacctttgagtaataaatcagcactcaaaaatgtacacccatttagtttgtggtagcaaagtgcaatgcgaaattgaatgagaaactgagatttctcagtaatggtgaatatttcgctctttaaacctaaaactcttcattgagtagcttatatttgaacatgattggttaaacatttgcctctacctctgattttgctttgctgtcaaagtttaacaccttccaactacttatgtgtgtcctgtaacacaggtgattgaacgtatgagagggaaaggcaaagaaaaaggaagccagacactaggagaattattaacttctcatacttccccacattgagaagatcccggggttttaacccgcaatggtgggatataaaaataccattcccggttcggggagct

SEQ ID NO: 366811 - DNA, 872 bp, Homo sapiens
agtgcagacacgtgatgcgggggagggcggggcgtggcaggagcaagcgtctgccgcggtggccgggtgccgatttgacaagatcaaagctgcaggaaaatggacagtgaggttcagagagatggaaggatcttggatttgattgatgatgcttggcgagaagacaagctgccttatgaggatgtcgcaataccactgaatgagcttcctgaacctgaacaagacaatggtggcaccacagaatctgtcaaagaacaagaaatgaagtggacagacttagccttacagtacctccatgagaatgttccccccattggaaactgacgcttggctcctttcttgtggatggattttctcaaagtacacagataaagcatggtttgtttcagtctccaaattcaaacctttgagtaataaatcagcactcaaaaatgtacacccatttagtttgtggtagcaaagtgcaatgcgaaattgaatgagaaactgagatttctcagtaatggtgaatatttcgctctttaaacctaaaactcttcattgagtagcttatatttgaacatgattggttaaacatttgcctctacctctgattttgctttgctgtcaaagtttaacaccttccaactacttatgtgtgtcctgtaacacaggtgattgaacgtatgagagggaaaggcaaagaaaaagaaatgaagtggacagacttagccttacagtatctccatgagcaatgttccccccattggaaactgacgcttggctcctttcttgtggatggatcttctcaaagtacacagataaagcgtggttgttcagtctccaaattcaaaacctttgagtaataaatcagccctccaaaaatgttcacc

SEQ ID NO: 366812 - DNA, 915 bp, Homo sapiens
  misc_feature (706)..(706): n is a, c, g, or t
  misc_feature (713)..(713): n is a, c, g, or t
  misc_feature (723)..(723): n is a, c, g, or t
aaggatagaaggcctactgaagctcgagtgatttgagaaaactttacaaaggtggaaaatctacgtgggcctccgaaagtcagatttgacaagatcaaagctgcaggaaaatggacagtgaggttcagagagatggaaggatcttggatttgattgatgatgcttggcgagaagacaagctgccttatgaggatgtcgcaataccactgaatgagcttcctgaacctgaacaagacaatggtggcaccacagaatctgtcaaagaacaagaaatgaagtggacagacttagccttacagtacctccatgagaatgttccccccattggaaactgacgcttggctcctttcttgtggatggattttctcaaagtacacagataaagcatggtttgtttcagtctccaaattcaaacctttgagtaataaatcagcactcaaaaatgtacacccatttagtttgtggtagcaaagtgcaatgcgaaattgaatgagaaactgagatttctcagtaatggtgaatatttcgctctttaaacctaaaactcttcattgagtagcttatatttgaacatgattggttaaacatttgcctctacctctgattttgctttgctgtcaaagtttaacaccttccaactacttatgtgtgtcctgtaacacaggtgattgaacgtatgagagggaaaggcaaagaaaaagatttnattctcntattccaatnggagcttcgaggtttagctgtatgtgtgttgcattcccttcctgtcgggtctaagatttcggtttcacctgggatccggtacgtgggacggcttcaacttggggagactgggggagagttactccctgtaaccaggtttttgtttaccttcttggtgtctcatggttttttctgtgcgtcttcttgtgctgg

SEQ ID NO: 366813 - DNA, 436 bp, Homo sapiens
agtgcagacacgtgatgcgggggagggcggggcgtggcaggagcaagcgtctgccgcggtggccgggtgccgatttgacaagatcaaagctgcaggaaaatggacagtgaggttcagagagatggaaggatcttggatttgattgatgatgcttggcgagaagacaagctgccttatgaggatgtcgcaataccactgaatgagcttcctgaacctgaacaagacaatggtggcaccacagaatctgtcaaagaacaagaaatgaagtggacagacttagccttacagtacctccatgagaatgttccccccattggaaactgacgcttggctcctttcttgtggatggattttctcaaagtacacagataaagcatggtttgtttcagtctccaaattcaaacctttgagtaataaatcagcactcaaaaatgta

SEQ ID NO: 366814 - DNA, 1656 bp, Homo sapiens
  misc_feature (1210)..(1210): n is a, c, g, or t
agtgcagacacgtgatgcgggggagggcggggcgtggcaggagcaagcgtctgccgcggtggccgggtgccgatttgacaagatcaaagctgcaggaaaatggacagtgaggttcagagagatggaaggatcttggatttgattgatgatgcttggcgagaagacaagctgccttatgaggatgtcgcaataccactgaatgagcttcctgaacctgaacaagacaatggtggcaccacagaatctgtcaaagaacaagaaatgaagtggacagacttagccttacagtacctccatgagaatgttccccccattggaaactgacgcttggctcctttcttgtggatggattttctcaaagtacacagataaagcatggtttgtttcagtctccaaattcaaacctttgagtaataaatcagcactcaaaaatgtacacccatttagtttgtggtagcaaagtgcaatgcgaaattgaatgagaaactgagatttctcagtaatggtgaatatttcgctctttaaacctaaaactcttcattgagtagcttatatttgaacatgattggttaaacatttgcctctacctctgattttgctttgctgtcaaagtttaacaccttccaactacttatgtgtgtcctgtaacacaggtgattgaacgtatgagagggaaaggcaaagaaaaaggaagccagacactaggagaattattaacttctcatacttccccacattgagaagcattcggagtgtatttagcctgtagatgttgtgatatgcaaatatcccattccctggttactggcattcctaagattcttcatggtattttcaaactttggataaatttacagattagaaagatatctgacagttaatctctgttctccttacaaattccttttgtgctgctggaaaggatctttggctaggtggatgactagttttattcaaagccttttctcaaagccctttcagttacaaccaccccactatggaatcagtatttagttatacatttgtataagaacctgtattttgaaaaacacattcatgtatatttattcctggaattatttgcctgttaaacagtgtctttcatgttctctccccagattgtaaactctgtaagaagctgcttgtatctgtatcccttgttgaaactctgaaaacactgaataactaaaatctcttctcatccttttanaaaaaaaaaaaaaaaaaaaaaaaaaaaaaaaaaaaaacaaaaaaaaaaaaaaaaagagaaaaacacaccaacaaacaaaaaaaaaaaaaaaaaaaaaagggatgggcgcgggccggcccgcgcgcgcccaacgagacgagtgttaaaacacactggtgggggggggacggcgccccatgtaggtgagagaggaggaggaccagcggtgccacaagagaagaccgcggctagaagaaaaaagaggaggggagaggatccccacacaccaagaaagcacagacgcggcgggggggaaacaacggcggagggtagtcgagacgacacaactacaggagggagagatcgcgaggacaatcaagagaggcgtgataacacaaaggagggagggactacaagagaggggacgacagataaaaaaagcgccgcacgaggggggggtgggtgat

SEQ ID NO: 366815 - DNA, 1645 bp, Homo sapiens
agtgcagacacgtgatgcgggggagggcggggcgtggcaggagcaagcgtctgccgcggtggccgggtgccggtaagggtttccagcgcccccggcctaggttttggaggcgcgggaatgcgttcgttgctcagtgtcggacttccccctattcccatcggccgaggctgtcactttacgctcataaccgtttttctttactgcactcgtgtcgggaggaaagggacttgcgtggcacccccagacctccccgtctccgcttccacgtttggtacatcctgcctgaggcaggaagccgcagctgagggacggcctgtcgtacggtgcggatggtggtggcctgcgaggctcatttctagcaaggaacaaggctttcccgctttgattttataaatattatgtttacaaagctgtaatatatagaaattgataagatttttagactgactgtgggttcactggaataaaaaggaagaaacaaagagcattgcaggcatcgggactgtcacatttgacaagatcaaagctgcaggaaaatggacagtgaggttcagagagatggaaggatcttggatttgattgatgatgcttggcgagaagacaagctgccttatgaggatgtcgcaataccactgaatgagcttcctgaacctgaacaagacaatggtggcaccacagaatctgtcaaagaacaagaaatgaagtggacagacttagccttacagtacctccatgagaatgttccccccattggaaactgacgcttggctcctttcttgtggatggattttctcaaagtacacagataaagcatggtttgtttcagtctccaaattcaaacctttgagtaataaatcagcactcaaaaatgtacacccatttagtttgtggtagcaaagtgcaatgcgaaattgaatgagaaactgagatttctcagtaatggtgaatatttcgctctttaaacctaaaactcttcattgagtagcttatatttgaacatgattggttaaacatttgcctctacctctgattttgctttgctgtcaaagtttaacaccttccaactacttatgtgtgtcctgtaacacaggtgattgaacgtatgagagggaaaggcaaagaaaaaggaagccagacactaggagaattattaacttctcatacttccccacattgagaagcattcggagtgtatttagcctgtagatgttgtgatatgcaaatatcccattccctggttactggcattcctaagattcttcatggtattttcaaactttggataaatttacagattagaaagatatctgacagttaatctctgttctccttacaaattccttttgtgctgctggaaaggatctttggctaggtggatgactagttttattcaaagccttttctcaaagccctttcagttacaaccaccccactatggaatcagtatttagttatacatttgtataagaacctgtattttgaaaaacacattcatgtatatttattcctggaattatttgcctgttaaacagtgtctttcatgttctctccccagattgtaaactctgtaagaagctgcttgtatctgtatcccttgttgaaactctgaaaacactgaataactaaaatctcttctcatcctttt

SEQ ID NO: 366816 - DNA, 1472 bp, Homo sapiens
aaacaggaaaaggtgaatgttcaagttagaagagaagagctacattgagatgcaacatattaatatttgagggcctcgtttaacgtgttgctctcctgtcacactctatgacactggtctgtcagctgggctatgcctgtccagtatacactataaaatatgtatcagttggggttggagagaggaactgtgatcaaagtagtcacccggcccatatgagaaaatgaaccttttcccaaaaggtggccccagactaaaaagcctggagaatcctaatagtggattataccatctcttcagtcttcgtgtttaagaaataacctctttggcttacagatttgacaagatcaaagctgcaggaaaatggacagtgaggttcagagagatggaaggatcttggatttgattgatgatgcttggcgagaagacaagctgccttatgaggatgtcgcaataccactgaatgagcttcctgaacctgaacaagacaatggtggcaccacagaatctgtcaaagaacaagaaatgaagtggacagacttagccttacagtacctccatgagaatgttccccccattggaaactgacgcttggctcctttcttgtggatggattttctcaaagtacacagataaagcatggtttgtttcagtctccaaattcaaacctttgagtaataaatcagcactcaaaaatgtacacccatttagtttgtggtagcaaagtgcaatgcgaaattgaatgagaaactgagatttctcagtaatggtgaatatttcgctctttaaacctaaaactcttcattgagtagcttatatttgaacatgattggttaaacatttgcctctacctctgattttgctttgctgtcaaagtttaacaccttccaactacttatgtgtgtcctgtaacacaggtgattgaacgtatgagagggaaaggcaaagaaaaaggaagccagacactaggagaattattaacttctcatacttccccacattgagaagcattcggagtgtatttagcctgtagatgttgtgatatgcaaatatcccattccctggttactggcattcctaagattcttcatggtattttcaaactttggataaatttacagattagaaagatatctgacagttaatctctgttctccttacaaattccttttgtgctgctggaaaggatctttggctaggtggatgactagttttattcaaagccttttctcaaagccctttcagttacaaccaccccactatggaatcagtatttagttatacatttgtataagaacctgtattttgaaaaacacattcatgtatatttattcctggaattatttgcctgttaaacagtgtctttcatgttctctccccagattgtaaactctgtaagaagctgcttgtatctgtatcccttgttgaaactctgaaaacactgaataactaaaatctcttctcatcctttt

SEQ ID NO: 366817 - DNA, 1267 bp, Homo sapiens
cacactaaatgagcgggtccccttgtgccgtgaatgaagtagtcccaacagcgctagctagacagcagccctggcagggaggccgcactggggtctctccgctgaaaaggaaggtgggtccgccggggaagatttgacaagatcaaagctgcaggaaaatggacagtgaggttcagagagatggaaggatcttggatttgattgatgatgcttggcgagaagacaagctgccttatgaggatgtcgcaataccactgaatgagcttcctgaacctgaacaagacaatggtggcaccacagaatctgtcaaagaacaagaaatgaagtggacagacttagccttacagtacctccatgagaatgttccccccattggaaactgacgcttggctcctttcttgtggatggattttctcaaagtacacagataaagcatggtttgtttcagtctccaaattcaaacctttgagtaataaatcagcactcaaaaatgtacacccatttagtttgtggtagcaaagtgcaatgcgaaattgaatgagaaactgagatttctcagtaatggtgaatatttcgctctttaaacctaaaactcttcattgagtagcttatatttgaacatgattggttaaacatttgcctctacctctgattttgctttgctgtcaaagtttaacaccttccaactacttatgtgtgtcctgtaacacaggtgattgaacgtatgagagggaaaggcaaagaaaaaggaagccagacactaggagaattattaacttctcatacttccccacattgagaagcattcggagtgtatttagcctgtagatgttgtgatatgcaaatatcccattccctggttactggcattcctaagattcttcatggtattttcaaactttggataaatttacagattagaaagatatctgacagttaatctctgttctccttacaaattccttttgtgctgctggaaaggatctttggctaggtggatgactagttttattcaaagccttttctcaaagccctttcagttacaaccaccccactatggaatcagtatttagttatacatttgtataagaacctgtattttgaaaaacacattcatgtatatttattcctggaattatttgcctgttaaacagtgtctttcatgttctctccccagattgtaaactctgtaagaagctgcttgtatctgtatcccttgttgaaactctgaaaacactgaataactaaaatctcttctcatcctttt

SEQ ID NO: 366818 - DNA, 1786 bp, Homo sapiens
agtgcagacacgtgatgcgggggagggcggggcgtggcaggagcaagcgtctgccgcggtggccgggtgccggtaagggtttccagcgcccccggcctaggttttggaggcgcgggaatgcgttcgttgctcagtgtcggacttccccctattcccatcggccgaggctgtcactttacgctcataaccgtttttctttactgcactcgtgtcgggaggaaagggacttgcgtggcacccccagacctccccgtctccgcttccacgtttggtacatcctgcctgaggcaggaagccgcagctgagggacggcctgtcgtacggtgcggatggtggtggcctgcgaggctcatttctagcaaggaacaaggctttcccgctttgattttataaatattatgtttacaaagctgtaatatatagaaattgataagacgtgtccctgtccctggaaacgcaggcaccgcgtgtttggaaagacattcatctgggctgtttgacagactccccagttggtgccatgctctgtgcttagggaactgtgagacccctggaggggtgggtaccgggaccgcactcagcctggggtttggaggcggcctcctataggaagcgacctgggacctaagatttttagactgactgtgggttcactggaataaaaaggaagaaacaaagagcattgcaggcatcgggactgtcacatttgacaagatcaaagctgcagggcttggcgagaagacaagctgccttatgaggatgtcgcaataccactgaatgagcttcctgaacctgaacaagacaatggtggcaccacagaatctgtcaaagaacaagaaatgaagtggacagacttagccttacagtacctccatgagaatgttccccccattggaaactgacgcttggctcctttcttgtggatggattttctcaaagtacacagataaagcatggtttgtttcagtctccaaattcaaacctttgagtaataaatcagcactcaaaaatgtacacccatttagtttgtggtagcaaagtgcaatgcgaaattgaatgagaaactgagatttctcagtaatggtgaatatttcgctctttaaacctaaaactcttcattgagtagcttatatttgaacatgattggttaaacatttgcctctacctctgattttgctttgctgtcaaagtttaacaccttccaactacttatgtgtgtcctgtaacacaggtgattgaacgtatgagagggaaaggcaaagaaaaaggaagccagacactaggagaattattaacttctcatacttccccacattgagaagcattcggagtgtatttagcctgtagatgttgtgatatgcaaatatcccattccctggttactggcattcctaagattcttcatggtattttcaaactttggataaatttacagattagaaagatatctgacagttaatctctgttctccttacaaattccttttgtgctgctggaaaggatctttggctaggtggatgactagttttattcaaagccttttctcaaagccctttcagttacaaccaccccactatggaatcagtatttagttatacatttgtataagaacctgtattttgaaaaacacattcatgtatatttattcctggaattatttgcctgttaaacagtgtctttcatgttctctccccagattgtaaactctgtaagaagctgcttgtatctgtatcccttgttgaaactctgaaaacactgaataactaaaatctcttctcatcctttt

SEQ ID NO: 366819 - DNA, 1764 bp, Homo sapiens
agtgcagacacgtgatgcgggggagggcggggcgtggcaggagcaagcgtctgccgcggtggccgggtgccggtaagggtttccagcgcccccggcctaggttttggaggcgcgggaatgcgttcgttgctcagtgtcggacttccccctattcccatcggccgaggctgtcactttacgctcataaccgtttttctttactgcactcgtgtcgggaggaaagggacttgcgtggcacccccagacctccccgtctccgcttccacgtttggtacatcctgcctgaggcaggaagccgcagctgagggacggcctgtcgtacggtgcggatggtggtggcctgcgaggctcatttctagcaaggaacaaggctttcccgctttgattttataaatattatgtttacaaagctgtaatatatagaaattgataagacgtgtccctgtccctggaaacgcaggcaccgcgtgtttggaaagacattcatctgggctgtttgacagactccccagttggtgccatgctctgtgcttagggaactgtgagacccctggaggggtgggtaccgggaccgcactcagcctggggtttggaggcggcctcctataggaagcgacctgggacctaagatttttagactgactgtgggttcactggaataaaaaggaagaaacaaagagcattgcaggcatcgggactgtcacatttgacaagatcaaagctgcaggaaaatggacagtgaggttcagagagatggaaggatcttggatttgattgatgatgcttggcgagaagacaagctgccttatgaggatgtcgcaataccactgaatgagcttcctgaacctgaacaagacaatggtggcaccacagaatctgtcaaagaacaagaaatgaatggatggattttctcaaagtacacagataaagcatggtttgtttcagtctccaaattcaaacctttgagtaataaatcagcactcaaaaatgtacacccatttagtttgtggtagcaaagtgcaatgcgaaattgaatgagaaactgagatttctcagtaatggtgaatatttcgctctttaaacctaaaactcttcattgagtagcttatatttgaacatgattggttaaacatttgcctctacctctgattttgctttgctgtcaaagtttaacaccttccaactacttatgtgtgtcctgtaacacaggtgattgaacgtatgagagggaaaggcaaagaaaaaggaagccagacactaggagaattattaacttctcatacttccccacattgagaagcattcggagtgtatttagcctgtagatgttgtgatatgcaaatatcccattccctggttactggcattcctaagattcttcatggtattttcaaactttggataaatttacagattagaaagatatctgacagttaatctctgttctccttacaaattccttttgtgctgctggaaaggatctttggctaggtggatgactagttttattcaaagccttttctcaaagccctttcagttacaaccaccccactatggaatcagtatttagttatacatttgtataagaacctgtattttgaaaaacacattcatgtatatttattcctggaattatttgcctgttaaacagtgtctttcatgttctctccccagattgtaaactctgtaagaagctgcttgtatctgtatcccttgttgaaactctgaaaacactgaataactaaaatctcttctcatcctttt

SEQ ID NO: 366820 - DNA, 986 bp, Homo sapiens
agtgcagacacgtgatgcgggggagggcggggcgtggcaggagcaagcgtctgccgcggtggccgggtgccgatttgacaagatcaaagctgcaggaaaatggacagtgaggttcagagatggatggattttctcaaagtacacagataaagcatggtttgtttcagtctccaaattcaaacctttgagtaataaatcagcactcaaaaatgtacacccatttagtttgtggtagcaaagtgcaatgcgaaattgaatgagaaactgagatttctcagtaatggtgaatatttcgctctttaaacctaaaactcttcattgagtagcttatatttgaacatgattggttaaacatttgcctctacctctgattttgctttgctgtcaaagtttaacaccttccaactacttatgtgtgtcctgtaacacaggtgattgaacgtatgagagggaaaggcaaagaaaaaggaagccagacactaggagaattattaacttctcatacttccccacattgagaagcattcggagtgtatttagcctgtagatgttgtgatatgcaaatatcccattccctggttactggcattcctaagattcttcatggtattttcaaactttggataaatttacagattagaaagatatctgacagttaatctctgttctccttacaaattccttttgtgctgctggaaaggatctttggctaggtggatgactagttttattcaaagccttttctcaaagccctttcagttacaaccaccccactatggaatcagtatttagttatacatttgtataagaacctgtattttgaaaaacacattcatgtatatttattcctggaattatttgcctgttaaacagtgtctttcatgttctctccccagattgtaaactctgtaagaagctgcttgtatctgtatcccttgttgaaactctgaaaacactgaataactaaaatctcttctcatcctttt

SEQ ID NO: 366821 - DNA, 1068 bp, Homo sapiens
agtgcagacacgtgatgcgggggagggcggggcgtggcaggagcaagcgtctgccgcggtggccgggtgccggtaagggtttccagcgcccccggcctaggttttggaggcgcgggaatgcgttcgttgctcagtgtcggacttccccctattcccatcggccgaggctgtcactttacgctcataaccgtttttctttactgcactcgtgtcgggaggaaagggacttgcgtggcacccccagacctccccgtctccgcttccacgtttggtacatcctgcctgaggcaggaagccgcagctgagggacggcctgtcgtacggtgcggatggtggtggcctgcgaggctcatttctagcaaggaacaaggctttcccgctttgattttataaatattatgtttacaaagctgtaatatatagaaattgataagacgtgtccctgtccctggaaacgcaggcaccgcgtgtttggaaagacattcatctgggctgtttgacagactccccagttggtgccatgctctgtgcttagggaactgtgagacccctggaggggtgggtaccgggaccgcactcagcctggggtttggaggcggcctcctataggaagcgacctgggacctaagatttttagactgactgtgggttcactggaataaaaaggaagaaacaaagagcattgcaggcatcgggactgtcacatttgacaagatcaaagctgcaggaaaatggacagtgaggttcagagagatggaaggatcttggatttgattgatgatgcttggcgagaagacaagctgccttatgaggatgtcgcaataccactgaatgagcttcctgaacctgaacaagacaatggtggcaccacagaatctgtcaaagaacaagaaatgaagtggacagacttagccttacagtacctccatgagaatgttccccccattggaaactgacgcttggctcctttcttgtggatggattttctcaaagtacacagataaagcatggtttgtttcagtctccaaattcaaacctttgagtaataaatcagcactcaaaaatgta

SEQ ID NO: 366822 - DNA, 340 bp, Homo sapiens
ctataaaatatgtatcagttggggttggagagaggaactgtgatcaaagtagtcacccggcccatatgagaaaatgaaccttttcccaaaaggtggccccagactaaaaagcctggagaatcctaatagtggattataccatctcttcagtcttcgtgtttaagaaataacctctttggcttacagatttgacaagatcaaagctgcaggaaaatggacagtgaggttcagagagatggaaggatcttggatttgattgatgatgcttggcgagaagacaagctgccttatgaggatgtcgcaataccactggtaggttatgatttgagctgaggatggg

SEQ ID NO: 366823 - DNA, 1459 bp, Homo sapiens
agtgcagacacgtgatgcgggggagggcggggcgtggcaggagcaagcgtctgccgcggtggccgggtgccggtaagggtttccagcgcccccggcctaggttttggaggcgcgggaatgcgttcgttgctcagtgtcggacttccccctattcccatcggccgaggctgtcactttacgctcataaccgtttttctttactgcactcgtgtcgggaggaaagggacttgcgtggcacccccagacctccccgtctccgcttccacgtttggtacatcctgcctgaggcaggaagccgcagctgagggacggcctgtcgtacgatttgacaagatcaaagctgcaggaaaatggacagtgaggttcagagagatggaaggatcttggatttgattgatgatgcttggcgagaagacaagctgccttatgaggatgtcgcaataccactgaatgagcttcctgaacctgaacaagacaatggtggcaccacagaatctgtcaaagaacaagaaatgaagtggacagacttagccttacagtacctccatgagaatgttccccccattggaaactgacgcttggctcctttcttgtggatggattttctcaaagtacacagataaagcatggtttgtttcagtctccaaattcaaacctttgagtaataaatcagcactcaaaaatgtacacccatttagtttgtggtagcaaagtgcaatgcgaaattgaatgagaaactgagatttctcagtaatggtgaatatttcgctctttaaacctaaaactcttcattgagtagcttatatttgaacatgattggttaaacatttgcctctacctctgattttgctttgctgtcaaagtttaacaccttccaactacttatgtgtgtcctgtaacacaggtgattgaacgtatgagagggaaaggcaaagaaaaaggaagccagacactaggagaattattaacttctcatacttccccacattgagaagcattcggagtgtatttagcctgtagatgttgtgatatgcaaatatcccattccctggttactggcattcctaagattcttcatggtattttcaaactttggataaatttacagattagaaagatatctgacagttaatctctgttctccttacaaattccttttgtgctgctggaaaggatctttggctaggtggatgactagttttattcaaagccttttctcaaagccctttcagttacaaccaccccactatggaatcagtatttagttatacatttgtataagaacctgtattttgaaaaacacattcatgtatatttattcctggaattatttgcctgttaaacagtgtctttcatgttctctccccagattgtaaactctgtaagaagctgcttgtatctgtatcccttgttgaaactctgaaaacactgaataactaaaatctcttctcatcctttt

SEQ ID NO: 366824 - DNA, 1679 bp, Homo sapiens
agtgcagacacgtgatgcgggggagggcggggcgtggcaggagcaagcgtctgccgcggtggccgggtgccgatttgacaagatcaaagctgcaggaaaatggacagtgaggttcagagagatggaaggatcttggatttgattgatgatgcttggcgagaagacaagctgccttatgaggatgtcgcaataccactgaatgagcttcctgaacctgaacaagacaatggtggcaccacagaatctgtcaaagaacaagaaatgaagtggacagacttagccttacagtacctccatgagaatgttccccccattggaaactgacgcttggctcctttcttgtggatggattttctcaaagtacacagataaagcatggtttgtttcagtctccaaattcaaacctttgagtaataaatcagcactcaaaaatgtacacccatttagtttgtggtagcaaagtgcaatgcgaaattgaatgagaaactgagatttctcagtaatggtgaatatttcgctctttaaacctaaaactcttcattgagtagcttatatttgaacatgattggttaaacatttgcctctacctctgattttgctttgctgtcaaagtttaacaccttccaactacttatgtgtgtcctgtaacacaggtgattgaacgtatgagagggaaaggcaaagaaaaaggaagccagacactaggagaattattaacttctcatacttccccacattgagaagcattcggagtgtatttagcctgtagatgttgtgatatgcaaatatcccattccctggttactggcattcctaagattcttcatggtattttcaaactttggataaatttacagattagaaagatatctgacagttaatctctgttctccttacaaattccttttgtgctgctggaaaggatctttggctaggtggatgactagttttattcaaagccttttctcaaagccctttcagttacaaccaccccactatggaatcagtatttagttatacatttgtataagaacctgtattttgaaaaacacattcatgtatatttattcctggaattatttgcctgttaaacagtgtctttcatgttctctccccagattgtaaactctgtaagaagctgcttgtatctgtatcccttgttgaaactctgaaaacactgaataactaaaatctcttctcatccttttttatgctgggtctttttgtttacttagcttttaggaggaagaggtacatgaaaaaacaaattagcttattttaggttttcaatcacaaacatgattttagcagctatcctataatccagatacatccaggctgatttcttctctttgcatcagtagttctgcctagaaatcttttatcttcagaataaagaccccaaggcaccagtcccttcagtaagcaaagaaagacaacctaatagaaaagagacttacaatattaaaaaaacttatacaagagaaaaagcttttcaaaaaattaaaatacctagaacgccacagttctttcacattcttgttaaatgaggattttacagcttacttgtggtatgtaatctctgagacactaacatctaagaacttgacaaatgttcatgtgaatcctgcctagcctttccctggaatattagtagaccagtaaaatatgaaagctat

SEQ ID NO: 366825 - DNA, 1378 bp, Homo sapiens
agtgcagacacgtgatgcgggggagggcggggcgtggcaggagcaagcgtctgccgcggtggccgggtgccgatttgacaagatcaaagctgcaggaaaatggacagtgaggttcagagagatggaaggatcttggatttgattgatgatgcttggcgagaagacaagctgccttatgaggatgtcgcaataccactgaatgagcttcctgaacctgaacaagacaatggtggcaccacagaatctgtcaaagaacaagaaatgaagtggacagacttagccttacagtacctccatgagaatgttccccccattggaaactgacgcttggctcctttcttgtggatggattttctcaaagtacacagataaagcatggtttgtttcagtctccaaattcaaacctttgagtaataaatcagcactcaaaaatgtacacccatttagtttgtggtagcaaagtgcaatgcgaaattgaatgagaaactgagatttctcagtaatggtgaatatttcgctctttaaacctaaaactcttcattgagtagcttatatttgaacatgattggttaaacatttgcctctacctctgattttgctttgctgtcaaagtttaacaccttccaactacttatgtgtgtcctgtaacacaggtgattgaacgtatgagagggaaaggcaaagaaaaaggaagccagacactaggagaattattaacttctcatacttccccacattgagaagcattcggagtgtatttagcctgtagatgttgtgatatgcaaatatcccattccctggttactggcattcctaagattcttcatggtattttcaaactttggataaatttacagattagaaagatatctgacagttaatctctgttctccttacaaattccttttgtgctgctggaaaggatctttggctaggtggatgactagttttattcaaagccttttctcaaagccctttcagttacaaccaccccactatggaatcagtatttagttatacatttgtataagaacctgtattttgaaaaacacattcatgtatatttattcctggaattatttgcctgttaaacagtgtctttcatgttctctccccagattgtaaactctgtaagaagctgcttgtatctgtatcccttgttgaaactctgaaaacactgaataactaaaatctcttctcatccttttaaaaaaaaaaaaaaacaaaaaaaaaaaagggggggggttaaaaatcctggggggcaattttagtttccgttttgtacaagggggcttaggaaggtttaaaaaaacgggggttaaaatggtcaggaaaagggttgggtttgggacccttttgggttaatgaactcaagatt

SEQ ID NO: 366826 - DNA, 453 bp, Homo sapiens
tggtagagatagtatttcattatgttaccctagctggtctcaaattaccctcactcttgactgaaagtttactagaaacaattaataattaacagcgcattgaagacctatttcttctggcatctactgctgctgatgagaagtctgctgtcagcctaatttgtgagtaatatttcctttctcgctggtagcttttcaaatttccccttttaggattattcttaaagttctgcagtttctctaagctgtcttttctcggccctttttttaatagggagagccccactcagcttttcgtgctcatttagtgctcattttaccctgaagagcccatctttctgcctacttctgggcagagtggccagaaggcccaagtcttctgcttcttcccacttctttgtgtttctattccacttctgtttgggagatgtttattgccttggtttcttgttt

SEQ ID NO: 366827 - DNA, 408 bp, Homo sapiens
tggtagagatagtatttcattatgttaccctagctggtctcaaattaccctcactcttgactgaaagtttactagaaacaattaataattaacagcgcattgaagacctatttcttctggcatctactgctgctgatgagaagtctgctgtcagcctaatttgtgagtaatatttcctttctcgctggtagcttttcaaatttccccttttaggattattcttaaagttctgcagtttctctaagctgtcttttctcggccctttttttaatagggagagccccactcagcttttcgtgctcatttagtgctcattttaccctgaagagcccatctttctgcctacttctgggcagagtggccagaaggcccaagtcttctgcttctttccgtcgacgcggcccgcga

SEQ ID NO: 366828 - DNA, 1160 bp, Homo sapiens
aagacaaaaacaacaaaaaaaaagaaaaataggcaagagaggcctgggtgagtcggagaggtttgaggctttcggctgggactggatcatcgcacctaagcgctacaaggccaactactgctccggccagtgcgagtacatgttcatgcaaaaatatccgcatacccatttggtgcagcaggccaatccaagaggctctgctgggccctgttgtacccccaccaagatgtccccaatcaacatgctctacttcaatgacaagcagcagattatctacggcaagatccctggcatggtggtggatcgctgtggctgctcttaaggtgggggatagaggatgcctcccccacagaccctaccccaagagcgcgtggaaactgacaacaaagtacaaaaacaagacgcgtaaaagaagaaaaaagaaaaacgaacgagggggaaacacacagcaacgtgtgcacaatcagaaagagcggatgagagcaagaacatacaaggagagaagcgacagcgcagcgcacaacgccaggaagcaagggcacccgagaaacaaacgcgaaaacccagaggagaagacaaaacgagagcagacaagaacagaacagacacccaccaaagacagcagaacaaaagcaccgagaaaacacgcacagaacgaagacgcaacacaacaacaacacacacaacagcaaggaagaaacaaaccaaacaagaacggaaggcacagcgcacgaaaacaaaagaccgaacacaagaacaacgagacaacaaaaaacaaaagagaatcagcaacacgaacgtacaagcaggaaaacgaagagcaaatgaacaccaccaccgcactaacaaagaggacagagagcaaagcggaaggcacagaccatagacagcgagagcacacacagaacgacaacagcaggcaggaagagacacaacaccaagcgaaggcagagcaagagacgcacgacaagcaaagagaacaagacggaagacatgaacaagcgacaacgctagaggacaccaacacaaagacagaagggagaagaacaacaagggacgacgccacaacgacaaaaacgagaaggcggaggagcaagacaaaaaaagcaagggaacacagcagagagaggacacagagcagaaagcagcacgcgatgaat

SEQ ID NO: 366829 - DNA, 2465 bp, Homo sapiens
tctccgccccccagtacctccctcccctcccctccagcatggtgctcgcggccccgctgctgctgggcttcctgctcctcgccctggagctgcggccccggggggaggcggccgagggccccgcggcggcggcggcggcggcggcggcggcggcagcggcgggggtcgggggggagcgctccagccggccagccccgtccgtggcgcccgagccggacggctgccccgtgtgcgtttggcggcagcacagccgcgagctgcgcctagagagcatcaagtcgcagatcttgagcaaactgcggctcaaggaggcgcccaacatcagccgcgaggtggtgaagcagctgctgcccaaggcgccgccgctgcagcagatcctggacctacacgacttccagggcgacgcgctgcagcccgaggacttcctggaggaggacgagtaccacgccaccaccgagaccgtcattagcatggcccaggagacggacccagcagtacagacagatggcagccctctctgctgccattttcacttcagccccaaggtgatgttcacaaaggtactgaaggcccagctgtgggtgtacctacggcctgtaccccgcccagccacagtctacctgcagatcttgcgactaaaacccctaactggggaagggaccgcagggggagggggcggaggccggcgtcacatccgtatccgctcactgaagattgagctgcactcacgctcaggccattggcagagcatcgacttcaagcaagtgctacacagctggttccgccagccacagagcaactggggcatcgagatcaacgcctttgatcccagtggcacagacctggctgtcacctccctggggccgggagccgaggggctgcatccattcatggagcttcgagtcctagagaacacaaaacgttcccggcggaacctgggtctggactgcgacgagcactcaagcgagtcccgctgctgccgatatcccctcacagtggactttgaggctttcggctgggactggatcatcgcacctaagcgctacaaggccaactactgctccggccagtgcgagtacatgttcatgcaaaaatatccgcatacccatttggtgcagcaggccaatccaagaggctctgctgggccctgttgtacccccaccaagatgtccccaatcaacatgctctacttcaatgacaagcagcagattatctacggcaagatccctggcatggtggtggatcgctgtggctgctcttaaggtgggggatagaggatgcctcccccacagaccctaccccaagacccctagccctgcccccatccccccaagccctagagctccctccactcttcccgcgaacatcacaccgttccccgaccaagccgtgtgcaatacaacagagggaggcaggtgggaattgagggtgaggggtttgggggaaaggggaagcaggggcatagtcagggtggggagtgtttgaagtttgcagatgagaaggtttgacaaaaagacagagagatgtagagacagtgatagagacagaggaacaaaaagagcagcagtgagaaggcaaagagagaggcagaagagacagacgaggcagagacaaaacactgagaaagagactgaaatggagtaataaatgaaagccccacaccaagcctcctttcttccactggcaaggtgaggggcttggtatagtttggggagatcccctgactattcagtaggagaagaaatcaaaaatccattcttttctccttctctccctccaacagtggccaggggaaggggaagtgagggcaggggcaaaaagatttgggaatttttatttatttatttattgtgacttttcatttttttggtatttggctttactggaataggagggcccctgcccactgtgccccgtttatcccttattccccaaaccctgctctccccaacacctactcacttaagcacttgtataaagcctccagggttgggaatgggagtaaagggcaagagggcggacacatgaagtttagtttctaacccatcatcaccctaactcaaccttttctgagccaaatggcttgaattgaagccagttgtcatggaaatagtaagaggttagggtttaagagctggggatgcgggggtgggagagagaaccctcaacatccaggatctatataatgagagctactttaaaccctcaggtccaccctcatgatgctgagttatttagccagagggtgcagcctgcttatgcccaaattccctcagccaagagagagaccaaagagcctctggaatggctggatggtagagtagtcagaacacacaccatacttattaagttcgttgtcttatacgggcacgtttgtggtgccccaaaacatgtaccatatttcacatccaaggtaacagctcgcatatctccctgccatatgactaatatgcccctatcgatgg

SEQ ID NO: 366830 - DNA, 2208 bp, Homo sapiens
ggggaggttaaattttggggggattccaataatcagaaataagtggcattgccagaggccctcatataagagaacagcaaaaaagttatcctcccttaagttcctccctcactcctcatatcagacacagcaagagaactcagctcaacaccaagaagtcctgcccttattcacaccttccttcctatagccctcatcctcacagaagcttctagcctctatcttcagcagttcttaagaggtggggtggggggctgggcagtttagagtgagagtggaaaaaaagaataatcctagagaaccataaaaaagtacagatttacagctgaggaagctagttctccccacagcttttatagactccctcattaagagcttccaggtatgcagagaatgtcacagcttcaggaattggaatcagttaaccacatctggatgctggatcaactatagtagggaaacggggagaggaaggaagggtactaagatctcaggtaaacaattacaagcctcaatgtctgttccatctccaaacggaattactattttaaaactgaattgggaaaaaggcatcctgaactattcatgctcaaagagtatgtggagaatgactataatgagataggaaggggaggacttcatctggcttggaggttagagacttctgaccaacataggaacagctgctgaaatgggatgaaagaggttaataagaaaaaaaaaaaatcctcacaaattggaaaacactgttcaaagatctaggggaagtaagatgagtgaggagaataattaggcttcaagaagagaatcctggcaagtaaggctgaatatctttctggaaggttatagaggataaagagacgaagaaaacttccaaaagatccactgttccacttcataatcagcatctgctctattccctcatgtatttttctctttttaaaaccatattcaggaagaaaccattagtgaatctataatctctcaagttacaaatcagatctattctgttttcagatgaaggcagagtagagagaggaaaagctagccccaagatcagagcctgaggtaaagaaaaggaaggcagacagaaaagagggaaaagggaaggtcattccaattttaaggtttatttggttgaagaggtgtcaaaaatttaaccagcattcccttttgttcacttctccaaagtctcagaatggggcaaacttcacaacaaatgggcagcagtttttggatctgctctccaaggcacaatttttctaaattatctaaactttaggtccctgctttcctcaccaaccagagactttggagaaataaagagatatcttgacattagaaaggtgatcaaactattaccatttcattaagcacaaaaccaggcaggttttagtagaaataaggataaaggattacaccacagcaacatgggacctgatcatagtaccaaagtcttcaggtaaggtgtcaggctcctaagtcttattaccaaaaatagctcaaacaaaaaccgagcttatataaagattaagaggagaaattctgcaataacatatccaaaaagattaagcaggtttcagatctacatgaacttgaagcctccagttccactgcttatgttcccaatgatttagctaacaatgcgtaacagctctgacatcctctgtcatgctttgattctgcatacaaaatttcttctgtctctgagggatatccagcccatctcccttcctgaactgactgaccaacatagtatcgtatcacatcacccttgaaatcagggcccttttcctttaatgtgggaccctggactccattttatccaagaaaaagtctgcattattagctaataacagaaggctactaatcactgcccttgtatttatatcctttgcaacacctaaaacctcccatgttctgttttatttcagtgggtcactacaagctgctggagcaaagacttggtgggtgggtaacttaacctcttcacagaggataaaaaatgcttgtgagtatgacagaagggaataaacaggcttaaagggtaaactcagtccttttccttgtcttctcttctaagggataaaggtattatggccaattctctataatatttgcccctgaagctccccttatctggtctaatctagctccaataaatcaaaggagcacctaataaaacacattgttctcttttaaattttt

SEQ ID NO: 366831 - DNA, 1537 bp, Homo sapiens
tctccgccccccagtacctccctcccctcccctccagcatggtgctcgcggccccgctgctgctgggcttcctgctcctcgccctggagctgcggccccggggggaggcggccgagggccccgcggcggcggcggcggcggcggcggcggcggcagcggcgggggtcgggggggagcgctccagccggccagccccgtccgtggcgcccgagccggacggctgccccgtgtgcgtttggcggcagcacagccgcgagctgcgcctagagagcatcaagtcgcagatcttgagcaaactgcggctcaaggaggcgcccaacatcagccgcgaggtggtgaagcagctgctgcccaaggcgccgccgctgcagcagatcctggacctacacgacttccagggcgacgcgctgcagcccgaggacttcctggaggaggacgagtaccacgccaccaccgagaccgtcattagcatggcccaggagacggacccagcagtacagacagatggcagccctctctgctgccattttcacttcagccccaaggtgatgttcacaaaggtactgaaggcccagctgtgggtgtacctacggcctgtaccccgcccagccacagtctacctgcagatcttgcgactaaaacccctaactggggaagggaccgcagggggagggggcggaggccggcgtcacatccgtatccgctcactgaagattgagctgcactcacgctcaggccattggcagagcatcgacttcaagcaagtgctacacagctggttccgccagccacagagcaactggggcatcgagatcaacgcctttgatcccagtggcacagacctggctgtcacctccctggggccgggagccgaggggctgcatccattcatggagcttcgagtcctagagaacacaaaacgttcccggcggaacctgggtctggactgcgacgagcactcaagcgagtcccgctgctgccgatatcccctcacagtggactttgaggctttcggctgggactggatcatcgcacctaagcgctacaaggccaactactgctccggccagtgcgagtacatgttcatgcaaaaatatccgcatacccatttggtgcagcaggccaatccaagaggctctgctgggccctgttgtacccccaccaagatgtccccaatcaacatgctctacttcaatgacaagcagcagattatctacggcaagatccctggcatggtggtggatcgctgtggctgctcttaagtgggtcactacaagctgctggagcaaagacttggtgggtgggtaacttaacctcttcacagaggataaaaaatgcttgtgagtatgacagaagggaataaacaggcttaaagggtaaactcagtccttttccttgtcttctcttctaagggataaaggtattatggccaattctctataatatttgcccctgaagctccccttatctggtctaatctagctccaataaatcaaaggagcacctaataaaacacattgttctcttttaaattttt

SEQ ID NO: 366832 - DNA, 2772 bp, Homo sapiens
tctccgccccccagtacctccctcccctcccctccagcatggtgctcgcggccccgctgctgctgggcttcctgctcctcgccctggagctgcggccccggggggaggcggccgagggccccgcggcggcggcggcggcggcggcggcggcggcagcggcgggggtcgggggggagcgctccagccggccagccccgtccgtggcgcccgagccggacggctgccccgtgtgcgtttggcggcagcacagccgcgagctgcgcctagagagcatcaagtcgcagatcttgagcaaactgcggctcaaggaggcgcccaacatcagccgcgaggtggtgaagcagctgctgcccaaggcgccgccgctgcagcagatcctggacctacacgacttccagggcgacgcgctgcagcccgaggacttcctggaggaggacgagtaccacgccaccaccgagaccgtcattagcatggcccaggagacggacccagcagtacagacagatggcagccctctctgctgccattttcacttcagccccaaggtgatgttcacaaaggtactgaaggcccagctgtgggtgtacctacggcctgtaccccgcccagccacagtctacctgcagatcttgcgactaaaacccctaactggggaagggaccgcagggggagggggcggaggccggcgtcacatccgtatccgctcactgaagattgagctgcactcacgctcaggccattggcagagcatcgacttcaagcaagtgctacacagctggttccgccagccacagagcaactggggcatcgagatcaacgcctttgatcccagtggcacagacctggctgtcacctccctggggccgggagccgaggggctgcatccattcatggagcttcgagtcctagagaacacaaaacgttcccggcggaacctgggtctggactgcgacgagcactcaagcgagtcccgctgctgccgatatcccctcacagtggactttgaggctttcggctgggactggatcatcgcacctaagcgctacaaggccaactactgctccggccagtgcgagtacatgttcatgcaaaaatatccgcatacccatttggtgcagcaggccaatccaagaggctctgctgggccctgttgtacccccaccaagatgtccccaatcaacatgctctacttcaatgacaagcagcagattatctacggcaagatccctggcatggtggtggatcgctgtggctgctcttaaggtgggggatagaggatgcctcccccacagaccctaccccaagacccctagccctgcccccatccccccaagccctagagctccctccactcttcccgcgaacatcacaccgttccccgaccaagccgtgtgcaatacaacagagggaggcaggtgggaattgagggtgaggggtttgggggaaaggggaagcaggggcatagtcagggtggggagtgtttgaagtttgcagatgagaaggtttgacaaaaagacagagagatgtagagacagtgatagagacagaggaacaaaaagagcagcagtgagaaggcaaagagagaggcagaagagacagacgaggcagagacaaaacactgagaaagagactgaaatggagtaataaatgaaagccccacaccaagcctcctttcttccactggcaaggtgaggggcttggtatagtttggggagatcccctgactattcagtaggagaagaaatcaaaaatccattcttttctccttctctccctccaacagtggccaggggaaggggaagtgagggcaggggcaaaaagatttgggaatttttatttatttatttattgtgacttttcatttttttggtatttggctttactggaataggagggcccctgcccactgtgccccgtttatcccttattccccaaaccctgctctccccaacacctactcacttaagcacttgtataaagcctccagggttgggaatgggagtaaagggcaagagggcggacacatgaagtttagtttctaacccatcatcaccctaactcaaccttttctgagccaaatggcttgaattgaagccagttgtcatggaaatagtaagaggttagggtttaagagctggggatgcgggggtgggagagagaaccctcaacatccaggatctatataatgagagctactttaaaccctcaggtccaccctcatgatgctgagttatttagccagagggtgcagcctgcttatgcccaaattccctcagccaagagagagaccaaagagcctctggaatggccctgctcccagcctctatcttcaggtcaattagagagagtatagagaccccagagtcccctgggtctggaaagcgttaggagaggtcaagaaaggagcagtaaggaggctgaaggttacagggcatttgaatccaaatcactgctctgggctagggaatagagccagcagaccaaggtgggaaggattctggaagggggacattttagtctcctaaccccaaagctcagggtggaagaggggagaacaaggaagcagagtgtataattattttttccttttatttttggaatctaacagtacctggcagcagggaggggaaagtacagtggggaaaagcatctgacaaggccagttagaacagaggatgggaaggatggagactcccgggcttggaaggctaggaagcaggcagagactggttgccatttcaagtcactagctaggcccattcattcctccca

SEQ ID NO: 366833 - DNA, 1774 bp, Homo sapiens
  misc_feature (1761)..(1761): n is a, c, g, or t
tctccgccccccagtacctccctcccctcccctccagcatggtgctcgcggccccgctgctgctgggcttcctgctcctcgccctggagctgcggccccggggggaggcggccgagggccccgcggcggcggcggcggcggcggcggcggcggcagcggcgggggtcgggggggagcgctccagccggccagccccgtccgtggcgcccgagccggacggctgccccgtgtgcgtttggcggcagcacagccgcgagctgcgcctagagagcatcaagtcgcagatcttgagcaaactgcggctcaaggaggcgcccaacatcagccgcgaggtggtgaagcagctgctgcccaaggcgccgccgctgcagcagatcctggacctacacgacttccagggcgacgcgctgcagcccgaggacttcctggaggaggacgagtaccacgccaccaccgagaccgtcattagcatggcccaggagacggacccagcagtacagacagatggcagccctctctgctgccattttcacttcagccccaaggtgatgttcacaaaggtactgaaggcccagctgtgggtgtacctacggcctgtaccccgcccagccacagtctacctgcagatcttgcgactaaaacccctaactggggaagggaccgcagggggagggggcggaggccggcgtcacatccgtatccgctcactgaagattgagctgcactcacgctcaggccattggcagagcatcgacttcaagcaagtgctacacagctggttccgccagccacagagcaactggggcatcgagatcaacgcctttgatcccagtggcacagacctggctgtcacctccctggggccgggagccgaggggctgcatccattcatggagcttcgagtcctagagaacacaaaacgttcccggcggaacctgggtctggactgcgacgagcactcaagcgagtcccgctgctgccgatatcccctcacagtggactttgaggctttcggctgggactggatcatcgcacctaagcgctacaaggccaactactgctccggccagtgcgagtacatgttcatgcaaaaatatccgcatacccatttggtgcagcaggccaatccaagaggctctgctgggccctgttgtacccccaccaagatgtccccaatcaacatgctctacttcaatgacaagcagcagattatctacggcaagatccctggcatggtggtggatcgctgtggctgctcttaaggtgggggatagaggatgcctcccccacagaccctaccccaagacccctagccctgcccccatccccccaagccctagagctccctccactcttcccgcgaacatcacaccgttccccgaccaagccgtgtgcaatacaacagagggaggcaggtgggaattgagggtgaggggtttgggggaaaggggaagcaggggcatagtcagggtggggagtgtttgaagtttgcagatgagaaggtttgacaaaaagacagagagatgtagagacagtgatagagacagaggaacaaaaagagcagcagtgagaaggcaaagagagaggcagaagagacagacgaggcagagacaaaacactgagaaagagactgaaatggagtaataaatgaaagccccacaccaagcctcctttcttccactggcaaggtgaggggcttggtatagtttggggagatcccctgactattcagtaggagaacatttgtaaataaagttaaanttctaagtcaaaa

SEQ ID NO: 366834 - DNA, 877 bp, Homo sapiens
ggtagtggttggctgtgggaccccggcacccggctccgcacctgaggggaaatccgctggaaagcactagggccaagcggctccggtaggcgcgcggcagagaggtggtccgccgccggcagccggggctttggtggccgctgaaggtttgcggcaggaggcctttgtgaagtcagtcggctccaggtcgccctccggatgcggtccccacaccgcctgcgtcacctgggttgaggggctcatttgaaatacagacttcgctacccaccccagcctgctgaatcggaaatgcagcggtgagccataggtgattattatgcacccttaaatttaagaattagtcattcggaggtttctctcaatggcgaacttgaaaataagttcaggaaaccagacaattggagcggaccgacagccctgattccaatggtaagagcagtgcgctgggtgtgatctttctgccagcaccttaaggcctcacttaacctcgggaccttagttgcatcatctatagaatgaaatgattgctctccgacctaccttctcgtggtggtgatgtgataataaaaattgaatagtgagcaacccagtgggctatggaaatgtgtggaagatggcatttctatttctcagtggggctcttacctattactcatcaaccttgtaggcagaattgactgatgcagcctacacagtatttaattacataaatgggacaccacctatgtgcccaacatgggatttgataggaaggatttgaaggggttagagacagggagaccaaataggagtctgcccagccacccagctttcgggtaatgtgcgtctggtcttcagggccaacaatagagagaatgtgaaattaagttgatgatgg

SEQ ID NO: 366835 - DNA, 717 bp, Homo sapiens
ggtagtggttggctgtgggaccccggcacccggctccgcacctgaggggaaatccgctggaaagcactagggccaagcggctccggtaggcgcgcggcagagaggtggtccgccgccggcagccggggctttggtggccgctgaaggtttgcggcaggaggcctttgtgaagtcagtcggctccaggtcgccctccggatgcggtccccacaccgcctgcgtcacctgggttgaggggctcatttgaaatacagacttcgctacccaccccagcctgctgaatcggaaatgcagcgggtagctgtcaatggctttggaagaaaatcccagagataacagaacattcttgctgcattatggaattaaatgatcttcttggcacagaggacaatgctatgggatgaatgagttggggaaatgaatgcctatgatgctgattttaaaaattattcaaaagagctggattctaaaagttgaatgaatactttatataacttatattttcctttttatacttgcacaagagtaaaatagaataaaaatcatttctaaataaagcttaagagttcttttatcataaaaatctgggcttaaaagagctctttcaataagcgttaaataaaaattttaggattctgttgtaatttaattggttatttatttaattattccctccttgtcagttgatcttagagctgactaaatacagtttgtctc

SEQ ID NO: 366836 - DNA, 850 bp, Homo sapiens
ggtagtggttggctgtgggaccccggcacccggctccgcacctgaggggaaatccgctggaaagcactagggccaagcggctccggtaggcgcgcggcagagaggtggtccgccgccggcagccggggctttggtggccgctgaaggtttgcggcaggaggcctttgtgaagtcagtcggctccaggtcgccctccggatgcggtccccacaccgcctgcgtcacctgggttgaggggctcatttgaaatacagacttcgctacccaccccagcctgctgaatcggaaatgcagcggtgagccataggtgattattatgcacccttaaatttaagaattagtcattcggaggtttctctcaatggcgaacttgaaaataagttcaggaaaccagacaattggagcggaccgacagccctgattccaatgggtagctgtcaatggctttggaagaaaatcccagagataacagaacattcttgctgcattatggaattaaatgatcttcttggcacagaggacaatgctatgggatgaatgagttggggaaatgaatgcctatgatgctgattttaaaaattattcaaaagagctggattctaaaagttgaatgaatactttatataacttatattttcctttttatacttgcacaagagtaaaatagaataaaaatcatttctaaataaagcttaagagttcttttatcataaaaatctgggcttaaaagagctctttcaataagcgttaaataaaaattttaggattctgttgtaatttaattggttatttatttaattattccctccttgtcagttgatcttagagctgactaaatacagtttgtctc

SEQ ID NO: 366837 - DNA, 783 bp, Homo sapiens
tgcgcgttgtgcgctgtcccaggttggaaaccagtgccccaggcggcgaggagagcggtgccttgcagggatgctgcgggcgggagcaccaaccggggacttaccccgggcgggagaagtccacaccgggaccaccatcatggcagtggagtttgacgggggcgttgtgatgggttctgattcccgagtgtctgcaggcgaggcggtggtgaaccgagtgtttgacaagctgtccccgctgcacgagcgcatctactgtgcactctctggttcagctgctgatgcccaagccgtggccgacatggccgcctaccagctggagctccatgggatagaactggaggaacctccacttgttttggctgctgcaaatgtggtgagaaatatcagctataaatatcgagaggacttgtctgcacatctcatggtagctggctgggaccaacgtgaaggaggtcaggtatatggaaccctgggaggaatgctgactcgacagccttttgccattggtggctccggcagcacctttatctatggttatgtggatgcagcatataagccaggcatgtctcccgaggagtgcaggcgcttcaccacagacgctattgctctggccatgagccgggatggctcaagcgggggtgtcatctacctggtcactattacagctgccggtgtggaccatcgagtcatcttgggcaatgaactgccaaaattctatgatgagtgaaccttccccagacttctctttcttattttgtaataaactctctagggccaaaa

SEQ ID NO: 366838 - DNA, 1154 bp, Homo sapiens
tgcgcgttgtgcgctgtcccaggttggaaaccagtgccccaggcggcgaggagagcggtgccttgcagggatgctgcgggcgggagcaccaaccggggacttaccccgggcgggagaagtccacaccgggaccaccatcatggcagtggagtttgacgggggcgttgtgatgggttctgattcccgagtgtctgcaggcgaggcggtggtgaaccgagtgtttgacaagctgtccccgctgcacgagcgcatctactgtgcactctctggttcagctgctgatgcccaagccgtggccgacatggccgcctaccagctggagctccatgggatagaactggaggaacctccacttgttttggctgctgcaaatgtggtgagaaatatcagctataaatatcgagaggacttgtctgcacatctcatggtagctggctgggaccaacgtgaaggaggtcaggtatatggaaccctgggaggaatgctgactcgacagccttttgccattggtggctccggcagcacctttatctatggttatgtggatgcagcatataagccaggcatgtctcccgaggagtgcaggcgcttcaccacagacgctattgctctggccatgagccgggatggctcaagcgggggtgtcatctacctggtcactattacagctgccggtgtggaccatcgagtcatcttgggcaatgaactgccaaaattctatgatgagtgaaccttccccagacttctctttcttattttgtaataaactctctagggccaaaaatactcagcactataatgtaagacacagcacaacatacacaaaaaaagaggcgggcggcctatagattctcccccgggggggcacacacagtgcggctccacaaatttgtgacaacacgaggccccacatgagggcgtcttataaaaacagacgccgagcgcccggttaacccagcgcccgagcggacgaaaaagcgcgacaccgcgaccctcgtggcaagacacacacttgggcggggggacaacactgcggaccacacaccccagagagatgacacgcccgcgggacagacacgaacgacggggtcacagtgtgcacacaggccatatgacggtgcagaagattgcgcagggatcggcgaacacacacg

SEQ ID NO: 366839 - DNA, 725 bp, Homo sapiens
gagaaaaggacagttagtgcctggaccaggaccatcacactggggaccggcttctctgctctcccgttatgggggtcgggggaatgatgggtcaagggtcttccgaagaaagcgagaaaggaacaggcgccttcaaaagcccacttggcgatgggttacagtaagaggaagtctgcattatcacgaggagcttggaaaggaggtaacacactcaaggcaaatttcaagtaactcatcctggaggcagctgcctactctgcagctgtggttctccaccacagagagaagaaaagggagggagatggagtgcgcaggtctgagaaggctttcattctggagcatctgcaggagcctgcaccatggcccagtagcacccctttttctccatgagctgctggtgggttcccccctcccggatagcgcctccttccagaaagaggatgtggtcagcctgctccaccaggctgaggtgctgggtgatgagaagcactgagcgggagtaccgctcagggctttcgtacaggagctgctccacctgaggaaagacatcggaccgtcagagccggggactaccctcagcccagggagacacctgtgtttccagggctgggactgacctcacaggatcactgctggctctgctaacaaccccaaggacaccaacgtttcccattctgagtacttctccgcaaaccctttgtttcattaaggactgttttacatga

SEQ ID NO: 366840 - DNA, 409 bp, Homo sapiens
agtactgacagtctgctgcacagccaaacatggtgccaaagcaggtaagggttaatctcaatcaccttgttcacccgtaaggcactaatgtaggacccagctgaggcccgagaatccactgctgcaatcactccatgctggaacttgaaggcgagcgtggtggtgccatgggccatctcaatctgaacgttcctttctccgtccccacccagggactggaagaattctgtgggctgcattccccggggtaaagcgagctctggagatcgcatagagaaactgtagtgtcctgggtccgagcgacgcccgcttcccgcaaccgggagagccgattccggccgctgccctcggggggctccgcatacatctagtagcgccatgaccgcccagcacccagagatctgtccgc

SEQ ID NO: 366841 - DNA, 1114 bp, Homo sapiens
gagaaaaggacagttagtgcctggaccaggaccatcacactggggaccggcttctctgctctcccgttatgggggtcgggggaatgatgggtcaagggtcttccgaagaaagcgagaaaggaacaggcgccttcaaaagcccacttggcgatgggttacagtaagagggcccctccaggttcaacggtctcctaacctgtagtcacccacaagagcgtgccctttctgcccgcccttcctagcgttgctccctgcttggctgagcactgcggagtttcacgcctctaaaccccgcctcttcttgcaacctgtgttggcctcatctacccagcaactgtcgacgtcacacgacctgggcctccctgaatgggagatatttactaggcaatcccgcctactgttctgaggtttcccctccaggtgcagcttcagagccaggcgagccaggaaggaccagcgggcgaggtgtttcagagtgctggccacaccaaagcatcagccctggctctaaactccgttacagtaaggaattacaaatcctgtgtttgtactccaggaagtctgcattatcacgaggagcttggaaaggaggtaacacactcaaggcaaatttcaagtaactcatcctggaggcagctgcctactctgcagctgtggttctccaccacagagagaagaaaagggagggagatggagtgcgcaggtctgagaaggctttcattctggagcatctgcaggagcctgcaccatggcccagtagcacccctttttctccatgagctgctggtgggttcccccctcccggatagcgcctccttccagaaagaggatgtggtcagcctgctccaccaggctgaggtgctgggtgatgagaagcactgagcgggagtaccgctcagggctttcgtacaggagctgctccacctgaggaaagacatcggaccgtcagagccggggactaccctcagcccagggagacacctgtgtttccagggctgggactgacctcacaggatcactgctggctctgctaacaaccccaaggacaccaacgtttcccattctgagtacttctccgcaaaccctttgtttcattaaggactgttttacatga

SEQ ID NO: 366842 - DNA, 171 bp, Homo sapiens
tcatccgggatgcctgatgttgtaaagtgtcagtcatacctagaacacggatcccgctgccggtgtggaccatcgagtcatcttgggcaatgaactgccaaaattctatgatgagtgaaccttccccagacttctctttcttattttgtaataaactctctagggccaaaa

SEQ ID NO: 366843 - DNA, 1105 bp, Homo sapiens
tgcgcgttgtgcgctgtcccaggttggaaaccagtgccccaggcggcgaggagagcggtgccttgcagggatgctgcgggcgggagcaccaaccggggacttaccccgggcgggagaagtccacaccgggaccaccatcatggcagtggagtttgacgggggcgttgtgatgggttctgattcccgagtgtctgcaggcgaggcggtggtgaaccgagtgtttgacaagctgtccccgctgcacgagcgcatctactgtgcactctctggttcagctgctgatgcccaagccgtggccgacatggccgcctaccagctggagctccatgggatagaactggaggaacctccacttgttttggctgctgcaaatgtggtgagaaatatcagctataaatatcgagaggacttgtctgcacatctcatggtagctggctgggaccaacgtgaaggaggtcaggtatatggaaccctgggaggaatgctgactcgacagccttttgccattggtggctccggcagcacctttatctatggttatgtggatgcagcatataagccaggcatgtctcccgaggagtgcaggcgcttcaccacagacgctattgctctggccatgagccgggatggctcaagcgggggtgtcatctacctggtcactattacagctgccggtgtggaccatcgagtcatcttgggcaatgaactgccaaaattctatgatgagtgaaccttccccagacttctctttcttattttgtaataaactctctagggccaaaacctatggtatggtcattgggaaatgagtgctcagggagatggagcttaggggaggtgggtgcttccctcctagatgtcagcatacactctttcttcttttgtcccaggtctaaaacatctttcctagagaaaacaaaagggactaaactagaaatataaagagccctatacatgacaggtgatcacgtactgaatgattttgaagtagtacaaacaataaaaattctcattccgcatcatcatgcggtccatgatgatgaggccgcaagtgaggtgatgggactctttcctttaaggctaagactgacagataggcaagaca

SEQ ID NO: 366844 - DNA, 1121 bp, Homo sapiens
gagaaaaggacagttagtgcctggaccaggaccatcacactggggaccggcttctctgctctcccgttatgggggtcgggggaatgatgggtcaagggtcttccgaagaaagcgagaaaggaacaggcgccttcaaaagcccacttggcgatgggttacagtaagagggcccctccaggttcaacggtctcctaacctgtagtcacccacaagagcgtgccctttctgcccgcccttcctagcgttgctccctgcttggctgagcactgcggagtttcacgcctctaaaccccgcctcttcttgcaacctgtgttggcctcatctacccagcaactgtcgacgtcacacgacctgggcctccctgaatgggagatatttactaggcaatcccgcctactgttctgaggtttcccctccaggtgcagcttcagagccaggcgagccaggaaggaccagcgggcgaggtgaccaccatcatggcagtggagtttgacgggggcgttgtgatgggttctgattcccgagtgtctgcaggcgaggcggtggtgaaccgagtgtttgacaagctgtccccgctgcacgagcgcatctactgtgcactctctggttcagctgctgatgcccaagccgtggccgacatggccgcctaccagctggagctccatgggatagaactggaggaacctccacttgttttggctgctgcaaatgtggtgagaaatatcagctataaatatcgagaggacttgtctgcacatctcatggtagctggctgggaccaacgtgaaggaggtcaggtatatggaaccctgggaggaatgctgactcgacagccttttgccattggtggctccggcagcacctttatctatggttatgtggatgcagcatataagccaggcatgtctcccgaggagtgcaggcgcttcaccacagacgctattgctctggccatgagccgggatggctcaagcgggggtgtcatctacctggtcactattacagctgccggtgtggaccatcgagtcatcttgggcaatgaactgccaaaattctatgatgagtgaaccttccccagacttctctttcttattttgtaataaactctctagggccaaaa

SEQ ID NO: 366845 - DNA, 809 bp, Homo sapiens
ggaccaggaccatcacactggggaccggcttctctgctctcccgttatgggggtcgggggaatgatgggtcaagggtcttccgaagaaagcgagaaaggaacaggcgccttcaaaagcccacttggcgatgggttacagtaagaggtacctccaggcccgggcatccgctggaaacaggggtgggtagggtcgtgtcatctaaaggcgcagcttcaaccagaagactagaagtcagccaggagctgggagtagtgtcacgcggggtgggggttcctatgagcatcactttacaaaaccaggagggacggaagtgcgagggggcagagtcttggaaacaggtcctgggccaactgcaacagaatatacccgccgcgtgtaggggaaggcggcgccagggagagggcgcagtctctgaatctttccacggggtccatcctagggcccctccaggttcaacggtctcctaacctgtagtcacccacaagagcgtgccctttctgcccgcccttcctagcgttgctccctgcttggctgagcactgcggagtttcacgcctctaaaccccgcctcttcttgcaacctgtgttggcctcatctacccagcaactgtcgacgtcacacgacctgggcctccctgaatgggagatatttactaggcaatcccgcctactgttctgaggtttcccctccaggtgcagcttcagagccaggcgagccaggaaggaccagcgggcgaggtggtgagttgtgaggcgcgcccagtccctctgttcccgcctggcacttgctctggccgcgcccgccccat

SEQ ID NO: 366846 - DNA, 809 bp, Homo sapiens
tgcgcgttgtgcgctgtcccaggttggaaaccagtgccccaggcggcgaggagagcggtgccttgcagggatgctgcgggcgggagcaccaaccggggacttaccccgggcgggagaagtccacaccgggaccaccatcatggcagtggagtttgacgggggcgttgtgatgggttctgattcccgagtgtctgcaggcgaggcggtggtgaaccgagtgtttgacaagctgtccccgctgcacgagcgcatctactgtgcactctctggttcagctgctgatgcccaagccgtggccgacatggccgcctaccagctggagctccatgggatagaactggaggaacctccacttgttttggctgctgcaaatgtggtgagaaatatcagctataaatatcgagaggacttgtctgcacatctcatggtagctggctgggaccaacgtgaaggaggtcaggtatatggaaccctgggaggaatgctgactcgacagccttttgccattggtggctccggcagcacctttatctatggttatgtggatgcagcatataagccaggcatgtctcccgaggagtgcaggcgcttcaccacagacgctattgctctggccatgagccgggatggctcaagcgggggtgtcatctacctggtcactattacagctgccggtgtggaccatcgagtcatcttgggcaatgaactgccaaaattctatgatgagtgaaccttccccagacttctctttcttattttgtaataaactctctagggccaaaaaaaaaagtcgaacaccacaaaagggg

SEQ ID NO: 366847 - DNA, 1142 bp, Homo sapiens
gagaaaaggacagttagtgcctggaccaggaccatcacactggggaccggcttctctgctctcccgttatgggggtcgggggaatgatgggtcaagggtcttccgaagaaagcgagaaaggaacaggcgccttcaaaagcccacttggcgatgggttacagtaagagaccaccatcatggcagtggagtttgacgggggcgttgtgatgggttctgattcccgagtgtctgcaggcgaggcggtggtgaaccgagtgtttgacaagctgtccccgctgcacgagcgcatctactgtgcactctctggttcagctgctgatgcccaagccgtggccgacatggccgcctaccagctggagctccatgggatagaactggaggaacctccacttgttttggctgctgcaaatgtggtgagaaatatcagctataaatatcgagaggacttgtctgcacatctcatggtagctggctgggaccaacgtgaaggaggtcaggtatatggaaccctgggaggaatgctgactcgacagccttttgccattggtggctccggcagcacctttatctatggttatgtggatgcagcatataagccaggcatgtctcccgaggagtgcaggcgcttcaccacagacgctattgctctggccatgagccgggatggctcaagcgggggtgtcatctacctggtcactattacagctgccggtgtggaccatcgagtcatcttgggcaatgaactgccaaaattctatgatgagtgaaccttccccagacttctctttcttattttgtaataaactctctagggccaaaacctatggtatggtcattgggaaatgagtgctcagggagatggagcttaggggaggtgggtgcttccctcctagatgtcagcatacactctttcttcttttgtcccaggtctaaaacatctttcctagagaaaacaaaagggactaaactagaaatataaagagccctatacatgacaggtgatcacgtactgaatgattttgaagtagtacaaacaataaaaattctcattccgcatcatcatgcggtccatgatgatgaggccgcaagtgaggtgatgggactctttcctttaaggctaagactgacagataggcaagaca

SEQ ID NO: 366848 - DNA, 719 bp, Homo sapiens
tgcgcgttgtgcgctgtcccaggttggaaaccagtgccccaggcggcgaggagagcggtgccttgcagggatgctgcgggcgggagcaccaaccggggacttaccccgggcgggagaagtccacaccgggaccaccatcatggcagtggagtttgacgggggcgttgtgatgggttctgattcccgagtgtctgcagggatagaactggaggaacctccacttgttttggctgctgcaaatgtggtgagaaatatcagctataaatatcgagaggacttgtctgcacatctcatggtagctggctgggaccaacgtgaaggaggtcaggtatatggaaccctgggaggaatgctgactcgacagccttttgccattggtggctccggcagcacctttatctatggttatgtggatgcagcatataagccaggcatgtctcccgaggagtgcaggcgcttcaccacagacgctacttctactaaaagaagagtatgtggatactttctaagaactcaaaaacgagaaaaccaaaatcagagggtgcatgaatatatgtgcacaggtgagaggtcactatcctcctctccactgctttcttgttcctgaacctgatactttggctccaagccttcagcagcagctaagttcttagcaagctatctgttgccatagcttcagtggtttctgtatcactacatgcatcttcatcatcacccat

SEQ ID NO: 366849 - DNA, 496 bp, Homo sapiens
cggccgcctgctcactagataacgcctacttccaaaagtggcctgcccagactattttggtagcaagcgtggaaatcagatctgagaatctcgggagcagccctggtgcccaattttctccatcacgcacacccttctcgcctctccctgcctcctgcctttccacttgcaccagttttcccaccccagcctcagggcggggctgcctcgtcacttgtctcggggcagatctgccctacacacgttagcgccgcgcgcaaagcagccccgcagcacccaggcgcctcctggcggcgccgcgaaggggcggggctgtcggctgcgcgttgtgcgctgtcccaggttggaaaccagtgccccaggcggcgaggagagcggtgccttgcagggatgctgcgggcgggagcaccaaccggggacttaccccgggcgggagaagtccacaccggggtaatgggtctgggcttgagggttggcagaggggtggaggagatgc

SEQ ID NO: 366850 - DNA, 752 bp, Homo sapiens
tgtgtgtggacaagggcaggaaagttctcttgtcttcctttgggagcccccacctcacctgtaactctttgtcctaacttgcacttcctcctctcaggccccatccccatgtggcctcttctttgggtctggcgctctccgggactgaaggctacccccgaccctgtaccccgcgctcccgctctcgcctcctcctctcaggcgaccctccactcctcagcgcccgcctccctgcatccctaggggcttccctactgccccgacctgcattccccggggtaaagcgagctctggagatcgcatagagaaactgtagtgtcctgggtccgagcgacgcccgcttcccgcaaccgggagagccgattccggccgctgccctcggggggctccgcatacatctagtagcgccatgaccgcccagcacccagagatctgtccgctctcggaggaggaagtgaaagcgaaagccacagatcgaaggggagggaacaagactcttttccacatccccctgccttttccgagaaaaggacagttagtgcctggaccaggaccatcacactggggaccggcttctctgctctcccgttatgggggtcgggggaatgatgggtcaagggtcttccgaagaaagcgagaaaggaacaggcgccttcaaaagcccacttggcgatgggttacagtaagaggtacctccaggcccgggcatccgctggaaacaggggtgggtagggtcgtgtcatctaaaggcg

SEQ ID NO: 366851 - DNA, 1055 bp, Homo sapiens
  misc_feature (1)..(2): n is a, c, g, or t
  misc_feature (5)..(5): n is a, c, g, or t
nnccnctccaactctcaacccacttctccagccagcgccccagccctcccgccgcccgctcgcaggtcccgaggagcgcagactgtgtccctgacaatgggaacagccgacagtgatgagatggccccggaggccccacagcacacccacatcgatgtgcacatccaccaggagtctgccctggccaagctcctgctcacctgctgctctgcgctgcggccccgggccacccaggccaggggcagcagccggctgctggtggcctcgtgggtgatgcagatcgtgctggggatcttgagtgcagtcctaggaggatttttctacatccgcgactacaccctcctcgtcacctcgggagctgccatctggacaggggctgtggctgtgctggctggagctgctgccttcatttacgagaaacggggtggtacatactgggccctgctgaggactctgctagcgctggcagctttctccacagccatcgctgccctcaaactttggaatgaagatttccgatatggctactcttattacaacagtgcctgccgcatctccagctcgagtgactggaacactccagcccccactcagagtccagaagaagtcagaaggctacacctatgtacctccttcatggacatgctgaaggccttgttcagaacccttcaggccatgctcttgggtgtctggattctgctgcttctggcatctctggcccctctgtggctgtactgctggagaatgttcccaaccaaagggaaaagagaccagaaggaaatgttggaagtgagtggaatctagccatgcctctcctgattattagtgcctggtgcttctgcaccgggcgtccctgcatctgactgctggaagaagaaccagactgaggaaaagaggctcttcaacagccccagttatcctggccccatgaccgtggccacagccctgctccagcagcacttgcccattccttacaccccttccccatcctgctccgcttcatgtcccctcctgagtagtcatgtgataataaactctcatgttattgttcccag

SEQ ID NO: 366852 - DNA, 744 bp, Homo sapiens
cctcaggagttggatccaggctccaccctctcagcaattatcttaccatggataataaagcttagcatgaaacctcccgcctaagctgtgtcgctggggaagggcctgcatggaggctctctcgtgggagaggagttgcatttcctgtactaagcctgctcctggctcaatctctccccaggctgtgctggctggagctgctgccttcatttacgagaaacggggtggtacatactgggccctgctgaggactctgctagcgctggcagctttctccacagccatcgctgccctcaaactttggaatgaagatttccgatatggctactcttattacaacagtgcctgccgcatctccagctcgagtgactggaacactccagcccccactcagagtccagaagaagtcagaaggctacacctatgtacctccttcatggacatgctgaagaaaagagaccagaaggaaatgttggaagtgagtggaatctagccatgcctctcctgattattagtgcctggtgcttctgcaccgggcgtccctgcatctgactgctggaagaagaaccagactgaggaaaagaggctcttcaacagccccagttatcctggccccatgaccgtggccacagccctgctccagcagcacttgcccattccttacaccccttccccatcctgctccgcttcatgtcccctcctgagtagtcatgtgataataaactctcatgttattgttcccag

SEQ ID NO: 366853 - DNA, 1195 bp, Homo sapiens
  misc_feature (1)..(2): n is a, c, g, or t
  misc_feature (5)..(5): n is a, c, g, or t
nnccnctccaactctcaacccacttctccagccagcgccccagccctcccgccgcccgctcgcaggtcccgaggagcgcaggtgaggcggcaccccactcccggcggcccccgggcctccttccgcacgcaccccgagctgcctccgcacagttggaggagcgtaggagggacccccacccagggatgacactccaggaaggggactgcagaggaagccagactgtgtccctgacaatgggaacagccgacagtgatgagatggccccggaggccccacagcacacccacatcgatgtgcacatccaccaggagtctgccctggccaagctcctgctcacctgctgctctgcgctgcggccccgggccacccaggccaggggcagcagccggctgctggtggcctcgtgggtgatgcagatcgtgctggggatcttgagtgcagtcctaggaggatttttctacatccgcgactacaccctcctcgtcacctcgggagctgccatctggacaggggctgtggctgtgctggctggagctgctgccttcatttacgagaaacggggtggtacatactgggccctgctgaggactctgctagcgctggcagctttctccacagccatcgctgccctcaaactttggaatgaagatttccgatatggctactcttattacaacagtgcctgccgcatctccagctcgagtgactggaacactccagcccccactcagagtccagaagaagtcagaaggctacacctatgtacctccttcatggacatgctgaaggccttgttcagaacccttcaggccatgctcttgggtgtctggattctgctgcttctggcatctctggcccctctgtggctgtactgctggagaatgttcccaaccaaagggaaaagagaccagaaggaaatgttggaagtgagtggaatctagccatgcctctcctgattattagtgcctggtgcttctgcaccgggcgtccctgcatctgactgctggaagaagaaccagactgaggaaaagaggctcttcaacagccccagttatcctggccccatgaccgtggccacagccctgctccagcagcacttgcccattccttacaccccttccccatcctgctccgcttcatgtcccctcctgagtagtcatgtgataataaactctcatgttattgttcccag

SEQ ID NO: 366854 - DNA, 897 bp, Homo sapiens
gaggaactccccacctccagccgcagcagcactctctgccagcctccctctgaacaggacaccgagccagttatgtcttcttacttagcgatgtgattctctggccttctcagtgatgcagatcgtgctggggatcttgagtgcagtcctaggaggatttttctacatccgcgactacaccctcctcgtcacctcgggagctgccatctggacaggggctgtggctgtgctggctggagctgctgccttcatttacgagaaacggggtggtacatactgggccctgctgaggactctgctagcgctggcagctttctccacagccatcgctgccctcaaactttggaatgaagatttccgatatggctactcttattacaacagtgcctgccgcatctccagctcgagtgactggaacactccagcccccactcagagtccagaagaagtcagaaggctacacctatgtacctccttcatggacatgctgaaggccttgttcagaacccttcaggccatgctcttgggtgtctggattctgctgcttctggcatctctggcccctctgtggctgtactgctggagaatgttcccaaccaaagggaaaagagaccagaaggaaatgttggaagtgagtggaatctagccatgcctctcctgattattagtgcctggtgcttctgcaccgggcgtccctgcatctgactgctggaagaagaaccagactgaggaaaagaggctcttcaacagccccagttatcctggccccatgaccgtggccacagccctgctccagcagcacttgcccattccttacaccccttccccatcctgctccgcttcatgtcccctcctgagtagtcatgtgataataaactctcatgttattgttcccag

SEQ ID NO: 366855 - DNA, 668 bp, Homo sapiens
gcttcagtgtctgctgcctatgacatcctcttcgcagagcactgggcgtcttttacaatcagctataccaccctataccaccctttctccacagccatcgctgccctcaaactttggaatgaagatttccgatatggctactcttattacaacagtgcctgccgcatctccagctcgagtgactggaacactccagcccccactcagagtccagaagaagtcagaaggctacacctatgtacctccttcatggacatgctgaaggccttgttcagaacccttcaggccatgctcttgggtgtctggattctgctgcttctggcatctctggcccctctgtggctgtactgctggagaatgttcccaaccaaagggaaaagagaccagaaggaaatgttggaagtgagtggaatctagccatgcctctcctgattattagtgcctggtgcttctgcaccgggcgtccctgcatctgactgctggaagaagaaccagactgaggaaaagaggctcttcaacagccccagttatcctggccccatgaccgtggccacagccctgctccagcagcacttgcccattccttacaccccttccccatcctgctccgcttcatgtcccctcctgagtagtcatgtgataataaactctcatgttattgttcccag

SEQ ID NO: 366856 - DNA, 1269 bp, Homo sapiens
  misc_feature (1)..(2): n is a, c, g, or t
  misc_feature (5)..(5): n is a, c, g, or t
  misc_feature (1063)..(1063): n is a, c, g, or t
nnccnctccaactctcaacccacttctccagccagcgccccagccctcccgccgcccgctcgcaggtcccgaggagcgcagactgtgtccctgacaatgggaacagccgacagtgatgagatggccccggaggccccacagcacacccacatcgatgtgcacatccaccaggagtctgccctggccaagctcctgctcacctgctgctctgcgctgcggccccgggccacccaggccaggggcagcagccggctgctggtggcctcgtgggtgatgcagatcgtgctggggatcttgagtgcagtcctaggaggatttttctacatccgcgactacaccctcctcgtcacctcgggagctgccatctggacaggggctgtggctgtgctggctggagctgctgccttcatttacgagaaacggggtggtacatactgggccctgctgaggactctgctagcgctggcagctttctccacagccatcgctgccctcaaactttggaatgaagatttccgatatggctactcttattacaacagtgcctgccgcatctccagctcgagtgactggaacactccagcccccactcagagtccagaagaagtcagaaggctacacctatgtacctccttcatggacatgctgaaggccttgttcagaacccttcaggccatgctcttgggtgtctggattctgctgcttctggcatctctggcccctctgtggctgtactgctggagaatgttcccaaccaaagggaaaagagaccagaaggaaatgttggaagtgagtggaatctagccatgcctctcctgattattagtgcctggtgcttctgcaccgggcgtccctgcatctgactgctggaagaagaaccagactgaggaaaagaggctcttcaacagccccagttatcctggccccatgaccgtggccacagccctgctccagcagcacttgcccattccttacaccccttccccatcctgctccgcttcatgtcccctcctgagtagtcatgtgataataaactctcatgttattgttcccagaaaaaaanaacaacagaaaactacgatacaaaaatgtgtttgggcgcgccctgcgcccctaagaaaggtttttgtaaacccatcttgtgggggcccggggcccccgtgggtagtgagacagtggaaaacggtgtcctccaaggaaacccgtggccggacaaggggcggggttcccccaaataaaaccgcggggacacgagctttggcaaaatcg

SEQ ID NO: 366857 - DNA, 1027 bp, Homo sapiens
  misc_feature (1)..(2): n is a, c, g, or t
  misc_feature (5)..(5): n is a, c, g, or t
nnccnctccaactctcaacccacttctccagccagcgccccagccctcccgccgcccgctcgcaggtcccgaggagcgcagactgtgtccctgacaatgggaacagccgacagtgatgagatggccccggaggccccacagcacacccacatcgatgtgcacatccaccaggagtctgccctggccaagctcctgctcacctgctgctctgcgctgcggccccgggccacccaggccaggggcagcagccggctgctggtggcctcgtgggtgatgcagatcgtgctggggatcttgagtgcagtcctaggaggatttttctacatccgcgactacaccctcctcgtcacctcgggagctgccatctggacaggggctgtggctgtgctggctggagctgctgccttcatttacgagaaacggggtggtacatactgggccctgctgaggactctgctagcgctggcagctttctccacagccatcgctgccctcaaactttggaatgaagatttccgatatggctactcttattacaacagtgcctgccgcatctccagctcgagtgactggaacactccagcccccactcagagtccagaagaagtcagaaggctacacctatgtacctccttcatggacatgctgaaggccttgttcagaacccttcaggccatgctcttgggtgtctggattctgctgcttctggcatctctggcccctctgtggctgtactgctggagaatgttcccaaccaaagggaaaagagaccagaaggaaatgttggaagtgagtggaatctagccatgcctctcctgattattagtgcctggtgcttctgcaccgggcgtccctgcatctgactgctggaagaagaaccagactgaggaaaagaggctcttcaacagccccagttatcctggccccatgaccgtgccattccttacaccccttccccatcctgctccgcttcatgtcccctcctgagtagtcatgtgataataaactctcatgttattgttcccag

SEQ ID NO: 366858 - DNA, 1222 bp, Homo sapiens
  misc_feature (1)..(2): n is a, c, g, or t
  misc_feature (5)..(5): n is a, c, g, or t
  misc_feature (1016)..(1016): n is a, c, g, or t
nnccnctccaactctcaacccacttctccagccagcgccccagccctcccgccgcccgctcgcaggtcccgaggagcgcagactgtgtccctgacaatgggaacagccgacagtgatgagatggccccggaggccccacagcacacccacatcgatgtgcacatccaccaggagtctgccctggccaagctcctgctcacctgctgctctgcgctgcggccccgggccacccaggccaggggcagcagccggctgctggtggcctcgtgggtgatgcagatcgtgctggggatcttgagtgcagtcctaggaggatttttctacatccgcgactacaccctcctcgtcacctcgggagctgccatctggacaggggctgtggctgtgctggctggagctgctgccttcatttacgagaaacggggtggtacatactgggccctgctgaggactctgctagcgctggcagctttctccacagccatcgctgccctcaaactttggaatgaagatttccgatatggctactcttattacaacagtgcctgccgcatctccagctcgagtgactggaacactccagcccccactcagagtccagaagaagtcagaaggctacacctatgtacctccttcatggacatgctgaaggccttgttcagaacccttcaggccatgctcttgggtgtctggattctgctgcttctggcatctctggcccctctgtggctgtactgctggagaatgttcccaaccaaagggaaaagagaccagaaggaaatgttggaagtgagtggaatctagccatgcctctcctgattattagtgcctggtgcttctgcaccgggcgtccctgcatctgactgctggaagaagaaccagactgagggccacagccctgctccagcagcacttgcccattccttacaccccttccccatcctgctccgcttcatgtcccctcctgagtagtcatgtgataataaactctcatgttattgttcccagaaaaaaanaacaacagaaaactacgatacaaaaatgtgtttgggcgcgccctgcgcccctaagaaaggtttttgtaaacccatcttgtgggggcccggggcccccgtgggtagtgagacagtggaaaacggtgtcctccaaggaaacccgtggccggacaaggggcggggttcccccaaataaaaccgcggggacacgagctttggcaaaatcg

SEQ ID NO: 366859 - DNA, 1457 bp, Homo sapiens
  misc_feature (1)..(2): n is a, c, g, or t
  misc_feature (5)..(5): n is a, c, g, or t
  misc_feature (1457)..(1457): n is a, c, g, or t
nnccnctccaactctcaacccacttctccagccagcgccccagccctcccgccgcccgctcgcaggtcccgaggagcgcagactgtgtccctgacaatgggaacagccgacagtgatgagatggccccggaggccccacagcacacccacatcgatgtgcacatccaccaggagtctgccctggccaagctcctgctcacctgctgctctgcgctgcggccccgggccacccaggccaggggcagcagccggctgctggtggcctcgtgggtgatgcagatcgtgctggggatcttgagtgcagtcctaggaggatttttctacatccgcgactacaccctcctcgtcacctcgggagctgccatctggacaggggctgtggctgtgctggctggagctgctgccttcatttacgagaaacggggtggtacatactgggccctgctgaggactctgctagcgctggcagctttctccacagccatcgctgccctcaaactttggaatgaagatttccgatatggctactcttattacaacagtgcctgccgcatctccagctcgagtgactggaacactccagcccccactcagagtccagaagaagtcagaaggctacacctatgtacctccttcatggacatgctgaagaaaagagaccagaaggaaatgttggaagtgagtggaatctagccatgcctctcctgattattagtgcctggtgcttctgcaccgggcgtccctgcatctgactgctggaagaagaaccagactgaggaaaagaggctcttcaacagccccagttatcctggccccatgaccgtggccacagccctgctccagcagcacttgcccattccttacaccccttccccatcctgctccgcttcatgtcccctcctgagtagtcatgtgataataaactctcatgttattgttcccagaaaaaaaaaaaaaaaaaaaaaaaaaaaaaaaggggggggggttttaaaatttcccccaggggggcccacacatgttctaaacgccgttacccagctcttctgtgtgtacaacagcggtggtccccctaatattgagacgcgtcgaatattatataccgtaacggacacgtgagccgctactatcttacaacatgcttgatgtcatgtgggaaaacagcgggcaccagtgggggaaaacatggtgggagagaggaaaacctttaattcttgagggcgggtgaaacaatattggggcacaaaactaacctatacagaaaatttaaagagcctccctcaaggcgacaacatctatacagcattatgcacacgcggtattacacggggtgctacacacattaacctggccacacactgcgctccccccgcctcgtacaacacatttcggcgccaaacggacgacttcgacatcttgccgaaaccactttctccacccgggccctccacaaataccgn

SEQ ID NO: 366860 - DNA, 313 bp, Homo sapiens
gctccagagctaagctgcccctggaggagagactccgccctttctctcccactcacgattgtcttgcctttcctcttccattagaaaagagaccagaaggaaatgttggaagtgagtggaatctagccatgcctctcctgattattagtgcctggtgcttctgcaccgggcgtccctgcatctgactgctggaagaagaaccagactgaggaaaagaggctcttcaacagccccagttatcctggccccatgaccgtggccacagccctgctccagcagcacttgcccattccttacaccccttccccatcct

SEQ ID NO: 366861 - DNA, 855 bp, Homo sapiens
cctcaggagttggatccaggctccaccctctcagcaattatcttaccatggataataaagcttagcatgaaacctcccgcctaagctgtgtcgctggggaagggcctgcatggaggctctctcgtgggagaggagttgcatttcctgtactaagcctgctcctggctcaatctctccccaggctgtgctggctggagctgctgccttcatttacgagaaacggggtggtacatactgggccctgctgaggactctgctagcgctggcagctttctccacagccatcgctgccctcaaactttggaatgaagatttccgatatggctactcttattacaacagtgcctgccgcatctccagctcgagtgactggaacactccagcccccactcagagtccagaagaagtcagaaggctacacctatgtacctccttcatggacatgctgaaggccttgttcagaacccttcaggccatgctcttgggtgtctggattctgctgcttctggcatctctggcccctctgtggctgtactgctggagaatgttcccaaccaaagggaaaagagaccagaaggaaatgttggaagtgagtggaatctagccatgcctctcctgattattagtgcctggtgcttctgcaccgggcgtccctgcatctgactgctggaagaagaaccagactgaggaaaagaggctcttcaacagccccagttatcctggccccatgaccgtggccacagccctgctccagcagcacttgcccattccttacaccccttccccatcctgctccgcttcatgtcccctcctgagtagtcatgtgataataaactctcatgttattgttcccag

SEQ ID NO: 366862 - DNA, 748 bp, Homo sapiens
tgcatcaacgcgttgggagctctccatattgtcgacctgcaggcggcgcgaattcactagtgattagctgtgaggctgtgctggctggagctgctgccttcatttacgagaaacggggtggtacatactgggccctgctgaggactctgctagcgctggcagctttctccacagccatcgctgccctcaaactttggaatgaagatttccgatatggctactcttattacaacagtgcctgccgcatctccagctcgagtgactggaacactccagcccccactcagagtccagaagaagtcagaaggctacacctatgtacctccttcatggacatgctgaaggccttgttcagaacccttcaggccatgctcttgggtgtctggattctgctgcttctggcatctctggcccctctgtggctgtactgctggagaatgttcccaaccaaagggaaaagagaccagaaggaaatgttggaagtgagtggaatctagccatgcctctcctgattattagtgcctggtgcttctgcaccgggcgtccctgcatctgactgctggaagaagaaccagactgaggaaaagaggctcttcaacagccccagttatcctggccccatgaccgtggccacagccctgctccagcagcacttgcccattccttacaccccttccccatcctgctccgcttcatgtcccctcctgagtagtcatgtgataataaactctcatgttattgttcccag

SEQ ID NO: 366863 - DNA, 1568 bp, Homo sapiens
  misc_feature (1)..(2): n is a, c, g, or t
  misc_feature (5)..(5): n is a, c, g, or t
  misc_feature (1568)..(1568): n is a, c, g, or t
nnccnctccaactctcaacccacttctccagccagcgccccagccctcccgccgcccgctcgcaggtcccgaggagcgcagactgtgtccctgacaatgggaacagccgacagtgatgagatggccccggaggccccacagcacacccacatcgatgtgcacatccaccaggagtctgccctggccaagctcctgctcacctgctgctctgcgctgcggccccgggccacccaggccaggggcagcagccggctgctggtggcctcgtgggtgatgcagatcgtgctggggatcttgagtgcagtcctaggaggatttttctacatccgcgactacaccctcctcgtcacctcgggagctgccatctggacaggggctgtggctgtgctggctggagctgctgccttcatttacgagaaacggggtggtacatactgggccctgctgaggactctgctagcgctggcagctttctccacagccatcgctgccctcaaactttggaatgaagatttccgatatggctactcttattacaacagtgcctgccgcatctccagctcgagtgactggaacactccagcccccactcagagtccagaagaagtcagaaggctacacctatgtacctccttcatggacatgctgaaggccttgttcagaacccttcaggccatgctcttgggtgtctggattctgctgcttctggcatctctggcccctctgtggctgtactgctggagaatgttcccaaccaaagggaaaagagaccagaaggaaatgttggaagtgagtggaatctagccatgcctctcctgattattagtgcctggtgcttctgcaccgggcgtccctgcatctgactgctggaagaagaaccagactgaggaaaagaggctcttcaacagccccagttatcctggccccatgaccgtggccacagccctgctccagcagcacttgcccattccttacaccccttccccatcctgctccgcttcatgtcccctcctgagtagtcatgtgataataaactctcatgttattgttcccagaaaaaaaaaaaaaaaaaaaaaaaaaaaaaaaggggggggggttttaaaatttcccccaggggggcccacacatgttctaaacgccgttacccagctcttctgtgtgtacaacagcggtggtccccctaatattgagacgcgtcgaatattatataccgtaacggacacgtgagccgctactatcttacaacatgcttgatgtcatgtgggaaaacagcgggcaccagtgggggaaaacatggtgggagagaggaaaacctttaattcttgagggcgggtgaaacaatattggggcacaaaactaacctatacagaaaatttaaagagcctccctcaaggcgacaacatctatacagcattatgcacacgcggtattacacggggtgctacacacattaacctggccacacactgcgctccccccgcctcgtacaacacatttcggcgccaaacggacgacttcgacatcttgccgaaaccactttctccacccgggccctccacaaataccgn

SEQ ID NO: 366864 - DNA, 1298 bp, Homo sapiens
  misc_feature (1)..(2): n is a, c, g, or t
  misc_feature (5)..(5): n is a, c, g, or t
nnccnctccaactctcaacccacttctccagccagcgccccagccctcccgccgcccgctcgcaggtcccgaggagcgcagactgtgtccctgacaatgggaacagccgacagtgatgagatggccccggaggccccacagcacacccacatcgatgtgcacatccaccaggagtctgccctggccaagctcctgctcacctgctgctctgcgctgcggccccgggccacccaggccaggggcagcagccggctgctggtggcctcgtgggtgatgcagatcgtgctggggatcttgagtgcagtcctaggaggatttttctacatccgcgactacaccctcctcgtcacctcgggagctgccatctggacaggggctgtggctgtgctggctggagctgctgccttcatttacgagaaacggggtggtacatactgggccctgctgaggactctgctagcgctggcagctttctccacagccatcgctgccctcaaactttggaatgaagatttccgatatggctactcttattacaacagtgcctgccgcatctccagctcgagtgactggaacactccagcccccactcagagtccagaagaagtcagaaggctacacctatgtacctccttcatggacatgctgaaggccttgttcagaacccttcaggccatgctcttgggtgtctggattctgctgcttctggcatctctggcccctctgtggctgtactgctggagaatgttcccaaccaaaggggtccctaaggtgtgtgcctgtgtatttggggcagtggaactgctcaaaggagacaggaatggacagtggacagtttggggaggagaaaggggcccatgacccaagtcccacctattatcatgcctgtctttctacccagtggtggcccagcccagaaagcccctatccccaaccaagtggcccccaagtcaaagagcccaggaatccagggaagtccatatccatgctatgcctttggatcagaaaagagaccagaaggaaatgttggaagtgagtggaatctagccatgcctctcctgattattagtgcctggtgcttctgcaccgggcgtccctgcatctgactgctggaagaagaaccagactgaggaaaagaggctcttcaacagccccagttatcctggccccatgaccgtggccacagccctgctccagcagcacttgcccattccttacaccccttccccatcctgctccgcttcatgtcccctcctgagtagtcatgtgataataaactctcatgttattgttcccag

SEQ ID NO: 366865 - DNA, 944 bp, Homo sapiens
  misc_feature (1)..(2): n is a, c, g, or t
  misc_feature (5)..(5): n is a, c, g, or t
nnccnctccaactctcaacccacttctccagccagcgccccagccctcccgccgcccgctcgcaggtcccgaggagcgcagactgtgtccctgacaatgggaacagccgacagtgatgagatggccccggaggccccacagcacacccacatcgatgtgcacatccaccaggagtctgccctggccaagctcctgctcacctgctgctctgcgctgcggccccgggccacccaggccaggggcagcagccggctgctggtggcctcgtgggtgatgcagatcgtgctggggatcttgagtgcagtcctaggaggatttttctacatccgcgactacaccctcctcgtcacctcgggagctgccatctggacaggggctgtggctgtgctggctggagctgctgccttcatttacgagaaacggggtggtacatactgggccctgctgaggactctgctagcgctggcagctttctccacagccatcgctgccctcaaactttggaatgaagatttccgatatggctactcttattacaacagtgcctgccgcatctccagctcgagtgactggaacactccagcccccactcagagtccagaagaagtcagaaggctacacctatgtacctccttcatggacatgctgaagaaaagagaccagaaggaaatgttggaagtgagtggaatctagccatgcctctcctgattattagtgcctggtgcttctgcaccgggcgtccctgcatctgactgctggaagaagaaccagactgaggaaaagaggctcttcaacagccccagttatcctggccccatgaccgtggccacagccctgctccagcagcacttgcccattccttacaccccttccccatcctgctccgcttcatgtcccctcctgagtagtcatgtgataataaactctcatgttattgttcccag

SEQ ID NO: 366866 - DNA, 877 bp, Homo sapiens
ttcccctcgtgaggggccaggggtgcggccctgtgaccaggacagccattcattgggtgactttgagccaccactggcccctgacctccccaactccaatgaaatctgcgaaaatcttctgacagccgttcctctctggtgctcccttcctcatagactgtgtccctgacaatgggaacagccgacagtgatgagatggccccggaggccccacagcacacccacatcgatgtgcacatccaccaggagtctgccctggccaagctcctgctcacctgctgctctgcgctgcggccccgggccacccaggccaggggcagcagccggctgctggtggcctcgtgggtgagtgtgacggcctgcctcgtcgggcggcgggaggaactccccacctccagccgcagcagcactctctgccagcctccctctgaacaggacaccgagccagttatgtcttcttacttagcgatgtgattctctggccttctcagtaagagcctggggaggggaggctctgggctgaaggggtgtggaggagccactgaccatgcagagtcccaatcagtggagccctgagtccatcctttcctctgggccaaactcaggatgggccggctctcctctccttcctttcccttctcttttctcctcctcctgcctcttcttctttctccttctcctcctctttcttctccttttctcttctcttctcttctcttctcttctttctttctctctctctctacctctccctctctttttggggttttagcggttaatccctgcagtggcaggtccacctaggagccgggatcttgggtcctttgtctttcaggtgatgcagatcgtgctggggatcttgagtgcagtcctagga

SEQ ID NO: 366867 - DNA, 289 bp, Homo sapiens
taaaatagttatgtcatgaatgcataaaatatatgtagatattagtctatttatgtgttaacctacttcgttatcagtaagactcctggtccactgtaggctactacttttggggagtcaaaagccatgtgtgggattttccactgtgtggcatcacccccctgtgttgctcttcaagggtcacctgtttggccacatttaaacatgggcccaaacttttcagatttaaagttaacagactgatgttagttaagctcagagggaaggcttttcaatgaagtgagtttaa

SEQ ID NO: 366868 - DNA, 832 bp, Homo sapiens
tccaaaaactgccctgtggagagggggctgggggacactcgtgacacctgtcgggcggcacatgtgatgggtggagcacccaggttctccaagcagcaggaggctctgatggacccccctcccctggcggggggacgctactgctagaagcagcgaagggcccggtgccccaggtttcagctgcctgccttctgccgtaagttgccccagcaccttcgtgcttttcaggagcgtaagctgagcagactcagtcgtcccagtggtcagtgtggctggggcagagggacacacggtccacaagacgtccatgctctcggaatgctccaggggtttggctgtggggctccaccaccattgcctgagcccggagccagaggctcctcccacactgcctggtctgccccacagagcatcagtgccacgccaggtgaggacagcgctcaccagacaaccaggcctgccgccccactgacgctgacttccggacctgcagaactgtgagaaagtacgtttcgcttctttgtaaactgcctggtcagtggtggcagcacagatggaccgacgtggacctcgacgcgaatggcgggctctgggcgctgacccggtggcggcgtagctcaccgaacacccagggggaccagaactctctgccttccactcagttgtgacttgtctatttttaaaatgttaaaaaaaaaaaaaacccacaaggtgcagtggctcacacctgtaatcccagcctttgggaggttgaggcgggtggatcgctcaagctcaggagttcgagaccaacctggcccacatggtgaaaccctgtctctaataaaaatac

SEQ ID NO: 366869 - DNA, 422 bp, Homo sapiens
cacctaacataaaattcactattctaaagcgcacacttcagtggtttttagaaaattccctatgttgtgtaaccatcaccattactctcaaaacatttccatcaactgcgcccccccaccgaaaaaaaccatactattagcagttagtcccaatttcccccttctcccatcccttagcaactactaatctgtctatggatttgcttattctggatattttatatactgtaaattgaattattagcataatattttcaaagttcattcatattgtagcatgcatcagtacttcattccttttatggctgaataataatccattgtatggatgtattacattttgtttatcctttagttagctgatggacatttggattgttttcactttttggccattatgaataaagctgctatgaacattc

SEQ ID NO: 366870 - DNA, 2418 bp, Homo sapiens
taaaggacttcctactcgtgcaccgccgccggctccagggcaaaccccacgccatttagaaatgctggaagtttctgtctctccctccccctgctcggaggccattccccccacccccagagccccacctcctccttcactgggccctttctaactccttccccttaaaacccttttcaaaatggggttgactggaggcggaggttgcagtgagccgagatcgccccactgcactccagcctggtgactccgtctcaaaaaaaaggggaggggggcgggggagagttgaaagcttaatatgtactttgggggctattaaagcaaacatttcgactaaaggggcgaatcctcgaattgtgcgatcaagcacccgagaggagagttggggggggtcaggaggggtgggggctccagggaacgcccgggggcctgggccggggtctcgcggggcccttccggaaggatcgcggcccccgaaggtgggcgtcccgcggggctccagtctccaggacgttccgggaggctccgcgctctgggaggccggctgcgtggggtccccgcgctgcagccgcagaggccccccagggccgcggttcccggagcgggaaagtcccgcgcgggggcggtggcctcgggggcgggacggggcgggggcgggggcgcgggcggccgagccgaatcccctccaccgggacgccccgctgccgctcgggaagaggcgggccctgcgcgccctgcgctcgccatggcggtttgggcggcgacgtgagcggctccgcggaccccgagcggggccccggccgcgacctgagccgccgccgagcgcccggggccatgcgaccgacgctgctgtggtcgctgctgctgctgctcggagtcttcgccgccgccgccgcggccccgccagaccctctttcccagctgcccgctcctcagcacccgaagattcgcctgtacaacgcagagcaggtcctgagttgggagccagtggccctgagcaatagcacgaggcctgttgtctaccaagtgcagtttaaatacaccgacagtaaatggttcacggccgacatcatgtccataggggtgaattgtacacagatcacagcaacagagtgtgacttcactgccgccagtccctcagcaggcttcccaatggatttcaatgtcactctacgccttcgagctgagctgggagcactccattctgcctgggtgacaatgccttggtttcaacactatcggaatgtgactgtcgggcctccagaaaacattgaggtgaccccaggagaaggctccctcatcatcaggttctcctctccctttgacatcgctgatacctccacggcctttttttgttattatgtccattactgggaaaaaggaggaatccaacaggtcaaaggccctttcagaagcaactccatttcattggataacttaaaaccctccagagtgtactgtttacaagtccaggcacaactgctttggaacaaaagtaacatctttagagtcgggcatttaagcaacatatcttgctacgaaacaatggcagatgcctccactgagcttcagcaagtcatcctgatctccgtgggaacattttcgttgctgtcggtgctggcaggagcctgtttcttcctggtcctgaaatatagaggcctgattaaatactggtttcacactccaccaagcatcccattacagatagaagagtatttaaaagacccaactcagcccatcttagaggccttggacaaggacagctcaccaaaggatgacgtctgggactctgtgtccattatctcgtttccggaaaaggagcaagaagatgttctccaaacgctttgaaccaaagcatgggcctagcccactggctccctggaagagatcaagccatcggagctgctagagttctgtctggactttccagagaccagtattcccttttgctgcctctaaaaggcctgtccctgcagacatgagagacagcaggtctcatgggggtgacaagctttttttttttttcttaaagaattttcaaaatcaaattccagaatgattttacggagatatcccaggaaaattaaggcttctcttaaacactaaaaaggcatgtaattgcttgttagcaaaatggatatgacacatctctgatacttttttcattattggttgggctgagcagtcagaagacctggtcgtcgtcttgactttggcaaatgagccggagccccttgggcaggtcacacaacctgtcccagcgagggacaccgagtggcccttcatgtacatccatggtgtgctggcttaaaatgtaattaatcttgtaaatatactcctagtaatttaagattttgtttttaaactggaaataaaagattgtatagtgcatgttttttaaagtctaaaaaaaaaatt

SEQ ID NO: 366871 - DNA, 2475 bp, Homo sapiens
taaaggacttcctactcgtgcaccgccgccggctccagggcaaaccccacgccatttagaaatgctggaagtttctgtctctccctccccctgctcggaggccattccccccacccccagagccccacctcctccttcactgggccctttctaactccttccccttaaaacccttttcaaaatggggttgactggaggcggaggttgcagtgagccgagatcgccccactgcactccagcctggtgactccgtctcaaaaaaaaggggaggggggcgggggagagttgaaagcttaatatgtactttgggggctattaaagcaaacatttcgactaaaggggcgaatcctcgaattgtgcgatcaagcacccgagaggagagttggggggggtcaggaggggtgggggctccagggaacgcccgggggcctgggccggggtctcgcggggcccttccggaaggatcgcggcccccgaaggtgggcgtcccgcggggctccagtctccaggacgttccgggaggctccgcgctctgggaggccggctgcgtggggtccccgcgctgcagccgcagaggccccccagggccgcggttcccggagcgggaaagtcccgcgcgggggcggtggcctcgggggcgggacggggcgggggcgggggcgcgggcggccgagccgaatcccctccaccgggacgccccgctgccgctcgggaagaggcgggccctgcgcgccctgcgctcgccatggcggtttgggcggcgacgtgagcggctccgcggaccccgagcggggccccggccgcgacctgagccgccgccgagcgcccggggccatgcgaccgacgctgctgtggtcgctgctgctgctgctcggagtcttcgccgccgccgccgcggccccgccagcacagctaactttggagacctaccaagaatggtgcaatgattcagcagctactcatgaccctctttcccagctgcccgctcctcagcacccgaagattcgcctgtacaacgcagagcaggtcctgagttgggagccagtggccctgagcaatagcacgaggcctgttgtctaccaagtgcagtttaaatacaccgacagtaaatggttcacggccgacatcatgtccataggggtgaattgtacacagatcacagcaacagagtgtgacttcactgccgccagtccctcagcaggcttcccaatggatttcaatgtcactctacgccttcgagctgagctgggagcactccattctgcctgggtgacaatgccttggtttcaacactatcggaatgtgactgtcgggcctccagaaaacattgaggtgaccccaggagaaggctccctcatcatcaggttctcctctccctttgacatcgctgatacctccacggcctttttttgttattatgtccattactgggaaaaaggaggaatccaacaggtcaaaggccctttcagaagcaactccatttcattggataacttaaaaccctccagagtgtactgtttacaagtccaggcacaactgctttggaacaaaagtaacatctttagagtcgggcatttaagcaacatatcttgctacgaaacaatggcagatgcctccactgagcttcagcaagtcatcctgatctccgtgggaacattttcgttgctgtcggtgctggcaggagcctgtttcttcctggtcctgaaatatagaggcctgattaaatactggtttcacactccaccaagcatcccattacagatagaagagtatttaaaagacccaactcagcccatcttagaggccttggacaaggacagctcaccaaaggatgacgtctgggactctgtgtccattatctcgtttccggaaaaggagcaagaagatgttctccaaacgctttgaaccaaagcatgggcctagcccactggctccctggaagagatcaagccatcggagctgctagagttctgtctggactttccagagaccagtattcccttttgctgcctctaaaaggcctgtccctgcagacatgagagacagcaggtctcatgggggtgacaagctttttttttttttcttaaagaattttcaaaatcaaattccagaatgattttacggagatatcccaggaaaattaaggcttctcttaaacactaaaaaggcatgtaattgcttgttagcaaaatggatatgacacatctctgatacttttttcattattggttgggctgagcagtcagaagacctggtcgtcgtcttgactttggcaaatgagccggagccccttgggcaggtcacacaacctgtcccagcgagggacaccgagtggcccttcatgtacatccatggtgtgctggcttaaaatgtaattaatcttgtaaatatactcctagtaatttaagattttgtttttaaactggaaataaaagattgtatagtgcatgttttttaaagtctaaaaaaaaaatt

SEQ ID NO: 366872 - DNA, 2606 bp, Homo sapiens
taaaggacttcctactcgtgcaccgccgccggctccagggcaaaccccacgccatttagaaatgctggaagtttctgtctctccctccccctgctcggaggccattccccccacccccagagccccacctcctccttcactgggccctttctaactccttccccttaaaacccttttcaaaatggggttgactggaggcggaggttgcagtgagccgagatcgccccactgcactccagcctggtgactccgtctcaaaaaaaaggggaggggggcgggggagagttgaaagcttaatatgtactttgggggctattaaagcaaacatttcgactaaaggggcgaatcctcgaattgtgcgatcaagcacccgagaggagagttggggggggtcaggaggggtgggggctccagggaacgcccgggggcctgggccggggtctcgcggggcccttccggaaggatcgcggcccccgaaggtgggcgtcccgcggggctccagtctccaggacgttccgggaggctccgcgctctgggaggccggctgcgtggggtccccgcgctgcagccgcagaggccccccagggccgcggttcccggagcgggaaagtcccgcgcgggggcggtggcctcgggggcgggacggggcgggggcgggggcgcgggcggccgagccgaatcccctccaccgggacgccccgctgccgctcgggaagaggcgggccctgcgcgccctgcgctcgccatggcggtttgggcggcgacgtgagcggctccgcggaccccgagcggggccccggccgcgacctgagccgccgccgagcgcccggggccatgcgaccgacgctgctgtggtcgctgctgctgctgctcggagtcttcgccgccgccgccgcggccccgccagcacagctaactttggagacctaccaagaatggtgcaatgattcagcagctactcatgagatgggagatggtgaacaggcgtgtggagggcggaataatggtccccaaagatgtccacgccctcatcctcagagtccgtgaacctgggaatgtgctgcctgacgtacaaaagggactccgcagatgtgaaccctctttcccagctgcccgctcctcagcacccgaagattcgcctgtacaacgcagagcaggtcctgagttgggagccagtggccctgagcaatagcacgaggcctgttgtctaccaagtgcagtttaaatacaccgacagtaaatggttcacggccgacatcatgtccataggggtgaattgtacacagatcacagcaacagagtgtgacttcactgccgccagtccctcagcaggcttcccaatggatttcaatgtcactctacgccttcgagctgagctgggagcactccattctgcctgggtgacaatgccttggtttcaacactatcggaatgtgactgtcgggcctccagaaaacattgaggtgaccccaggagaaggctccctcatcatcaggttctcctctccctttgacatcgctgatacctccacggcctttttttgttattatgtccattactgggaaaaaggaggaatccaacaggtcaaaggccctttcagaagcaactccatttcattggataacttaaaaccctccagagtgtactgtttacaagtccaggcacaactgctttggaacaaaagtaacatctttagagtcgggcatttaagcaacatatcttgctacgaaacaatggcagatgcctccactgagcttcagcaagtcatcctgatctccgtgggaacattttcgttgctgtcggtgctggcaggagcctgtttcttcctggtcctgaaatatagaggcctgattaaatactggtttcacactccaccaagcatcccattacagatagaagagtatttaaaagacccaactcagcccatcttagaggccttggacaaggacagctcaccaaaggatgacgtctgggactctgtgtccattatctcgtttccggaaaaggagcaagaagatgttctccaaacgctttgaaccaaagcatgggcctagcccactggctccctggaagagatcaagccatcggagctgctagagttctgtctggactttccagagaccagtattcccttttgctgcctctaaaaggcctgtccctgcagacatgagagacagcaggtctcatgggggtgacaagctttttttttttttcttaaagaattttcaaaatcaaattccagaatgattttacggagatatcccaggaaaattaaggcttctcttaaacactaaaaaggcatgtaattgcttgttagcaaaatggatatgacacatctctgatacttttttcattattggttgggctgagcagtcagaagacctggtcgtcgtcttgactttggcaaatgagccggagccccttgggcaggtcacacaacctgtcccagcgagggacaccgagtggcccttcatgtacatccatggtgtgctggcttaaaatgtaattaatcttgtaaatatactcctagtaatttaagattttgtttttaaactggaaataaaagattgtatagtgcatgttttttaaagtctaaaaaaaaaatt

SEQ ID NO: 366873 - DNA, 2285 bp, Homo sapiens
taaaggacttcctactcgtgcaccgccgccggctccagggcaaaccccacgccatttagaaatgctggaagtttctgtctctccctccccctgctcggaggccattccccccacccccagagccccacctcctccttcactgggccctttctaactccttccccttaaaacccttttcaaaatggggttgactggaggcggaggttgcagtgagccgagatcgccccactgcactccagcctggtgactccgtctcaaaaaaaaggggaggggggcgggggagagttgaaagcttaatatgtactttgggggctattaaagcaaacatttcgactaaaggggcgaatcctcgaattgtgcgatcaagcacccgagaggagagttggggggggtcaggaggggtgggggctccagggaacgcccgggggcctgggccggggtctcgcggggcccttccggaaggatcgcggcccccgaaggtgggcgtcccgcggggctccagtctccaggacgttccgggaggctccgcgctctgggaggccggctgcgtggggtccccgcgctgcagccgcagaggccccccagggccgcggttcccggagcgggaaagtcccgcgcgggggcggtggcctcgggggcgggacggggcgggggcgggggcgcgggcggccgagccgaatcccctccaccgggacgccccgctgccgctcgggaagaggcgggccctgcgcgccctgcgctcgccatggcggtttgggcggcgacgtgagcggctccgcggaccccgagcggggccccggccgcgacctgagccgccgccgagcgcccggggccatgcgaccgacgctgctgtggtcgctgctgctgctgctcggagtcttcgccgccgccgccgcggccccgccagcaccgacagtaaatggttcacggccgacatcatgtccataggggtgaattgtacacagatcacagcaacagagtgtgacttcactgccgccagtccctcagcaggcttcccaatggatttcaatgtcactctacgccttcgagctgagctgggagcactccattctgcctgggtgacaatgccttggtttcaacactatcggaatgtgactgtcgggcctccagaaaacattgaggtgaccccaggagaaggctccctcatcatcaggttctcctctccctttgacatcgctgatacctccacggcctttttttgttattatgtccattactgggaaaaaggaggaatccaacaggtcaaaggccctttcagaagcaactccatttcattggataacttaaaaccctccagagtgtactgtttacaagtccaggcacaactgctttggaacaaaagtaacatctttagagtcgggcatttaagcaacatatcttgctacgaaacaatggcagatgcctccactgagcttcagcaagtcatcctgatctccgtgggaacattttcgttgctgtcggtgctggcaggagcctgtttcttcctggtcctgaaatatagaggcctgattaaatactggtttcacactccaccaagcatcccattacagatagaagagtatttaaaagacccaactcagcccatcttagaggccttggacaaggacagctcaccaaaggatgacgtctgggactctgtgtccattatctcgtttccggaaaaggagcaagaagatgttctccaaacgctttgaaccaaagcatgggcctagcccactggctccctggaagagatcaagccatcggagctgctagagttctgtctggactttccagagaccagtattcccttttgctgcctctaaaaggcctgtccctgcagacatgagagacagcaggtctcatgggggtgacaagctttttttttttttcttaaagaattttcaaaatcaaattccagaatgattttacggagatatcccaggaaaattaaggcttctcttaaacactaaaaaggcatgtaattgcttgttagcaaaatggatatgacacatctctgatacttttttcattattggttgggctgagcagtcagaagacctggtcgtcgtcttgactttggcaaatgagccggagccccttgggcaggtcacacaacctgtcccagcgagggacaccgagtggcccttcatgtacatccatggtgtgctggcttaaaatgtaattaatcttgtaaatatactcctagtaatttaagattttgtttttaaactggaaataaaagattgtatagtgcatgttttttaaagtctaaaaaaaaaatt

SEQ ID NO: 366874 - DNA, 2356 bp, Homo sapiens
taaaggacttcctactcgtgcaccgccgccggctccagggcaaaccccacgccatttagaaatgctggaagtttctgtctctccctccccctgctcggaggccattccccccacccccagagccccacctcctccttcactgggccctttctaactccttccccttaaaacccttttcaaaatggggttgactggaggcggaggttgcagtgagccgagatcgccccactgcactccagcctggtgactccgtctcaaaaaaaaggggaggggggcgggggagagttgaaagcttaatatgtactttgggggctattaaagcaaacatttcgactaaaggggcgaatcctcgaattgtgcgatcaagcacccgagaggagagttggggggggtcaggaggggtgggggctccagggaacgcccgggggcctgggccggggtctcgcggggcccttccggaaggatcgcggcccccgaaggtgggcgtcccgcggggctccagtctccaggacgttccgggaggctccgcgctctgggaggccggctgcgtggggtccccgcgctgcagccgcagaggccccccagggccgcggttcccggagcgggaaagtcccgcgcgggggcggtggcctcgggggcgggacggggcgggggcgggggcgcgggcggccgagccgaatcccctccaccgggacgccccgctgccgctcgggaagaggcgggccctgcgcgccctgcgctcgccatggcggtttgggcggcgacgtgagcggctccgcggaccccgagcggggccccggccgcgacctgagccgccgccgagcgcccggggccatgcgaccgacgctgctgtggtcgctgctgctgctgctcggagtcttcgccgccgccgccgcggccccgccagaccctctttcccagctgcccgctcctcagcacccgaagattcgcctgtacaacgcagagcaggtcctgagttgggagccagtggccctgagcaatagcacgaggcctgttgtctaccaagtgcagtttaaatacaccgacagtaaatggttcacggccgacatcatgtccataggggtgaattgtacacagatcacagcaacagagtgtgacttcactgccgccagtccctcagcaggcttcccaatggatttcaatgtcactctacgccttcgagctgactgtcgggcctccagaaaacattgaggtgaccccaggagaaggctccctcatcatcaggttctcctctccctttgacatcgctgatacctccacggcctttttttgttattatgtccattactgggaaaaaggaggaatccaacaggtcaaaggccctttcagaagcaactccatttcattggataacttaaaaccctccagagtgtactgtttacaagtccaggcacaactgctttggaacaaaagtaacatctttagagtcgggcatttaagcaacatatcttgctacgaaacaatggcagatgcctccactgagcttcagcaagtcatcctgatctccgtgggaacattttcgttgctgtcggtgctggcaggagcctgtttcttcctggtcctgaaatatagaggcctgattaaatactggtttcacactccaccaagcatcccattacagatagaagagtatttaaaagacccaactcagcccatcttagaggccttggacaaggacagctcaccaaaggatgacgtctgggactctgtgtccattatctcgtttccggaaaaggagcaagaagatgttctccaaacgctttgaaccaaagcatgggcctagcccactggctccctggaagagatcaagccatcggagctgctagagttctgtctggactttccagagaccagtattcccttttgctgcctctaaaaggcctgtccctgcagacatgagagacagcaggtctcatgggggtgacaagctttttttttttttcttaaagaattttcaaaatcaaattccagaatgattttacggagatatcccaggaaaattaaggcttctcttaaacactaaaaaggcatgtaattgcttgttagcaaaatggatatgacacatctctgatacttttttcattattggttgggctgagcagtcagaagacctggtcgtcgtcttgactttggcaaatgagccggagccccttgggcaggtcacacaacctgtcccagcgagggacaccgagtggcccttcatgtacatccatggtgtgctggcttaaaatgtaattaatcttgtaaatatactcctagtaatttaagattttgtttttaaactggaaataaaagattgtatagtgcatgttttttaaagtctaaaaaaaaaatt

SEQ ID NO: 366875 - DNA, 1348 bp, Homo sapiens
gtgagccaccccatccagcccaaaatgttaaaggagaaaaagattatcctagaaattgggatttactgaagtctagttactacaatgggcactctgagacctcacagccagaaacacagttctaaagctatcagcctctttggccacacaacacaccaattttcacacataaaatgtgtccactgccagccagtgacccactaaaaatggcatcttgttcttctttggttgtcgtgttcacagtgaatttgaggaaacatcagaaaagatgtaggcagcttggccatgttcatttacatgtgtgcttgtgatgtttttaaaacaggtcaaaggccctttcagaagcaactccatttcattggataacttaaaaccctccagagtgtactgtttacaagtccaggcacaactgctttggaacaaaagtaacatctttagagtcgggcatttaagcaacatatcttgctacgaaacaatggcagatgcctccactgagcttcagcaagtcatcctgatctccgtgggaacattttcgttgctgtcggtgctggcaggagcctgtttcttcctggtcctgaaatatagaggcctgattaaatactggtttcacactccaccaagcatcccattacagatagaagagtatttaaaagacccaactcagcccatcttagaggccttggacaaggacagctcaccaaaggatgacgtctgggactctgtgtccattatctcgtttccggaaaaggagcaagaagatgttctccaaacgctttgaaccaaagcatgggcctagcccactggctccctggaagagatcaagccatcggagctgctagagttctgtctggactttccagagaccagtattcccttttgctgcctctaaaaggcctgtccctgcagacatgagagacagcaggtctcatgggggtgacaagctttttttttttttcttaaagaattttcaaaatcaaattccagaatgattttacggagatatcccaggaaaattaaggcttctcttaaacactaaaaaggcatgtaattgcttgttagcaaaatggatatgacacatctctgatacttttttcattattggttgggctgagcagtcagaagacctggtcgtcgtcttgactttggcaaatgagccggagccccttgggcaggtcacacaacctgtcccagcgagggacaccgagtggcccttcatgtacatccatggtgtgctggcttaaaatgtaattaatcttgtaaatatactcctagtaatttaagattttgtttttaaactggaaataaaagattgtatagtgcatgttttttaaagtctaaaaaaaaaatt

SEQ ID NO: 366876 - DNA, 2590 bp, Homo sapiens
taaaggacttcctactcgtgcaccgccgccggctccagggcaaaccccacgccatttagaaatgctggaagtttctgtctctccctccccctgctcggaggccattccccccacccccagagccccacctcctccttcactgggccctttctaactccttccccttaaaacccttttcaaaatggggttgactggaggcggaggttgcagtgagccgagatcgccccactgcactccagcctggtgactccgtctcaaaaaaaaggggaggggggcgggggagagttgaaagcttaatatgtactttgggggctattaaagcaaacatttcgactaaaggggcgaatcctcgaattgtgcgatcaagcacccgagaggagagttggggggggtcaggaggggtgggggctccagggaacgcccgggggcctgggccggggtctcgcggggcccttccggaaggatcgcggcccccgaaggtgggcgtcccgcggggctccagtctccaggacgttccgggaggctccgcgctctgggaggccggctgcgtggggtccccgcgctgcagccgcagaggccccccagggccgcggttcccggagcgggaaagtcccgcgcgggggcggtggcctcgggggcgggacggggcgggggcgggggcgcgggcggccgagccgaatcccctccaccgggacgccccgctgccgctcgggaagaggcgggccctgcgcgccctgcgctcgccatggcggtttgggcggcgacgtgagcggctccgcggaccccgagcggggccccggccgcgacctgagccgccgccgagcgcccggggccatgcgaccgacgctgctgtggtcgctgctgctgctgctcggagtcttcgccgccgccgccgcggccccgccagaccctctttcccagctgcccgctcctcagcacccgaagattcgcctgtacaacgcagagcaggtcctgagttgggagccagtggccctgagcaatagcacgaggcctgttgtctaccaagtgcagtttaaatacaccgacagtaaatggttcacggccgacatcatgtccataggggtgaattgtacacagatcacagcaacagagtgtgacttcactgccgccagtccctcagcaggcttcccaatggatttcaatgtcactctacgccttcgagctgagctgggagcactccattctgcctgggtgacaatgccttggtttcaacactatcggaatgtgactgtcgggcctccagaaaacattgaggtgaccccaggagaaggctccctcatcatcaggttctcctctccctttgacatcgctgatacctccacggcctttttttgttattatgtccattactgggaaaaaggaggaatccaacaggtcaaaggccctttcagaagcaactccatttcattggataacttaaaaccctccagagtgtactgtttacaagtccaggcacaactgctttggaacaaaagtaacatctttagagtcgggcatttaagcaacatatcttgctacgaaacaatggcagatgcctccactgagcttcagcaagtcatcctgatctccgtgggaacattttcgttgctgtcggtgctggcaggagcctgtttcttcctggtcctgaaatatagaggcctgattaaatactggtttcacactccaccaagcatcccattacagatagaagagtatttaaaagacccaactcagcccatcttagaggccttggacaaggacagctcaccaaaggatgacgtctgggactctgtgtccattatctcgtttccggaaaaggagcaagaagatgttctccaaacgctttgaaccaaagcatgggcctagcccactggctccctggaagagatcaagccatcggagctgctagagttctgtctggactttccagagaccagtattcccttttgctgcctctaaaaggcctgtccctgcagacatgagagacagcaggtctcatgggggtgacaagctttttttttttttcttaaagaattttcaaaatcaaattccagaatgattttacggagatatcccaggaaaattaaggcttctcttaaacactaaaaaggcatgtaattgcttgttagcaaaatggatatgacacatctctgatacttttttcattattggttgggctgagcagtcagaagacctggtcgtcgtcttgactttggcaaatgagccggagccccttgggcaggtcacacaacctgtcccagcgagggacaccgagtggcccttcatgtacatccatggtgtgctggcttaaaatgtaattaatcttgtaaatatactcctagtaatttaagattttgtttttaccgtggaaattataacagatctgtttggtgacacaaacgcacaaaaaaccccggggccgttacctccctctgatggtgccccattttaaaatcgcaacgggccattcccctagggctttccggaacgaaaaaatttctgggctattattcacacttgcccagaggcccccacgttgttttgccccctaggggggtcacttaaacccctttggttggcgcctaaaact

SEQ ID NO: 366877 - DNA, 4033 bp, Homo sapiens
  misc_feature (1887)..(1887): n is a, c, g, or t
taaaggacttcctactcgtgcaccgccgccggctccagggcaaaccccacgccatttagaaatgctggaagtttctgtctctccctccccctgctcggaggccattccccccacccccagagccccacctcctccttcactgggccctttctaactccttccccttaaaacccttttcaaaatggggttgactggaggcggaggttgcagtgagccgagatcgccccactgcactccagcctggtgactccgtctcaaaaaaaaggggaggggggcgggggagagttgaaagcttaatatgtactttgggggctattaaagcaaacatttcgactaaaggggcgaatcctcgaattgtgcgatcaagcacccgagaggagagttggggggggtcaggaggggtgggggctccagggaacgcccgggggcctgggccggggtctcgcggggcccttccggaaggatcgcggcccccgaaggtgggcgtcccgcggggctccagtctccaggacgttccgggaggctccgcgctctgggaggccggctgcgtggggtccccgcgctgcagccgcagaggccccccagggccgcggttcccggagcgggaaagtcccgcgcgggggcggtggcctcgggggcgggacggggcgggggcgggggcgcgggcggccgagccgaatcccctccaccgggacgccccgctgccgctcgggaagaggcgggccctgcgcgccctgcgctcgccatggcggtttgggcggcgacgtgagcggctccgcggaccccgagcggggccccggccgcgacctgagccgccgccgagcgcccggggccatgcgaccgacgctgctgtggtcgctgctgctgctgctcggagtcttcgccgccgccgccgcggccccgccagaccctctttcccagctgcccgctcctcagcacccgaagattcgcctgtacaacgcagagcaggtcctgagttgggagccagtggccctgagcaatagcacgaggcctgttgtctaccaagtgcagtttaaatacaccgacagtaaatggttcacggccgacatcatgtccataggggtgaattgtacacagatcacagcaacagagtgtgacttcactgccgccagtccctcagcaggcttcccaatggatttcaatgtcactctacgccttcgagctgagctgggagcactccattctgcctgggtgacaatgccttggtttcaacactatcggaatgtgactgtcgggcctccagaaaacattgaggtgaccccaggagaaggctccctcatcatcaggttctcctctccctttgacatcgctgatacctccacggcctttttttgttattatgtccattactgggaaaaaggaggaatccaacaggtcaaaggccctttcagaagcaactccatttcattggataacttaaaaccctccagagtgtactgtttacaagtccaggcacaactgctttggaacaaaagtaacatctttagagtcgggcatttaagcaacatatcttgctacgaaacaatggcagatgcctccactgagcttcagcaagtcatcctgatctccgtgggaacattttcgttgctgtcggtgctggcaggagcctgtttcttcctggtcctgaaatatagaggcctgattaaatactggtttcacactccaccaagcatcccattacagatagaagagtatttaaaagacccaactcagcccatcttagaggccttggacaaggacagctcaccaaaggatgacgtctgggactctgtgtccattatctcgtttccggaaaaggagcaagaagatgttctccaaacgctttgaaccaaagcatggctgtaggcaacaagattgttggcaacnaagaattgaagaatcatctgtaaccccagctactcgggaggctgaggcacgagaaccatttgaacctgggagacagaggttgcagtgagctgagattgcaccactacactccagcctgggtgacaagagcaaaactccatctgtggtcccagctgcttggaaaccggaggtaagaggattgcctgagctccagcatttgaaggtgcagtgagctgtggttgcaccactgcactccagcctaggcaacagagtgagatattgtctttaaaaaaaaaaaaaaaaattcatggcagagtcagaaatagaaaaaaacagccaccatttccagtcagtcttcagggaaaccttcaataaccctcacataagcattttacaagtctatttcttcttattttataaacataactgcatctttaattgggtgtacttgaataattgaaaactgaacagcaaatcaatttttatggttcattttctccaacaaacaacaatattaaactgtatgagaagtaatatttattgcaacaggttatgaggtggaaacaaataattagtcttacaatttgctagaagcatgacagagcttactaacattttgaagaaaaaacagcaaagaaagaaatcatcaaacaagatggtatcttgacaaaggcacagcgctccacaactgcttcatactctgtgcacaagaaatcctctcaagagagaggagaggagtgatgccaaatgggcttacattagacccgtggacactaccactggtattattcatacaaccaaggctctacaacacccctctggagaaaaagtgcaacacaaaatctgtgtaacaaaggaaagcaaaagtagcaataagggcccagaggaatacaaacagtgcaaatacagtactgcaaactcagtaaaaggagtttttgattggagtatgaactttcaagttgaagatatatttcacaggaatattcacccaaagcttgagagctagagcgaggagagacttgcagtcggtaactgagtagatgaaatgcataatttttcactaggtgataattccctttgggaagaagtgctttatctttaattattccactttttgttaaatggttcatgcttttaaactgcgattgtctcaaacttgcttgctattgaattgtgtaacatcagataatggcaagttgtcaaaagataaccccagtggataattgaagctgcttttacgagaagcatggtgctgagctgccttacacagtctttttacagtaaccataaaaaactgagtttatttgatcatgtattatcccttctcacataaagtcatattagaggaattctttttaaaagaagctttcaaactagtcctttgggcatttaaaaaatcattatataaaagtacacttcttcaatacataagaacaaatattttttctttaccaaaaaaacctcatttttaggccaaaataagttacaacttgctgaaaaccttttatggctcagtgctcattccagatatatgaagctatatttttttgtacatcttcagaaatcagagatactgagagtggtcttcttttttttgagagggagtttcactttctcccccaggctagagtgcagtggcgcaaactcagctcactgcaacctctgccccccgggttcaagcgattctcctgcctcagcctcctaggtagttgggattacaggcacccaccaccatgcctggctaatttttgtatttttagtagatggggtttcgccatgttggccaggctggtctcaaacacttgacctcaagcaatcggcccgcctcggcctcccaaagtgctgggattacaggcatgagccaccgtgcccagccagagagacaagagtggttacttctaaaatgacaagatgatgtaaccctggctcagggagtagatcaagttctaaatctcaggaataaaaaactgatactcattatccaattcatatagtcttgtattatatacatattaacagtctatgcaatgaaaaataaagaaatttcataaaactatttcaaaactcagaacataaaaatgtaaagaaacaaaacatttaatgtacaatctactccatttggcaatgtgtactgagagataaaaaacctatctacaaacagaatata

SEQ ID NO: 366878 - DNA, 1170 bp, Homo sapiens
  misc_feature (6)..(6): n is a, c, g, or t
  misc_feature (12)..(12): n is a, c, g, or t
  misc_feature (31)..(32): n is a, c, g, or t
  misc_feature (34)..(35): n is a, c, g, or t
  misc_feature (37)..(38): n is a, c, g, or t
  misc_feature (40)..(40): n is a, c, g, or t
  misc_feature (49)..(49): n is a, c, g, or t
  misc_feature (52)..(52): n is a, c, g, or t
  misc_feature (55)..(57): n is a, c, g, or t
  misc_feature (59)..(61): n is a, c, g, or t
  misc_feature (63)..(65): n is a, c, g, or t
  misc_feature (68)..(68): n is a, c, g, or t
  misc_feature (73)..(73): n is a, c, g, or t
  misc_feature (82)..(83): n is a, c, g, or t
  misc_feature (91)..(91): n is a, c, g, or t
  misc_feature (96)..(96): n is a, c, g, or t
  misc_feature (98)..(98): n is a, c, g, or t
  misc_feature (101)..(102): n is a, c, g, or t
  misc_feature (104)..(105): n is a, c, g, or t
  misc_feature (108)..(108): n is a, c, g, or t
  misc_feature (113)..(116): n is a, c, g, or t
  misc_feature (119)..(120): n is a, c, g, or t
  misc_feature (122)..(122): n is a, c, g, or t
  misc_feature (124)..(124): n is a, c, g, or t
  misc_feature (126)..(130): n is a, c, g, or t
  misc_feature (132)..(132): n is a, c, g, or t
  misc_feature (134)..(134): n is a, c, g, or t
  misc_feature (137)..(137): n is a, c, g, or t
  misc_feature (146)..(146): n is a, c, g, or t
  misc_feature (153)..(153): n is a, c, g, or t
  misc_feature (155)..(155): n is a, c, g, or t
  misc_feature (157)..(157): n is a, c, g, or t
  misc_feature (161)..(162): n is a, c, g, or t
  misc_feature (164)..(164): n is a, c, g, or t
  misc_feature (168)..(170): n is a, c, g, or t
  misc_feature (172)..(172): n is a, c, g, or t
  misc_feature (175)..(175): n is a, c, g, or t
  misc_feature (177)..(180): n is a, c, g, or t
  misc_feature (182)..(184): n is a, c, g, or t
  misc_feature (189)..(189): n is a, c, g, or t
  misc_feature (193)..(193): n is a, c, g, or t
  misc_feature (196)..(196): n is a, c, g, or t
  misc_feature (198)..(199): n is a, c, g, or t
  misc_feature (202)..(202): n is a, c, g, or t
  misc_feature (205)..(205): n is a, c, g, or t
  misc_feature (211)..(212): n is a, c, g, or t
  misc_feature (216)..(217): n is a, c, g, or t
  misc_feature (221)..(223): n is a, c, g, or t
  misc_feature (225)..(225): n is a, c, g, or t
  misc_feature (230)..(230): n is a, c, g, or t
  misc_feature (233)..(233): n is a, c, g, or t
  misc_feature (235)..(235): n is a, c, g, or t
  misc_feature (237)..(237): n is a, c, g, or t
  misc_feature (240)..(241): n is a, c, g, or t
  misc_feature (244)..(245): n is a, c, g, or t
  misc_feature (248)..(250): n is a, c, g, or t
  misc_feature (253)..(253): n is a, c, g, or t
  misc_feature (256)..(256): n is a, c, g, or t
  misc_feature (261)..(261): n is a, c, g, or t
  misc_feature (263)..(264): n is a, c, g, or t
  misc_feature (266)..(266): n is a, c, g, or t
  misc_feature (271)..(271): n is a, c, g, or t
  misc_feature (275)..(275): n is a, c, g, or t
  misc_feature (279)..(279): n is a, c, g, or t
  misc_feature (281)..(281): n is a, c, g, or t
  misc_feature (284)..(284): n is a, c, g, or t
  misc_feature (290)..(290): n is a, c, g, or t
  misc_feature (294)..(296): n is a, c, g, or t
  misc_feature (298)..(298): n is a, c, g, or t
  misc_feature (318)..(318): n is a, c, g, or t
  misc_feature (349)..(349): n is a, c, g, or t
  misc_feature (355)..(355): n is a, c, g, or t
  misc_feature (363)..(363): n is a, c, g, or t
  misc_feature (387)..(387): n is a, c, g, or t
  misc_feature (393)..(393): n is a, c, g, or t
  misc_feature (406)..(406): n is a, c, g, or t
  misc_feature (438)..(438): n is a, c, g, or t
  misc_feature (446)..(446): n is a, c, g, or t
  misc_feature (452)..(452): n is a, c, g, or t
  misc_feature (464)..(464): n is a, c, g, or t
aaaaanttttantaataaatttttaaaaaanntnnannantttaatttntanatnnntnnnannnatnttttntaaaaaaannaaaaaaanaaaananatnnannatnaaacnnnnccnnantncnnnnncntnttnccttcctcnacctttntntnaccnncnttcnnntnccnannnntnnncccantcanttnanncanaancccccnnattnncttnnncntcccntcncncntcnnttnnccnnnttnccncctcntnncntttcnaacntccncnaancattcncctnnncnaatttatattcccccacttntctccatcaatacaaccttatcccctttttnacaaanacttttcnttcttttctttcattatccttttncccccntttccataaaaanatattccttaaaaaaaactttttcacaccccnccaatcancccatnacatatattatnttatttaaaagacccaactcagcccatcttagaggccttggacaaggacagctcaccaaaggatgacgtctgggactctgtgtccattatctcgtttccggaaaaggagcaagaagatgttctccaaacgctttgaaccaaagcatgggcctagcccactggctccctggaagagatcaagccatcggagctgctagagttctgtctggactttccagagaccagtattcccttttgctgcctctaaaaggcctgtccctgcagacatgagagacagcaggtctcatgggggtgacaagctttttttttttttcttaaagaattttcaaaatcaaattccagaatgattttacggagatatcccaggaaaattaaggcttctcttaaacactaaaaaggcatgtaattgcttgttagcaaaatggatatgacacatctctgatacttttttcattattggttgggctgagcagtcagaagacctggtcgtcgtcttgactttggcaaatgagccggagccccttgggcaggtcacacaacctgtcccagcgagggacaccgagtggcccttcatgtacatccatggtgtgctggcttaaaatgtaattaatcttgtaaatatactcctagtaatttaagattttgtttttaaactggaaataaaagattgtatagtgcatgttttttaaagtctaaaaaaaaaatt

SEQ ID NO: 366879 - DNA, 3979 bp, Homo sapiens
  misc_feature (1887)..(1887): n is a, c, g, or t
taaaggacttcctactcgtgcaccgccgccggctccagggcaaaccccacgccatttagaaatgctggaagtttctgtctctccctccccctgctcggaggccattccccccacccccagagccccacctcctccttcactgggccctttctaactccttccccttaaaacccttttcaaaatggggttgactggaggcggaggttgcagtgagccgagatcgccccactgcactccagcctggtgactccgtctcaaaaaaaaggggaggggggcgggggagagttgaaagcttaatatgtactttgggggctattaaagcaaacatttcgactaaaggggcgaatcctcgaattgtgcgatcaagcacccgagaggagagttggggggggtcaggaggggtgggggctccagggaacgcccgggggcctgggccggggtctcgcggggcccttccggaaggatcgcggcccccgaaggtgggcgtcccgcggggctccagtctccaggacgttccgggaggctccgcgctctgggaggccggctgcgtggggtccccgcgctgcagccgcagaggccccccagggccgcggttcccggagcgggaaagtcccgcgcgggggcggtggcctcgggggcgggacggggcgggggcgggggcgcgggcggccgagccgaatcccctccaccgggacgccccgctgccgctcgggaagaggcgggccctgcgcgccctgcgctcgccatggcggtttgggcggcgacgtgagcggctccgcggaccccgagcggggccccggccgcgacctgagccgccgccgagcgcccggggccatgcgaccgacgctgctgtggtcgctgctgctgctgctcggagtcttcgccgccgccgccgcggccccgccagaccctctttcccagctgcccgctcctcagcacccgaagattcgcctgtacaacgcagagcaggtcctgagttgggagccagtggccctgagcaatagcacgaggcctgttgtctaccaagtgcagtttaaatacaccgacagtaaatggttcacggccgacatcatgtccataggggtgaattgtacacagatcacagcaacagagtgtgacttcactgccgccagtccctcagcaggcttcccaatggatttcaatgtcactctacgccttcgagctgagctgggagcactccattctgcctgggtgacaatgccttggtttcaacactatcggaatgtgactgtcgggcctccagaaaacattgaggtgaccccaggagaaggctccctcatcatcaggttctcctctccctttgacatcgctgatacctccacggcctttttttgttattatgtccattactgggaaaaaggaggaatccaacaggtcaaaggccctttcagaagcaactccatttcattggataacttaaaaccctccagagtgtactgtttacaagtccaggcacaactgctttggaacaaaagtaacatctttagagtcgggcatttaagcaacatatcttgctacgaaacaatggcagatgcctccactgagcttcagcaagtcatcctgatctccgtgggaacattttcgttgctgtcggtgctggcaggagcctgtttcttcctggtcctgaaatatagaggcctgattaaatactggtttcacactccaccaagcatcccattacagatagaagagtatttaaaagacccaactcagcccatcttagaggccttggacaaggacagctcaccaaaggatgacgtctgggactctgtgtccattatctcgtttccggaaaaggagcaagaagatgttctccaaacgctttgaaccaaagcatggctgtaggcaacaagattgttggcaacnaagaattgaagaatcatctgtaaccccagctactcgggaggctgaggcacgagaaccatttgaacctgggagacagaggttgcagtgagctgagattgcaccactacactccagcctgggtgacaagagcaaaactccatctgtggtcccagctgcttggaaaccggaggtaagaggattgcctgagctccagcatttgaaggtgcagtgagctgtggttgcaccactgcactccagcctaggcaacagagtgagatattgtctttaaaaaaaaaaaaaaaaattcatggcagagtcagaaatagaaaaaaacagccaccatttccagtcagtcttcagggaaaccttcaataaccctcacataagcattttacaagtctatttcttcttattttataaacataactgcatctttaattgggtgtacttgaataattgaaaactgaacagcaaatcaatttttatggttcattttctccaacaaacaacaatattaaactgtatgagaagtaatatttattgcaacaggttatgaggtggaaacaaataattagtcttacaatttgctagaagcatgacagagcttactaacattttgaagaaaaaacagcaaagaaagaaatcatcaaacaagatggtatcttgacaaaggcacagcgctccacaactgcttcatactctgtgcacaagaaatcctctcaagagagaggagaggagtgatgccaaatgggcttacattagacccgtggacactaccactggtattattcatacaaccaaggctctacaacacccctctggagaaaaagtgcaacacaaaatctgtgtaacaaaggaaagcaaaagtagcaataagggcccagaggaatatatgaactttcaagttgaagatatatttcacaggaatattcacccaaagcttgagagctagagcgaggagagacttgcagtcggtaactgagtagatgaaatgcataatttttcactaggtgataattccctttgggaagaagtgctttatctttaattattccactttttgttaaatggttcatgcttttaaactgcgattgtctcaaacttgcttgctattgaattgtgtaacatcagataatggcaagttgtcaaaagataaccccagtggataattgaagctgcttttacgagaagcatggtgctgagctgccttacacagtctttttacagtaaccataaaaaactgagtttatttgatcatgtattatcccttctcacataaagtcatattagaggaattctttttaaaagaagctttcaaactagtcctttgggcatttaaaaaatcattatataaaagtacacttcttcaatacataagaacaaatattttttctttaccaaaaaaacctcatttttaggccaaaataagttacaacttgctgaaaaccttttatggctcagtgctcattccagatatatgaagctatatttttttgtacatcttcagaaatcagagatactgagagtggtcttcttttttttgagagggagtttcactttctcccccaggctagagtgcagtggcgcaaactcagctcactgcaacctctgccccccgggttcaagcgattctcctgcctcagcctcctaggtagttgggattacaggcacccaccaccatgcctggctaatttttgtatttttagtagatggggtttcgccatgttggccaggctggtctcaaacacttgacctcaagcaatcggcccgcctcggcctcccaaagtgctgggattacaggcatgagccaccgtgcccagccagagagacaagagtggttacttctaaaatgacaagatgatgtaaccctggctcagggagtagatcaagttctaaatctcaggaataaaaaactgatactcattatccaattcatatagtcttgtattatatacatattaacagtctatgcaatgaaaaataaagaaatttcataaaactatttcaaaactcagaacataaaaatgtaaagaaacaaaacatttaatgtacaatctactccatttggcaatgtgtactgagagataaaaaacctatctacaaacagaatata

SEQ ID NO: 366880 - DNA, 2154 bp, Homo sapiens
taaaggacttcctactcgtgcaccgccgccggctccagggcaaaccccacgccatttagaaatgctggaagtttctgtctctccctccccctgctcggaggccattccccccacccccagagccccacctcctccttcactgggccctttctaactccttccccttaaaacccttttcaaaatggggttgactggaggcggaggttgcagtgagccgagatcgccccactgcactccagcctggtgactccgtctcaaaaaaaaggggaggggggcgggggagagttgaaagcttaatatgtactttgggggctattaaagcaaacatttcgactaaaggggcgaatcctcgaattgtgcgatcaagcacccgagaggagagttggggggggtcaggaggggtgggggctccagggaacgcccgggggcctgggccggggtctcgcggggcccttccggaaggatcgcggcccccgaaggtgggcgtcccgcggggctccagtctccaggacgttccgggaggctccgcgctctgggaggccggctgcgtggggtccccgcgctgcagccgcagaggccccccagggccgcggttcccggagcgggaaagtcccgcgcgggggcggtggcctcgggggcgggacggggcgggggcgggggcgcgggcggccgagccgaatcccctccaccgggacgccccgctgccgctcgggaagaggcgggccctgcgcgccctgcgctcgccatggcggtttgggcggcgacgtgagcggctccgcggaccccgagcggggccccggccgcgacctgagccgccgccgagcgcccggggccatgcgaccgacgctgctgtggtcgctgctgctgctgctcggagtcttcgccgccgccgccgcggccccgccagaccctctttcccagctgcccgctcctcagcacccgaagattcgcctgtacaacgcagagcaggtcctgagttgggagccagtggccctgagcaatagcacgaggcctgttgtctaccaagtgcagtttaaatacaccgacagtaaatggttcacggccgacatcatgtccataggggtgaattgtacacagatcacagcaacagagtgtgacttcactgccgccagtccctcagcaggcttcccaatggatttcaatgtcactctacgccttcgagctgagctgggagcactccattctgcctgggtgacaatgccttggtttcaacactatcggaatgtgactgtcgggcctccagaaaacattgaggtgaccccaggagaaggctccctcatcatcaggttctcctctccctttgacatcgctgatacctccacggcctttttttgttattatgtccattactgggaaaaaggaggaatccaacaggtcaaaggccctttcagaagcaactccatttcattggataacttaaaaccctccagagtgtactgtttacaagtccaggcacaactgctttggaacaaaagtaacatctttagagtcgggcatttaagcaacatatcttgctacgaaacaatggcagatgcctccactgagcttcagcaagtcatcctgatctccgtgggaacattttcgttgctgtcggtgctggcaggagcctgtttcttcctggtcctgaaatatagaggcctgattaaatactggtttcacactccaccaagcatcccattacagatagaagagtatttaaaagacccaactcagcccatcttagaggccttggacaaggacagctcacaattttcaaaatcaaattccagaatgattttacggagatatcccaggaaaattaaggcttctcttaaacactaaaaaggcatgtaattgcttgttagcaaaatggatatgacacatctctgatacttttttcattattggttgggctgagcagtcagaagacctggtcgtcgtcttgactttggcaaatgagccggagccccttgggcaggtcacacaacctgtcccagcgagggacaccgagtggcccttcatgtacatccatggtgtgctggcttaaaatgtaattaatcttgtaaatatactcctagtaatttaagattttgtttttaaactggaaataaaagattgtatagtgcatgttttttaaagtctaaaaaaaaaatt

SEQ ID NO: 366881 - DNA, 1938 bp, Homo sapiens
taaaggacttcctactcgtgcaccgccgccggctccagggcaaaccccacgccatttagaaatgctggaagtttctgtctctccctccccctgctcggaggccattccccccacccccagagccccacctcctccttcactgggccctttctaactccttccccttaaaacccttttcaaaatggggttgactggaggcggaggttgcagtgagccgagatcgccccactgcactccagcctggtgactccgtctcaaaaaaaaggggaggggggcgggggagagttgaaagcttaatatgtactttgggggctattaaagcaaacatttcgactaaaggggcgaatcctcgaattgtgcgatcaagcacccgagaggagagttggggggggtcaggaggggtgggggctccagggaacgcccgggggcctgggccggggtctcgcggggcccttccggaaggatcgcggcccccgaaggtgggcgtcccgcggggctccagtctccaggacgttccgggaggctccgcgctctgggaggccggctgcgtggggtccccgcgctgcagccgcagaggccccccagggccgcggttcccggagcgggaaagtcccgcgcgggggcggtggcctcgggggcgggacggggcgggggcgggggcgcgggcggccgagccgaatcccctccaccgggacgccccgctgccgctcgggaagaggcgggccctgcgcgccctgcgctcgccatggcggtttgggcggcgacgtgagcggctccgcggaccccgagcggggccccggccgcgacctgagccgccgccgagcgcccggggccatgcgaccgacgctgctgtggtcgctgctgctgctgctcggagtcttcgccgccgccgccgcggccccgccagaccctctttcccagctgcccgctcctcagcacccgaagattcgcctgtacaacgcagagcaggtcctgagttgggagccagtggccctgagcaatagcacgaggcctgttgtctaccaagtgcagtttaaatacaccgacagtaaatggttcacggccgacatcatgtccataggggtgaattgtacacagatcacagcaacagagtgtgacttcactgccgccagtccctcagcaggcttcccaatggatttcaatgtcactctacgccttcgagctgagctgggagcactccattctgcctgggtgacaatgccttggtttcaacactatcggaatgtgactgtcgggcctccagaaaacattgaggtgaccccaggagaaggctccctcatcatcaggttctcctctccctttgacatcgctgatacctccacggcctttttttgttattatgtccattactgggaaaaaggaggaatccaacaggtcaaaggccctttcagaagcaactccatttcattggataacttaaaaccctccagagtgtactgtttacaagtccaggcacaactgctttggaacaaaagtaacatctttagagtcgggcatttaagcaacatatcttgctacgaaacaatggcagatgcctccactgagcttcagcaagtcatcctgatctccgtgggaacattttcgttgctgtcggtgctggcaggagcctgtttcttcctggtcctgaaatatagaggcctgattaaatactggtttcacactccaccaagcatcccattacagatagaagagcctggtcgtcgtcttgactttggcaaatgagccggagccccttgggcaggtcacacaacctgtcccagcgagggacaccgagtggcccttcatgtacatccatggtgtgctggcttaaaatgtaattaatcttgtaaatatactcctagtaatttaagattttgtttttaaactggaaataaaagattgtatagtgcatgttttttaaagtctaaaaaaaaaatt

SEQ ID NO: 366882 - DNA, 610 bp, Homo sapiens
  misc_feature (25)..(25): n is a, c, g, or t
  misc_feature (69)..(70): n is a, c, g, or t
  misc_feature (81)..(81): n is a, c, g, or t
  misc_feature (95)..(95): n is a, c, g, or t
  misc_feature (98)..(99): n is a, c, g, or t
  misc_feature (102)..(102): n is a, c, g, or t
  misc_feature (104)..(104): n is a, c, g, or t
  misc_feature (106)..(106): n is a, c, g, or t
  misc_feature (114)..(114): n is a, c, g, or t
gttccacttctagcctcctctaagnggcccgaaataaccgaccctgcatttggtctgggcgtttgaggnnttcctctcaanatgacaagttaggnggnngcnangnttgtttanataggcagagaccagtattcccttttgctgcctctaaaaggcctgtccctgcagacatgagagacagcaggtctcatgggggtgacaagctttttttttttttcttaaagaattttcaaaatcaaattccagaatgattttacggagatatcccaggaaaattaaggcttctcttaaacactaaaaaggcatgtaattgcttgttagcaaaatggatatgacacatctctgatacttttttcattattggttgggctgagcagtcagaagacctggtcgtcgtcttgactttggcaaatgagccggagccccttgggcaggtcacacaacctgtcccagcgagggacaccgagtggcccttcatgtacatccatggtgtgctggcttaaaatgtaattaatcttgtaaatatactcctagtaatttaagattttgtttttaaactggaaataaaagattgtatagtgcatgttttttaaagtctaaaaaaaaaatt

SEQ ID NO: 366883 - DNA, 2154 bp, Homo sapiens
attagccgggtaggatggtacccacctgtaaccccagctactcgggaggctgaggcacgagaaccatttgaacctgggagacagaggttgcagtgagctgagattgcaccactacactccagcctgggtgacaagagcaaaactccatctgtggtcccagctgcttggaaaccggaggtaagaggattgcctgagctccagcatttgaaggtgcagtgagctgtggttgcaccactgcactccagcctaggcaacagagtgagatattgtctttaaaaaaaaaaaaaaaaattcatggcagagtcagaaatagaaaaaaacagccaccatttccagtcagtcttcagggaaaccttcaataaccctcacataagcattttacaagtctatttcttcttattttataaacataactgcatctttaattgggtgtacttgaataattgaaaactgaacagcaaatcaatttttatggttcattttctccaacaaacaacaatattaaactgtatgagaagtaatatttattgcaacaggttatgaggtggaaacaaataattagtcttacaatttgctagaagcatgacagagcttactaacattttgaagaaaaaacagcaaagaaagaaatcatcaaacaagatggtatcttgacaaaggcacagcgctccacaactgcttcatactctgtgcacaagaaatcctctcaagagagaggagaggagtgatgccaaatgggcttacattagacccgtggacactaccactggtattattcatacaaccaaggctctacaacacccctctggagaaaaagtgcaacacaaaatctgtgtaacaaaggaaagcaaaagtagcaataagggcccagaggaatacaaacagtgcaaatacagtactgcaaactcagtaaaaggagtttttgattggagtatgaactttcaagttgaagatatatttcacaggaatattcacccaaagcttgagagctagagcgaggagagacttgcagtcggtaactgagtagatgaaatgcataatttttcactaggtgataattccctttgggaagaagtgctttatctttaattattccactttttgttaaatggttcatgcttttaaactgcgattgtctcaaacttgcttgctattgaattgtgtaacatcagataatggcaagttgtcaaaagataaccccagtggataattgaagctgcttttacgagaagcatggtgctgagctgccttacacagtctttttacagtaaccataaaaaactgagtttatttgatcatgtattatcccttctcacataaagtcatattagaggaattctttttaaaagaagctttcaaactagtcctttgggcatttaaaaaatcattatataaaagtacacttcttcaatacataagaacaaatattttttctttaccaaaaaaacctcatttttaggccaaaataagttacaacttgctgaaaaccttttatggctcagtgctcattccagatatatgaagctatatttttttgtacatcttcagaaatcagagatactgagagtggtcttcttttttttgagagggagtttcactttctcccccaggctagagtgcagtggcgcaaactcagctcactgcaacctctgccccccgggttcaagcgattctcctgcctcagcctcctaggtagttgggattacaggcacccaccaccatgcctggctaatttttgtatttttagtagatggggtttcgccatgttggccaggctggtctcaaacacttgacctcaagcaatcggcccgcctcggcctcccaaagtgctgggattacaggcatgagccaccgtgcccagccagagagacaagagtggttacttctaaaatgacaagatgatgtaaccctggctcagggagtagatcaagttctaaatctcaggaataaaaaactgatactcattatccaattcatatagtcttgtattatatacatattaacagtctatgcaatgaaaaataaagaaatttcataaaactatttcaaaactcagaacataaaaatgtaaagaaacaaaacatttaatgtacaatctactccatttggcaatgtgtactgagagataaaaaacctatctacaaacagaatata

SEQ ID NO: 366884 - DNA, 2240 bp, Homo sapiens
tgctgttgttgtgcttgatccttcggcgtgttgcgtgctgttggtgttgtcgtcgctgttccttgtgatgcgctgacttgctgctgttgtttgcgctcttgtggtctgctgcctgcgtgctgtttgggtgcgcggttgtatgtgtattcgacgacctcgcgtaatatttcaaaacatactccgggccgaattttttctcccccccgccataatgctccgggggttcacccctcgaatcacctccatgttttatttctccccgcggctgttatacctctctgggtgggtgggtccgccctttggtcgcccccccacagtgggggggtcttctccccacgagccccaagtacgtgggtttccccacaccgccggtgtttaaccccgcgcccgccgctctgctttatatctcggccccccctatggggccccgccttggtcaacaaagagacgggggtgctcgtaattcgtggcgcccccccccggggttttttttctcgccccccccccccttttttttttgtgtttgttttttttcctgttgtgtttttctttctttttttttttttttttttttttttttttttttttttttttgtatgagaagtaatatttattgcaacaggttatgaggtggaaacaaataattagtcttacaatttgctagaagcatgacagagcttactaacattttgaagaaaaaacagcaaagaaagaaatcatcaaacaagatggtatcttgacaaaggcacagcgctccacaactgcttcatactctgtgcacaagaaatcctctcaagagagaggagaggagtgatgccaaatgggcttacattagacccgtggacactaccactggtattattcatacaaccaaggctctacaacacccctctggagaaaaagtgcaacacaaaatctgtgtaacaaaggaaagcaaaagtagcaataagggcccagaggaatacaaacagtgcaaatacagtactgcaaactcagtaaaaggagtttttgattggagtatgaactttcaagttgaagatatatttcacaggaatattcacccaaagcttgagagctagagcgaggagagacttgcagtcggtaactgagtagatgaaatgcataatttttcactaggtgataattccctttgggaagaagtgctttatctttaattattccactttttgttaaatggttcatgcttttaaactgcgattgtctcaaacttgcttgctattgaattgtgtaacatcagataatggcaagttgtcaaaagataaccccagtggataattgaagctgcttttacgagaagcatggtgctgagctgccttacacagtctttttacagtaaccataaaaaactgagtttatttgatcatgtattatcccttctcacataaagtcatattagaggaattctttttaaaagaagctttcaaactagtcctttgggcatttaaaaaatcattatataaaagtacacttcttcaatacataagaacaaatattttttctttaccaaaaaaacctcatttttaggccaaaataagttacaacttgctgaaaaccttttatggctcagtgctcattccagatatatgaagctatatttttttgtacatcttcagaaatcagagatactgagagtggtcttcttttttttgagagggagtttcactttctcccccaggctagagtgcagtggcgcaaactcagctcactgcaacctctgccccccgggttcaagcgattctcctgcctcagcctcctaggtagttgggattacaggcacccaccaccatgcctggctaatttttgtatttttagtagatggggtttcgccatgttggccaggctggtctcaaacacttgacctcaagcaatcggcccgcctcggcctcccaaagtgctgggattacaggcatgagccaccgtgcccagccagagagacaagagtggttacttctaaaatgacaagatgatgtaaccctggctcagggagtagatcaagttctaaatctcaggaataaaaaactgatactcattatccaattcatatagtcttgtattatatacatattaacagtctatgcaatgaaaaataaagaaatttcataaaactatttcaaaactcagaacataaaaatgtaaagaaacaaaacatttaatgtacaatctactccatttggcaatgtgtactgagagataaaaaacctatctacaaacagaatata

SEQ ID NO: 366885 - DNA, 1512 bp, Homo sapiens
taaaggacttcctactcgtgcaccgccgccggctccagggcaaaccccacgccatttagaaatgctggaagtttctgtctctccctccccctgctcggaggccattccccccacccccagagccccacctcctccttcactgggccctttctaactccttccccttaaaacccttttcaaaatggggttgactggaggcggaggttgcagtgagccgagatcgccccactgcactccagcctggtgactccgtctcaaaaaaaaggggaggggggcgggggagagttgaaagcttaatatgtactttgggggctattaaagcaaacatttcgactaaaggggcgaatcctcgaattgtgcgatcaagcacccgagaggagagttggggggggtcaggaggggtgggggctccagggaacgcccgggggcctgggccggggtctcgcggggcccttccggaaggatcgcggcccccgaaggtgggcgtcccgcggggctccagtctccaggacgttccgggaggctccgcgctctgggaggccggctgcgtggggtccccgcgctgcagccgcagaggccccccagggccgcggttcccggagcgggaaagtcccgcgcgggggcggtggcctcgggggcgggacggggcgggggcgggggcgcgggcggccgagccgaatcccctccaccgggacgccccgctgccgctcgggaagaggcgggccctgcgcgccctgcgctcgccatggcggtttgggcggcgacgtgagcggctccgcggaccccgagcggggccccggccgcgacctgagccgccgccgagcgcccggggccatgcgaccgacgctgctgtggtcgctgctgctgctgctcggagtcttcgccgccgccgccgcggccccgccagaccctctttcccagctgcccgctcctcagcacccgaagattcgcctgtacaacgcagagcaggtcctgagttgggagccagtggccctgagcaatagcacgaggcctgttgtctaccaagtgcagtttaaatacaccgacagtaaatggttcacggccgacatcatgtccataggggtgaattgtacacagatcacagcaacagagtgtgacttcactgccgccagtccctcagcaggcttcccaatggatttcaatgtcactctacgccttcgagctgagctgggagcactccattctgcctgggtgacaatgccttggtttcaacactatcggaatggtaagagaacttgagtatagaacttcctttatactttccaggttttcttcacttgcggtatcgactccacacacctctgtcctgcctgtcaccctaaatgaccagcagacaaatgggtaggacagtcaaacccacactctgaccttggaggctgatgctaagggagtgtgatttgctaaaccaggggttggccaactacagcctgcaggccaaatcgggcccaccacttgtttttgtaaataaagttttattggaacacacagtta

SEQ ID NO: 366886 - DNA, 411 bp, Homo sapiens
gatgataggaaacccggatataaggcagaacaatgttgcttgggccatctcttacacctcagtgaaacggaaaatgaaggaaatggaaggctggcatgggaaccccgacttatacagtgatgcccttttgctgttccacgcgtcgcttggggtggaagcccttccttgtcccctcgccacccaccccggagccccttggtgcttcctttctgaactgaatgcttagactggggaactagaggtgcccggaaagggaagtcgggaagaagagactattcctgttggttcctccccagagatgggagatggtgaacaggcgtgtggagggcggaataatggtccccaaagatgtccacgccctcatcctcagagtccgtgaacctgggaatgtgctgcctgacgtacaaaagg

SEQ ID NO: 366887 - DNA, 488 bp, Homo sapiens
agctatcagcctctttggccacacaacacaccaattttcacacataaaatgtgtccactgccagccagtgacccactaaaaatggcatcttgttcttctttggttgtcgtgttcacagtgaatttgaggaaacatcagaaaagatgtaggcagcttggccatgttcatttacatgtgtgcttgtgatgtttttaaaacaggtcaaaggccctttcagaagcaactccatttcattggataacttaaaaccctccagagtgtactgtttacaagtccaggcacaactgctttggaacaaaagtaacatctttagagtcgggcatttaagcaacatatcttgctacgaaacaatggcagatggtaaaatataccttcttatgtcctttctgaactgggaaaagaatactcctccaatagtgaaatcggggaatgcttatgaggtcatgggtggtgggagtggggagacccagtgagaagagtgctgaact

SEQ ID NO: 366888 - DNA, 348 bp, Homo sapiens
aatgattttacggagatatcccaggaaaattaaggcttctcttaaacactaaaaaggcatgtaattgcttgttagcaaaatggatatgacacatctctgatacttttttcattattggttgggctgagcagtcagaagacctggtcgtcgtcttgactttggcaaatgagccggagccccttgggcaggtcacacaacctgtcccagcgagggacaccgagtggcccttcatgtacatccatggtgtgctggcttaaaatgtaattaatcttgtaaatatactcctagtaatttaagattttgtttttaaactggaaataaaagattgtatagtgcatgttttttaaa

SEQ ID NO: 366889 - DNA, 1585 bp, Homo sapiens
taaaggacttcctactcgtgcaccgccgccggctccagggcaaaccccacgccatttagaaatgctggaagtttctgtctctccctccccctgctcggaggccattccccccacccccagagccccacctcctccttcactgggccctttctaactccttccccttaaaacccttttcaaaatggggttgactggaggcggaggttgcagtgagccgagatcgccccactgcactccagcctggtgactccgtctcaaaaaaaaggggaggggggcgggggagagttgaaagcttaatatgtactttgggggctattaaagcaaacatttcgactaaaggggcgaatcctcgaattgtgcgatcaagcacccgagaggagagttggggggggtcaggaggggtgggggctccagggaacgcccgggggcctgggccggggtctcgcggggcccttccggaaggatcgcggcccccgaaggtgggcgtcccgcggggctccagtctccaggacgttccgggaggctccgcgctctgggaggccggctgcgtggggtccccgcgctgcagccgcagaggccccccagggccgcggttcccggagcgggaaagtcccgcgcgggggcggtggcctcgggggcgggacggggcgggggcgggggcgcgggcggccgagccgaatcccctccaccgggacgccccgctgccgctcgggaagaggcgggccctgcgcgccctgcgctcgccatggcggtttgggcggcgacgtgagcggctccgcggaccccgagcggggccccggccgcgacctgagccgccgccgagcgcccggggccatgcgaccgacgctgctgtggtcgctgctgctgctgctcggagtcttcgccgccgccgccgcggccccgccagaccctctttcccagctgcccgctcctcagcacccgaagattcgcctgtacaacgcagagcaggtcctgagttgggagccagtggccctgagcaatagcacgaggcctgttgtctaccaagtgcagtttaaatacaccgacagtaaatggttcacggccgacatcatgtccataggggtgaattgtacacagatcacagcaacagagtgtgacttcactgccgccagtccctcagcaggcttcccaatggatttcaatgtcactctacgccttcgagctgagctgggagcactccattctgcctgggtgacaatgccttggtttcaacactatcggaatgtgactgtcgggcctccagaaaacattgaggtgaccccaggagaaggctccctcatcatcaggttctcctctccctttgacatcgctgatacctccacggcctttttttgttattatgtccattactgggaaaaaggaggaatccaacaggtcaaaggccctttcagaagcaactccatttcattggataacttaaaaccctcaatgccttggtttcaacactatcggactgtgactgtcgggcctccagaaaacattgaggtgacccaggagaaggctccctcatcatcatgttctcctctccctttgacatcgctgataactccacggcctcttcggc

SEQ ID NO: 366890 - DNA, 1594 bp, Homo sapiens
ggcggcggcggcggcggcgggcgagggtgaccggccgagcggcggcggcatggagtagacgcgccgccgccgcggcccgccagaccctctttcccagctgcccgctcctcagcacccgaagattcgcctgtacaacgcagagcaggtcctgagttgggagccagtggccctgagcaatagcacgaggcctgttgtctaccaagtgcagtttaaatacaccgacagtaaatggttcacggccgacatcatgtccataggggtgaattgtacacagatcacagcaacagagtgtgacttcactgccgccagtccctcagcaggcttcccaatggatttcaatgtcactctacgccttcgagctgagctgggagcactccattctgcctgggtgacaatgccttggtttcaacactatcggaatgtgactgtcgggcctccagaaaacattgaggtgaccccaggagaaggctccctcatcatcaggttctcctctccctttgacatcgctgatacctccacggcctttttttgttattatgtccattactgggaaaaaggaggaatccaacaggtcaaaggccctttcagaagcaactccatttcattggataacttaaaaccctccagagtgtactgtttacaagtccaggcacaactgctttggaacaaaagtaacatctttagagtcgggcatttaagcaacatatcttgctacgaaacaatggcagatgcctccactgagcttcagcaagtcatcctgatctccgtgggaacattttcgttgctgtcggtgctggcaggagcctgtttcttcctggtcctgaaatatagaggcctgattaaatactggtttcacactccaccaagcatcccattacagatagaagagtatttaaaagacccaactcagcccatcttagaggccttggacaaggacagctcaccaaaggatgacgtctgggactctgtgtccattatctcgtttccggaaaaggagcaagaagatgttctccaaacgctttgaaccaaagcatgggcctagcccactggctccctggaagagatcaagccatcggagctgctagagttctgtctggactttccagagaccagtattcccttttgctgcctctaaaaggcctgtccctgcagacatgagagacagcaggtctcatgggggtgacaagctttttttttttttcttaaagaattttcaaaatcaaattccagaatgattttacggagatatcccaggaaaattaaggcttctcttaaacactaaaaaggcatgtaattgcttgttagcaaaatggatatgacacatctctgatacttttttcattattggttgggctgagcagtcagaagacctggtcgtcgtcttgactttggcaaatgagccggagccccttgggcaggtcacacaacctgtcccagcgagggacaccgagtggcccttcatgtacatccatggtgtgctggcttaaaatgtaattaatcttgtaaatatactcctagtaatttaagattttgtttttaaactggaaataaaagattgtatagtgcatgttttttaaagtctaaaaaaaaaatt

SEQ ID NO: 366891 - DNA, 2514 bp, Homo sapiens
taaaggacttcctactcgtgcaccgccgccggctccagggcaaaccccacgccatttagaaatgctggaagtttctgtctctccctccccctgctcggaggccattccccccacccccagagccccacctcctccttcactgggccctttctaactccttccccttaaaacccttttcaaaatggggttgactggaggcggaggttgcagtgagccgagatcgccccactgcactccagcctggtgactccgtctcaaaaaaaaggggaggggggcgggggagagttgaaagcttaatatgtactttgggggctattaaagcaaacatttcgactaaaggggcgaatcctcgaattgtgcgatcaagcacccgagaggagagttggggggggtcaggaggggtgggggctccagggaacgcccgggggcctgggccggggtctcgcggggcccttccggaaggatcgcggcccccgaaggtgggcgtcccgcggggctccagtctccaggacgttccgggaggctccgcgctctgggaggccggctgcgtggggtccccgcgctgcagccgcagaggccccccagggccgcggttcccggagcgggaaagtcccgcgcgggggcggtggcctcgggggcgggacggggcgggggcgggggcgcgggcggccgagccgaatcccctccaccgggacgccccgctgccgctcgggaagaggcgggccctgcgcgccctgcgctcgccatggcggtttgggcggcgacgtgagcggctccgcggaccccgagcggggccccggccgcgacctgagccgccgccgagcgcccggggccatgcgaccgacgctgctgtggtcgctgctgctgctgctcggagtcttcgccgccgccgccgcggccccgccagaccctctttcccagctgcccgctcctcagcacccgaagattcgcctgtacaacgcagagcaggtcctgagttgggagccagtggccctgagcaatagcacgaggcctgttgtctaccaagtgcagtttaaatacaccgacagtaaatggttcacggccgacatcatgtccataggggtgaattgtacacagatcacagcaacagagtgtgacttcactgccgccagtccctcagcaggcttcccaatggatttcaatgtcactctacgccttcgagctgagctgggagcactccattctgcctgggtgacaatgccttggtttcaacactatcggaatgtagaaacggcatttctccatgttggccagactggtcttgaactcctgacctcaagtgatctgcccacctcagcctcccaaagtgctgggattacagtgactgtcgggcctccagaaaacattgaggtgaccccaggagaaggctccctcatcatcaggttctcctctccctttgacatcgctgatacctccacggcctttttttgttattatgtccattactgggaaaaaggaggaatccaacaggtcaaaggccctttcagaagcaactccatttcattggataacttaaaaccctccagagtgtactgtttacaagtccaggcacaactgctttggaacaaaagtaacatctttagagtcgggcatttaagcaacatatcttgctacgaaacaatggcagatgcctccactgagcttcagcaagtcatcctgatctccgtgggaacattttcgttgctgtcggtgctggcaggagcctgtttcttcctggtcctgaaatatagaggcctgattaaatactggtttcacactccaccaagcatcccattacagatagaagagtatttaaaagacccaactcagcccatcttagaggccttggacaaggacagctcaccaaaggatgacgtctgggactctgtgtccattatctcgtttccggaaaaggagcaagaagatgttctccaaacgctttgaaccaaagcatgggcctagcccactggctccctggaagagatcaagccatcggagctgctagagttctgtctggactttccagagaccagtattcccttttgctgcctctaaaaggcctgtccctgcagacatgagagacagcaggtctcatgggggtgacaagctttttttttttttcttaaagaattttcaaaatcaaattccagaatgattttacggagatatcccaggaaaattaaggcttctcttaaacactaaaaaggcatgtaattgcttgttagcaaaatggatatgacacatctctgatacttttttcattattggttgggctgagcagtcagaagacctggtcgtcgtcttgactttggcaaatgagccggagccccttgggcaggtcacacaacctgtcccagcgagggacaccgagtggcccttcatgtacatccatggtgtgctggcttaaaatgtaattaatcttgtaaatatactcctagtaatttaagattttgtttttaaactggaaataaaagattgtatagtgcatgttttttaaagtctaaaaaaaaaatt

SEQ ID NO: 366892 - DNA, 2367 bp, Homo sapiens
taaaggacttcctactcgtgcaccgccgccggctccagggcaaaccccacgccatttagaaatgctggaagtttctgtctctccctccccctgctcggaggccattccccccacccccagagccccacctcctccttcactgggccctttctaactccttccccttaaaacccttttcaaaatggggttgactggaggcggaggttgcagtgagccgagatcgccccactgcactccagcctggtgactccgtctcaaaaaaaaggggaggggggcgggggagagttgaaagcttaatatgtactttgggggctattaaagcaaacatttcgactaaaggggcgaatcctcgaattgtgcgatcaagcacccgagaggagagttggggggggtcaggaggggtgggggctccagggaacgcccgggggcctgggccggggtctcgcggggcccttccggaaggatcgcggcccccgaaggtgggcgtcccgcggggctccagtctccaggacgttccgggaggctccgcgctctgggaggccggctgcgtggggtccccgcgctgcagccgcagaggccccccagggccgcggttcccggagcgggaaagtcccgcgcgggggcggtggcctcgggggcgggacggggcgggggcgggggcgcgggcggccgagccgaatcccctccaccgggacgccccgctgccgctcgggaagaggcgggccctgcgcgccctgcgctcgccatggcggtttgggcggcgacgtgagcggctccgcggaccccgagcggggccccggccgcgacctgagccgccgccgagcgcccggggccatgcgaccgacgctgctgtggtcgctgctgctgctgctcggagtcttcgccgccgccgccgcggccccgccagaccctctttcccagctgcccgctcctcagcacccgaagattcgcctgtacaacgcagagcaggtcctgagttgggagccagtggccctgagcaatagcacgaggcctgttgtctaccaagtgcagtttaaatacaccgacagtaaatggttcacggccgacatcatgtccataggggtgaattgtacacagatcacagcaacagagtgtgacttcactgccgccagtccctcagcaggcttcccaatggatttcaatgtcactctacgccttcgagctgagctgggagcactccattctgcctgggtgacaatgccttggtttcaacactatcggaatgtcatcatcaggttctcctctccctttgacatcgctgatacctccacggcctttttttgttattatgtccattactgggaaaaaggaggaatccaacaggtcaaaggccctttcagaagcaactccatttcattggataacttaaaaccctccagagtgtactgtttacaagtccaggcacaactgctttggaacaaaagtaacatctttagagtcgggcatttaagcaacatatcttgctacgaaacaatggcagatgcctccactgagcttcagcaagtcatcctgatctccgtgggaacattttcgttgctgtcggtgctggcaggagcctgtttcttcctggtcctgaaatatagaggcctgattaaatactggtttcacactccaccaagcatcccattacagatagaagagtatttaaaagacccaactcagcccatcttagaggccttggacaaggacagctcaccaaaggatgacgtctgggactctgtgtccattatctcgtttccggaaaaggagcaagaagatgttctccaaacgctttgaaccaaagcatgggcctagcccactggctccctggaagagatcaagccatcggagctgctagagttctgtctggactttccagagaccagtattcccttttgctgcctctaaaaggcctgtccctgcagacatgagagacagcaggtctcatgggggtgacaagctttttttttttttcttaaagaattttcaaaatcaaattccagaatgattttacggagatatcccaggaaaattaaggcttctcttaaacactaaaaaggcatgtaattgcttgttagcaaaatggatatgacacatctctgatacttttttcattattggttgggctgagcagtcagaagacctggtcgtcgtcttgactttggcaaatgagccggagccccttgggcaggtcacacaacctgtcccagcgagggacaccgagtggcccttcatgtacatccatggtgtgctggcttaaaatgtaattaatcttgtaaatatactcctagtaatttaagattttgtttttaaactggaaataaaagattgtatagtgcatgttttttaaagtctaaaaaaaaaatt

SEQ ID NO: 366893 - DNA, 2294 bp, Homo sapiens
taaaggacttcctactcgtgcaccgccgccggctccagggcaaaccccacgccatttagaaatgctggaagtttctgtctctccctccccctgctcggaggccattccccccacccccagagccccacctcctccttcactgggccctttctaactccttccccttaaaacccttttcaaaatggggttgactggaggcggaggttgcagtgagccgagatcgccccactgcactccagcctggtgactccgtctcaaaaaaaaggggaggggggcgggggagagttgaaagcttaatatgtactttgggggctattaaagcaaacatttcgactaaaggggcgaatcctcgaattgtgcgatcaagcacccgagaggagagttggggggggtcaggaggggtgggggctccagggaacgcccgggggcctgggccggggtctcgcggggcccttccggaaggatcgcggcccccgaaggtgggcgtcccgcggggctccagtctccaggacgttccgggaggctccgcgctctgggaggccggctgcgtggggtccccgcgctgcagccgcagaggccccccagggccgcggttcccggagcgggaaagtcccgcgcgggggcggtggcctcgggggcgggacggggcgggggcgggggcgcgggcggccgagccgaatcccctccaccgggacgccccgctgccgctcgggaagaggcgggccctgcgcgccctgcgctcgccatggcggtttgggcggcgacgtgagcggctccgcggaccccgagcggggccccggccgcgacctgagccgccgccgagcgcccggggccatgcgaccgacgctgctgtggtcgctgctgctgctgctcggagtcttcgccgccgccgccgcggccccgccagaccctctttcccagctgcccgctcctcagcacccgaagattcgcctgtacaacgcagagcaggtcctgagttgggagccagtggccctgagcaatagcacgaggcctgttgtctaccaagtgcagtttaaatacaccgacagtaaatggttcacggccgacatcatgtccataggggtgaattgtacacagatcacagcaacagagtgtgacttcactgccgccagtccctcagcaggcttcccaatggatttcaatgtcactctacgccttcgagctgagctgggagcactccattctgcctgggtgacaatgccttggtttcaacactatcggaatgtgactgtcgggcctccagaaaacattgaggtgaccccaggagaaggctccctcatcatcaggttctcctctccctttgacatcgctgatacctccacggcctttttttgttattatgtccattactgggaaaaaggaggaatccaacaggtcaaaggccctttcagaagcaactccatttcattggataacttaaaaccctccagagtgtactgtttacaagtccaggcacaactgctttggaacaaaagtaacatctttagagtcgggcatttaagcaacatatcttgctacgaaacaatggcagatgcctccactgagcttcagcaagtcatcctgatctccgtgggaacattttcgttgctgtcggtgctggcaggagcctgtttcttcctggtccaaaggatgacgtctgggactctgtgtccattatctcgtttccggaaaaggagcaagaagatgttctccaaacgctttgaaccaaagcatgggcctagcccactggctccctggaagagatcaagccatcggagctgctagagttctgtctggactttccagagaccagtattcccttttgctgcctctaaaaggcctgtccctgcagacatgagagacagcaggtctcatgggggtgacaagctttttttttttttcttaaagaattttcaaaatcaaattccagaatgattttacggagatatcccaggaaaattaaggcttctcttaaacactaaaaaggcatgtaattgcttgttagcaaaatggatatgacacatctctgatacttttttcattattggttgggctgagcagtcagaagacctggtcgtcgtcttgactttggcaaatgagccggagccccttgggcaggtcacacaacctgtcccagcgagggacaccgagtggcccttcatgtacatccatggtgtgctggcttaaaatgtaattaatcttgtaaatatactcctagtaatttaagattttgtttttaaactggaaataaaagattgtatagtgcatgttttttaaagtctaaaaaaaaaatt

SEQ ID NO: 366894 - DNA, 3779 bp, Homo sapiens
  misc_feature (1887)..(1887): n is a, c, g, or t
  misc_feature (3500)..(3500): n is a, c, g, or t
taaaggacttcctactcgtgcaccgccgccggctccagggcaaaccccacgccatttagaaatgctggaagtttctgtctctccctccccctgctcggaggccattccccccacccccagagccccacctcctccttcactgggccctttctaactccttccccttaaaacccttttcaaaatggggttgactggaggcggaggttgcagtgagccgagatcgccccactgcactccagcctggtgactccgtctcaaaaaaaaggggaggggggcgggggagagttgaaagcttaatatgtactttgggggctattaaagcaaacatttcgactaaaggggcgaatcctcgaattgtgcgatcaagcacccgagaggagagttggggggggtcaggaggggtgggggctccagggaacgcccgggggcctgggccggggtctcgcggggcccttccggaaggatcgcggcccccgaaggtgggcgtcccgcggggctccagtctccaggacgttccgggaggctccgcgctctgggaggccggctgcgtggggtccccgcgctgcagccgcagaggccccccagggccgcggttcccggagcgggaaagtcccgcgcgggggcggtggcctcgggggcgggacggggcgggggcgggggcgcgggcggccgagccgaatcccctccaccgggacgccccgctgccgctcgggaagaggcgggccctgcgcgccctgcgctcgccatggcggtttgggcggcgacgtgagcggctccgcggaccccgagcggggccccggccgcgacctgagccgccgccgagcgcccggggccatgcgaccgacgctgctgtggtcgctgctgctgctgctcggagtcttcgccgccgccgccgcggccccgccagaccctctttcccagctgcccgctcctcagcacccgaagattcgcctgtacaacgcagagcaggtcctgagttgggagccagtggccctgagcaatagcacgaggcctgttgtctaccaagtgcagtttaaatacaccgacagtaaatggttcacggccgacatcatgtccataggggtgaattgtacacagatcacagcaacagagtgtgacttcactgccgccagtccctcagcaggcttcccaatggatttcaatgtcactctacgccttcgagctgagctgggagcactccattctgcctgggtgacaatgccttggtttcaacactatcggaatgtgactgtcgggcctccagaaaacattgaggtgaccccaggagaaggctccctcatcatcaggttctcctctccctttgacatcgctgatacctccacggcctttttttgttattatgtccattactgggaaaaaggaggaatccaacaggtcaaaggccctttcagaagcaactccatttcattggataacttaaaaccctccagagtgtactgtttacaagtccaggcacaactgctttggaacaaaagtaacatctttagagtcgggcatttaagcaacatatcttgctacgaaacaatggcagatgcctccactgagcttcagcaagtcatcctgatctccgtgggaacattttcgttgctgtcggtgctggcaggagcctgtttcttcctggtcctgaaatatagaggcctgattaaatactggtttcacactccaccaagcatcccattacagatagaagagtatttaaaagacccaactcagcccatcttagaggccttggacaaggacagctcaccaaaggatgacgtctgggactctgtgtccattatctcgtttccggaaaaggagcaagaagatgttctccaaacgctttgaaccaaagcatggctgtaggcaacaagattgttggcaacnaagaattgaagaatcatctgtaaccccagctactcgggaggctgaggcacgagaaccatttgaacctgggagacagaggttgcagtgagctgagattgcaccactacactccagcctgggtgacaagagcaaaactccatctgtggtcccagctgcttggaaaccggaggtaagaggattgcctgagctccagcatttgaaggtgcagtgagctgtggttgcaccactgcactccagcctaggcaacagagtgagatattgtctttaaaaaaaaaaaaaaaaattcatggcagagtcagaaatagaaaaaaacagccaccatttccagtcagtcttcagggaaaccttcaataaccctcacataagcattttacaagtctatttcttcttattttataaacataactgcatctttaattgggtgtacttgaataattgaaaactgaacagcaaatcaatttttatggttcattttctccaacaaacaacaatattaaactgtatgagaagtaatatttattgcaacaggttatgaggtggaaacaaataattagtcttacaatttgctagaagcatgacagagcttactaacattttgaagaaaaaacagcaaagaaagaaatcatcaaacaagatggtatcttgacaaaggcacagcgctccacaactgcttcatactctgtgcacaagaaatcctctcaagagagaggagaggagtgatgccaaatgggcttacattagacccgtggacactaccactggtattattcatacaaccaaggctctacaacacccctctggagaaaaagtgcaacacaaaatctgtgtaacaaaggaaagcaaaagtagcaataagggcccagaggaatacaaacagtgcaaatacagtactgcaaactcagtaaaaggagtttttgattggagtatgaactttcaagttgaagatatatttcacaggaatattcacccaaagcttgagagctagagcgaggagagacttgcagtcggtaactgagtagatgaaatgcataatttttcactaggtgataattccctttgggaagaagtgctttatctttaattattccactttttgttaaatggttcatgcttttaaactgcgattgtctcaaacttgcttgctattgaattgtgtaacatcagataatggcaagttgtcaaaagataaccccagtggataattgaagctgcttttacgagaagcatggtgctgagctgccttacacagtctttttacagtaaccataaaaaactgagtttatttgatcatgtattatcccttctcacataaagtcatattagaggaattctttttaaaagaagctttcaaactagtcctttgggcatttaaaaaatcattatataaaagtacacttcttcaatacataagaacaaatattttttctttaccaaaaaaacctcatttttaggccaaaataagttacaacttgctgaaaaccttttatggctcagtgctcattccagatatatgaagctatatttttttgtacatcttcagaaatcagagatactgagagtggtcttcttttttttgagagggagtttcactttctcccccaggctagagtganactccatctgtggtcccagctgcttggaaagcggaggtaagaggattgcttgagctccagcatttgaaggtgcagtgagctgtggttgcaccactgcactccagcattttgaagaaaaaacagcaaagaaagaaatcatcaaacaagatggtatcttgacaaaggcacagcgctccacaactgcttcatactctgtgcacaagaaatcctctcgagagaggagaggagtgatgccaaatgggcttacattagacccgtggacactaccactgggattat

SEQ ID NO: 366895 - DNA, 1993 bp, Homo sapiens
taaaggacttcctactcgtgcaccgccgccggctccagggcaaaccccacgccatttagaaatgctggaagtttctgtctctccctccccctgctcggaggccattccccccacccccagagccccacctcctccttcactgggccctttctaactccttccccttaaaacccttttcaaaatggggttgactggaggcggaggttgcagtgagccgagatcgccccactgcactccagcctggtgactccgtctcaaaaaaaaggggaggggggcgggggagagttgaaagcttaatatgtactttgggggctattaaagcaaacatttcgactaaaggggcgaatcctcgaattgtgcgatcaagcacccgagaggagagttggggggggtcaggaggggtgggggctccagggaacgcccgggggcctgggccggggtctcgcggggcccttccggaaggatcgcggcccccgaaggtgggcgtcccgcggggctccagtctccaggacgttccgggaggctccgcgctctgggaggccggctgcgtggggtccccgcgctgcagccgcagaggccccccagggccgcggttcccggagcgggaaagtcccgcgcgggggcggtggcctcgggggcgggacggggcgggggcgggggcgcgggcggccgagccgaatcccctccaccgggacgccccgctgccgctcgggaagaggcgggccctgcgcgccctgcgctcgccatggcggtttgggcggcgacgtgagcggctccgcggaccccgagcggggccccggccgcgacctgagccgccgccgagcgcccggggccatgcgaccgacgctgctgtggtcgctgctgctgctgctcggagtcttcgccgccgccgccgcggccccgccagaccctctttcccagctgcccgctcctcagcacccgaagattcgcctgtacaacgcagagcaggtcctgagttgggagccagtggccctgagcaatagcacgaggcctgttgtctaccaagtgcagtttaaatacaccgacagtaaatggttcacggccgacatcatgtccataggggtgaattgtacacagatcacagcaacagagtgtgacttcactgccgccagtccctcagcaggcttcccaatggatttcaatgtcactctacgccttcgagctgagctgggagcactccattctgcctgggtgacaatgccttggtttcaacactatcggaatgtgactgtcgggcctccagaaaacattgaggtgaccccaggagaaggctccctcatcatcaggttctcctctccctttgacatcgctgatacctccacggcctttttttgttattatgtccattactgggaaaaaggaggaatccaacaggtcaaaggccctttcagaagcaactccatttcattggataacttaaaaccctccagagtgtactgtttacaagtccaggcacaactgctttggaacaaaagtaacatctttagagtcgggcatttaagcaacatatcttgctacgaaacaatggcagatgcctccactgagcttcagcaagtcatcctgatctccgtgggaacattttcgttgctgtcggtgctggcaggagcctgtttcttcctggtcctgaaatatagaggcctgattaaatactggtttcacactccaccaagcatcccattacagatagaagagtatttaaaagacccaactcagcccatcttagaggccttggacaaggacagctcaccctggtcgtcgtcttgactttggcaaatgagccggagccccttgggcaggtcacacaacctgtcccagcgagggacaccgagtggcccttcatgtacatccatggtgtgctggcttaaaatgtaattaatcttgtaaatatactcctagtaatttaagattttgtttttaaactggaaataaaagattgtatagtgcatgttttttaaagtctaaaaaaaaaatt

SEQ ID NO: 366896 - DNA, 1409 bp, Homo sapiens
taaaggacttcctactcgtgcaccgccgccggctccagggcaaaccccacgccatttagaaatgctggaagtttctgtctctccctccccctgctcggaggccattccccccacccccagagccccacctcctccttcactgggccctttctaactccttccccttaaaacccttttcaaaatggggttgactggaggcggaggttgcagtgagccgagatcgccccactgcactccagcctggtgactccgtctcaaaaaaaaggggaggggggcgggggagagttgaaagcttaatatgtactttgggggctattaaagcaaacatttcgactaaaggggcgaatcctcgaattgtgcgatcaagcacccgagaggagagttggggggggtcaggaggggtgggggctccagggaacgcccgggggcctgggccggggtctcgcggggcccttccggaaggatcgcggcccccgaaggtgggcgtcccgcggggctccagtctccaggacgttccgggaggctccgcgctctgggaggccggctgcgtggggtccccgcgctgcagccgcagaggccccccagggccgcggttcccggagcgggaaagtcccgcgcgggggcggtggcctcgggggcgggacggggcgggggcgggggcgcgggcggccgagccgaatcccctccaccgggacgccccgctgccgctcgggaagaggcgggccctgcgcgccctgcgctcgccatggcggtttgggcggcgacgtgagcggctccgcggaccccgagcggggccccggccgcgacctgagccgccgccgagcgcccggggccatgcgaccgacgctgctgtggtcgctgctgctgctgctcggagtcttcgccgccgccgccgcggccccgccagaccctctttcccagctgcccgctcctcagcacccgaagattcgcctgtacaacgcagagcaggtcctgagttgggagccagtggccctgagcaatagcacgaggcctgttgtctaccaagtgcagtttaaatacaccgacagtaaatggttcacggccgacatcatgtccataggggtgaattgtacacagatcacagcaacagagtgtgacttcactgccgccagtccctcagcaggcttcccaatggatttcaatgtcactctacgccttcgagccctggtcgtcgtcttgactttggcaaatgagccggagccccttgggcaggtcacacaacctgtcccagcgagggacaccgagtggcccttcatgtacatccatggtgtgctggcttaaaatgtaattaatcttgtaaatatactcctagtaatttaagattttgtttttaaactggaaataaaagattgtatagtgcatgttttttaaagtctaaaaaaaaaatt

SEQ ID NO: 366897 - DNA, 476 bp, Homo sapiens
tgaagatacatggttaaaagttgaatcaaaagcaacagcagccacaataataacaagagcaacaacaaaacaaaagctgcaaacaaacctactttctttccttatgttactgtatgacatcattgctttgagtaaagaatacagtagtattaatttaaatgcttaaatttatatttatacaaatgttgatagcatggtcattgaaatagttttgcaagtcctcacaggttttcagtttaccatataaagagattgatctgtatgtgtaatttgtgctttaagtggtagttttaatagttactggacctcacagtttaatgggcatgtttataatgctacatcaattaccacattttctcatagttctgtatattgtgagaagaaaatgaaaaaagtgctgtttaactaagtacaggaatgtggagccaggaaatctcatgctctgatgccatttcttctcccagtgttctttgtaa

SEQ ID NO: 366898 - DNA, 1217 bp, Homo sapiens
ctgagaccgcctcctgacatatggaggaaagtcttattttgagtcctgggtgtcacccttttttcaggtatagtaaacttatcctccacagggcccaaggccctgtggctgagggcagataatgtaggtctcaccgtgagggtggtcgtttgaaaaagtgccctgaatgatttgtctgctctctccctagaatatgccctacagagataggtatattcagccacattttccattcagggtagcaaacagtatgccagatttggcttgcagatggggttttggcccacatattttttaaaatttcacataaaatattcattgaggagtccagatttttagcctctcttgtaaagttggactctggcagtgcagatccacattcccacatggcatcaaagttcccctttgaagagcacgccctttgcctttctccttcacttgtctggccctggtgggctgtgtagtctgccaccctcaggggattcgttttccagccaaaccttgctcggccactgttcttatctccatgcagcccaatggaactgaaaaatctggagtataggccagtgaaggtcagggggtgctttgaccattccaaggagctgtatatgatgccccggaccatggtggaccctgtccgggaggcccgggagggcggcctcatctcctcctcaactcagagtggggcctatgtggtcactcccttccactgcaccgacctgggagtcaccatcctggtaaatagagggttcgttcccaggaagaaagtgaatcctgaaacccggcagaaaggccagattgagggagaagtggacctcattgggatggtgaggctgacagaaaccaggcagccttttgtccctgagaacaatccagaaaggaaccactggcattatcgagacctggaagctatggccagaatcacaggcgcagagcccatcttcattgatgccaacttccagagcacagtccctggaggacccattggagggcaaaccagagttactctgaggaacgagcatctgcagtacatcgtgacctggtatggactctctgcagctacatcctacctgtggtttaagaaattcctacgtgggacacctggtgtgtgacagatcagctgctgaagccctgtccctggataatgcagtatttcaagactgcctttatgctggatcatgtgctactggtataaagttctggccttctaccttaaa

SEQ ID NO: 366899 - DNA, 355 bp, Homo sapiens
gtctgtcttggaacgggctgctccaggtctgtgttcgagggcttctggctccatgtcagtgttgtgaaactctccaggggtggcctggaggccaagcagatgtggcagttctgcagcagaagcatctgccactgcctttggcttggggacatggcaggtgaccggcatctggtgtgcgtaactctgggcccttgaccttgctgccatctgcttggccttatgctctgtcactgtaggtccagcgtcggaagtggaagctgaacctgattgcagagttggagtccagagttctggctgagcctgtccctctgccagccgagtgagtgcatggctgcccccctgggcctgttttact

SEQ ID NO: 366900 - DNA, 769 bp, Homo sapiens
gcgaaccttgcgggcgtccgtctggagccgcaggctcgggtgctcccgcagaaacgcccgcacgtcgcccggcaactcgctcatggccgacgcgcccgcggagcagcccggcggaagccgctcgcagaacctggagccgggggcggggctctgggcgggactcagcggcgccccggatgcagatgcctcctgcgtcccggaagcgcccgcggggccgggtgcgatggcggcggtggctgcgttgcagctggggctgcgggcggcggggctgggacgggccccggccagcgccgcctggaggagcgtcctcagggtctccccgcgcccaggtgagggctgcaggccgggctgtgatccaggcgcctgggcagagccacctgctgtctgccctgcactttgaagggttgtcgtggggattgaaatgaaccaactgccggctgagcggaggctccctgggagtgacaagttccgtattaaaatgctttcagtggaattgtggtcgtgtgccgggcatgtagcgagcgctttgtcctcacaacgcgagaggtagctccttggtcgttcccctgttacagagaaggctcgagagttacttccgaacgtcccatccagctaatgggtggccagcccaggctgaaagcccagggctctgaaagtaaagcgtatctaaccaccgcggcttacgtgttcctctcagtgtgcagcacagggctgttttgccgtgtgtagagtgctgtgcaagcctgccccaggcctgcctttttataaa

SEQ ID NO: 366901 - DNA, 957 bp, Homo sapiens
tcggtgaacgggtatggtgaacatatttaattacagacattaaatagctggggaggggtggcctggaggccaagcagatgtggcagttctgcagcagaagcatctgccacaaaagcggaagatgactcctttcttcagtgggtcctgctcctcatccctgtgactgcctttggcttggggacatggcaggtccagcgtcggaagtggaagctgaacctgattgcagagttggagtccagagttctggctgagcctgtccctctgccagccgacccaatggaactgaaaaatctggagtataggccagtgaaggtcagggggtgctttgaccattccaaggagctgtatatgatgccccggaccatggtggaccctgtccgggaggcccgggagggcggcctcatctcctcctcaactcagagtggggcctatgtggtcactcccttccactgcaccgacctgggagtcaccatcctggtaaatagagggttcgttcccaggaagaaagtgaatcctgaaacccggcagaaaggccagattgagggagaagtggacctcattgggatggtgaggctgacagaaaccaggcagccttttgtccctgagaacaatccagaaaggaaccactggcattatcgagacctggaagctatggccagaatcacaggcgcagagcccatcttcattgatgccaacttccagagcacagtccctggaggacccattggagggcaaaccagagttactctgaggaacgagcatctgcagtacatcgtgacctggtatggactctctgcagctacatcctacctgtggtttaagaaattcctacgtgggacacctggtgtgtgacagatcagctgctgaagccctgtccctggataatgcagtatttcaagactgcctttatgctggatcatgtgctactggtataaagttctggccttctaccttaaa

SEQ ID NO: 366902 - DNA, 1753 bp, Homo sapiens
gcgaaccttgcgggcgtccgtctggagccgcaggctcgggtgctcccgcagaaacgcccgcacgtcgcccggcaactcgctcatggccgacgcgcccgcggagcagcccggcggaagccgctcgcagaacctggagccgggggcggggctctgggcgggactcagcggcgccccggatgcagatgcctcctgcgtcccggaagcgcccgcggggccgggtgcgatggcggcggtggctgcgttgcagctggggctgcgggcggcggggctgggacgggccccggccagcgccgcctggaggagcgtcctcagggtctccccgcgcccaggggtggcctggaggccaagcagatgtggcagttctgcagcagaagcatctgccacaaaagcggaagatgactcctttcttcagtgggtcctgctcctcatccctgtgactgcctttggcttggggacatggcaggtccagcgtcggaagtggaagctgaacctgattgcagagttggagtccagagttctggctgagcctgtccctctgccagccgacccaatggaactgaaaaatctggagtataggccagtgaaggtcagggggtgctttgaccattccaaggagctgtatatgatgccccggaccatggtggaccctgtccgggaggcccgggagggcggcctcatctcctcctcaactcagagtggggcctatgtggtcactcccttccactgcaccgacctgggagtcaccatcctggtaaatagagggttcgttcccaggaagaaagtgaatcctgaaacccggcagaaaggccagattgagggagaagtggacctcattgggatggtgaggctgacagaaaccaggcagccttttgtccctgagaacaatccagaaaggaaccactggcattatcgagacctggaagctatggccagaatcacaggcgcagagcccatcttcattgatgccaacttccagagcacagtccctggaggacccattggagggcaaaccagagttactctgaggaacgagcatctgcagtacatcgtgacctggtatggactctctgcagctacatcctacctgtggtttaagaaattcctacgtgggacacctggtgtgtgacagatcagctgctgaagccctgtccctggataatgcagtatttcaagactgcctttatgctggatcatgtgctactggtataaagttctggccttctaccttaaaaaaaaaaaaaaaaaaaaaaaaaaaaaaaaaaaaaaaaaaaacaaaaaaaaaaaaaaaaaaaaaaaaacacaaaaaaacaaaaaaaaaagaacacaggggcgcggcgaccgcaaaatcactacacggaaggaggggagccacaaaagagaacacacagcccacgcgctatagagcagaaccgcgaggcccacaaaaaagaggacacataacacgaagaagcagagcagagactacacaacaacaacacacgcgaggacgaaggaaaaaccaagacgagtaggcgagacgcacagagacgaaagaaacacaacacacctgtgggggagcggcaaaaataaatgagatgaggaccaaaacaccacgtggagtaagagtatcactacccgcactgagcagaaataaaaacacacactgacgcctgcgcgtagccagtggtggtagacccaagcagatatctatttcgtagcacggcagaactatgacgtatcagaaggagaatatctcttacgaaaagtattacac

SEQ ID NO: 366903 - DNA, 362 bp, Homo sapiens
gtacgttgtggaccagcccatctcggaacaagtagcttttgtgaatactgtccttcctcctaaccctcattgcccagtcactactgtggcttatgttctcacatgtgtatatggcgggtgggaggaggcagcaactcagcaaagaacctaggcaagtactgagcggacaagggcggggatggtcacccaacgtaaaggccatacaggacttccaactggccacgcaaaaatgacagccactaggaagtggtgcagaggctggcaggccagtagggggtggacttgagtctgctgtctccacagagagcacagtccctggaggacccattggagggcaaaccagagttactctgaggaacgag

SEQ ID NO: 366904 - DNA, 1231 bp, Homo sapiens
gcgaaccttgcgggcgtccgtctggagccgcaggctcgggtgctcccgcagaaacgcccgcacgtcgcccggcaactcgctcatggccgacgcgcccgcggagcagcccggcggaagccgctcgcagaacctggagccgggggcggggctctgggcgggactcagcggcgccccggatgcagatgcctcctgcgtcccggaagcgcccgcggggccgggtgcgatggcggcggtggctgcgttgcagctggggctgcgggcggcggggctgggacgggccccggccagcgccgcctggaggagcgtcctcagggtctccccgcgcccaggggtggcctggaggccaagcagatgtggcagttctgcagcagaagcatctgccacaaaagcggaagatgactcctttcttcagtgggtcctgctcctcatccctgtgactgcctttggcttggggacatggcaggtccagcgtcggaagtggaagctgaacctgattgcagagttggagtccagagttctggctgagcctgtccctctgccagccgacccaatggaactgaaaaatctggagtataggccagtgaaggtcagggggtgctttgaccattccaaggagctgtatatgatgccccggaccatggtggaccctgtccgggaggcccgggagggcggcctcatctcctcctcaactcagagtggggcctatgtggtcactcccttccactgcaccgacctgggagtcaccatcctggtaaatagagggttcgttcccaggaagaaagtgaatcctgaaacccggcagaaaggccagattgagggagaagtggacctcattgggatggtgaggctgacagaaaccaggcagccttttgtccctgagaacaatccagaaaggaaccactggcattatcgagacctggaagctatggccagaatcacaggcgcagagcccatcttcattgatgccaacttccagagcacagtccctggaggacccattggagggcaaaccagagttactctgaggaacgagcatctgcagtacatcgtgacctggtatggactctctgcagctacatcctacctgtggtttaagaaattcctacgtgggacacctggtgtgtgacagatcagctgctgaagccctgtccctggataatgcagtatttcaagactgcctttatgctggatcatgtgctactggtataaagttctggccttctaccttaaa

SEQ ID NO: 366905 - DNA, 1179 bp, Homo sapiens
gcgaaccttgcgggcgtccgtctggagccgcaggctcgggtgctcccgcagaaacgcccgcacgtcgcccggcaactcgctcatggccgacgcgcccgcggagcagcccggcggaagccgctcgcagaacctggagccgggggcggggctctgggcgggactcagcggcgccccggatgcagatgcctcctgcgtcccggaagcgcccgcggggccgggtgcgatggcggcggtggctgcgttgcagctggggctgcgggcggcggggctgggacgggggtggcctggaggccaagcagatgtggcagttctgcagcagaagcatctgccacaaaagcggaagatgactcctttcttcagtgggtcctgctcctcatccctgtgactgcctttggcttggggacatggcaggtccagcgtcggaagtggaagctgaacctgattgcagagttggagtccagagttctggctgagcctgtccctctgccagccgacccaatggaactgaaaaatctggagtataggccagtgaaggtcagggggtgctttgaccattccaaggagctgtatatgatgccccggaccatggtggaccctgtccgggaggcccgggagggcggcctcatctcctcctcaactcagagtggggcctatgtggtcactcccttccactgcaccgacctgggagtcaccatcctggtaaatagagggttcgttcccaggaagaaagtgaatcctgaaacccggcagaaaggccagattgagggagaagtggacctcattgggatggtgaggctgacagaaaccaggcagccttttgtccctgagaacaatccagaaaggaaccactggcattatcgagacctggaagctatggccagaatcacaggcgcagagcccatcttcattgatgccaacttccagagcacagtccctggaggacccattggagggcaaaccagagttactctgaggaacgagcatctgcagtacatcgtgacctggtatggactctctgcagctacatcctacctgtggtttaagaaattcctacgtgggacacctggtgtgtgacagatcagctgctgaagccctgtccctggataatgcagtatttcaagactgcctttatgctggatcatgtgctactggtataaagttctggccttctaccttaaa

SEQ ID NO: 366906 - DNA, 1257 bp, Homo sapiens
gcgaaccttgcgggcgtccgtctggagccgcaggctcgggtgctcccgcagaaacgcccgcacgtcgcccggcaactcgctcatggccgacgcgcccgcggagcagcccggcggaagccgctcgcagaacctggagccgggggcggggctctgggcgggactcagcggcgccccggatgcagatgcctcctgcgtcccggaagcgcccgcggggccgggtgcgatggcggcggtggctgcgttgcagctggggctgcgggcggcggggctgggacgggccccggccagcgccgcctggaggagcgtcctcagggtctccccgcgcccaggggtggcctggaggccaagcagatgtggcagttctgcagcagaagcatctgccacaaaagcggaagatgactcctttcttcagtgggtcctgctcctcatccctgtgactgcctttggcttggggacatggcaggtccagcgtcggaagtggaagctgaacctgattgcagagttggagtccagagttctggctgagcctgtccctctgccagccgacccaatggaactgaaaaatctggagtataggccagtgaaggtcagggggtgctttgaccattccaaggagctgtatatgatgccccggaccatggtggaccctgtccgggaggcccgggagggcggcctcatctcctcctcaactcagagtggggcctatgtggtcactcccttccactgcaccgacctgggagtcaccatcctggtaaatagagggttcgttcccaggaagaaagtgaatcctgaaacccggcagaaaggccagattgagggagaagtggacctcattgggatggtgaggctgacagaaaccaggcagccttttgtccctgagaacaatccagaaaggaaccactggcattatcgagacctggaagctatggccagaatcacaggcgcagagcccatcttcattgatgccaacttccagagcacagtccctggaggacccattggagggcaaaccagagttactctgaggaacgagcatctgcagtacatcgtgacctggtatggactctctgcagctacatcctacctgtggtttaagaaattcctacgtgggacacctggtgtgtgacagatcagctgctgaagccctgtccctggataatgcagtatttcaagactgcctttatgctggatcatgtgctactggtataaagttctggccttctaccttaaatgagctcatgactggttcatcataaa

SEQ ID NO: 366907 - DNA, 2878 bp, Homo sapiens
atcttttttttttttttttttttttgagacagcatttcactcttgttgcccaggctggaatgcaatggcactatctctgctcaccgcaacctccgcctgtcgggttcaagcgattctcgtgcctcagcctctcaagtagctgagattacaggcatgcaccaccatgcccggctagttttgtatttttaatagagacggggtttctccatgttggtcagtctggtctcgaactcctgaccttaggtgatccgcccgcctcggcatcccaaagtgctgggattacaggcgtgagccaccatgcccggcccaactccaagatctaaacaaaaaagactgggttgaaagggagtttttaatgtttactgtttgctttacatccattttcttgttttgttaatacttgctttacttaagcttttgggtcaaatgtcctcgttaaaatggctttctctagcgactttatgttttacgtttctgtttgtaactgacatttgaccttcttttaacacggtattacttgcttccttataccggtttccaaggtgaagccatttgcagggtcgctgggtttccccctccccccgaaagtcttgcgcgacccggggtgggccggatagtgtgcagttttttgagccttgggctggggacctccaggaagctgaagcggaaattgcctaggcccctggggcattggaggtcctaccgcagctcctagtaggtggtgggggcgcagcggctgtccccactcagtcctggtggggtcgcacgtaacggtcctgagctatgcataagccgtttgaccacgcatggagaattttaccacccagagacacgcgagtggccctgtgcaagtttcaactgcgcggggggcggggaattccgcagacaggattctagaatttatgtcttgtgtggtaacatttcagccggtgggtggcggggattaggcgtgaagcggttcagcaggcagaggttctcggacgccctccggcgaagccacctgttgatgcttttgactttctgtccttgttcctcgtcccatctggagcatttccaattctggttttgcggagcagcaggtctgagcttgtccggcgagggtgggagttggtcccggcggagatccagtgggaagagccggcggctgcccgggcaactcccccactggaaaggattctgaaagaaatgaagtcagccctcagaaatgaagttgactgcctgctggctttctgttgactggcccggagctgtactgcaagacccttgtgagcttccctagtctaagagtaggatgtctgctgaagtcatccatcaggttgaagaagcacttgatacagatgagaaggagatgctgctctttttgtgccgggatgttgctatagatgtggttccacctaatgtcagggaccttctggatattttacgggaaagaggtaagctgtctgtcggggacttggctgaactgctctacagagtgaggcgatttgacctgctcaaacgtatcttgaagatggacagaaaagctgtggagacccacctgctcaggaaccctcaccttgtttcggactatagagtgctgatggcagagattggtgaggatttggataaatctgatgtgtcctcattaattttcctcatgaaggattacatgggccgaggcaagataagcaaggagaagagtttcttggaccttgtggttgagttggagaaactaaatctggttgccccagatcaactggatttattagaaaaatgcctaaagaacatccacagaatagacctgaagacaaaaatccagaagtacaagcagtctgttcaaggagcagggacaagttacaggaatgttctccaagcagcaatccaaaagagtctcaaggatccttcaaataacttcaggctccataatgggagaagtaaagaacaaagacttaaggaacagcttggcgctcaacaagaaccagtgaagaaatccattcaggaatcagaagcttttttgcctcagagcatacctgaagagagatacaagatgaagagcaagcccctaggaatctgcctgataatcgattgcattggcaatgagacagagcttcttcgagacaccttcacttccctgggctatgaagtccagaaattcttgcatctcagtatgcatggtatatcccagattcttggccaatttgcctgtatgcccgagcaccgagactacgacagctttgtgtgtgtcctggtgagccgaggaggctcccagagtgtgtatggtgtggatcagactcactcagggctccccctgcatcacatcaggaggatgttcatgggagattcatgcccttatctagcagggaagccaaagatgttttttattcagaactatgtggtgtcagagggccagctggaggacagcagcctcttggaggtggatgggccagcgatgaagaatgtggaattcaaggctcagaagcgagggctgtgcacagttcaccgagaagctgacttcttctggagcctgtgtactgcggacatgtccctgctggagcagtctcacagctcaccatccctgtacctgcagtgcctctcccagaaactgagacaagaaagaaaacgcccactcctggatcttcacattgaactcaatggctacatgtatgattggaacagcagagtttctgccaaggagaaatattatgtctggctgcagcacactctgagaaagaaacttatcctctcctacacataagaaaccaaaaggctgggcgtagtggctcacacctgtaatcccagcactttgggaggccaaggagggcagatcacttcaggtcaggagttcgagaccagcctggccaacatggtaaacgctgtccctagtaaaaatacaaaaatt

SEQ ID NO: 366908 - DNA, 1432 bp, Homo sapiens
atcttttttttttttttttttttttgagacagcatttcactcttgttgcccaggctggaatgcaatggcactatctctgctcaccgcaacctccgcctgtcgggttcaagcgattctcgtgcctcagcctctcaagtagctgagattacaggcatgcaccaccatgcccggctagttttgtatttttaatagagacggggtttctccatgttggtcagtctggtctcgaactcctgaccttaggtgatccgcccgcctcggcatcccaaagtgctgggattacaggcgtgagccaccatgcccggcccaactccaagatctaaacaaaaaagactgggttgaaagggagtttttaatgtttactgtttgctttacatccattttcttgttttgttaatacttgctttacttaagcttttgggtcaaatgtcctcgttaaaatggctttctctagcgactttatgttttacgtttctgtttgtaactgacatttgaccttcttttaacacggtattacttgcttccttataccggtttccaaggtgaagccatttgcagggtcgctgggtttccccctccccccgaaagtcttgcgcgacccggggtgggccggatagtgtgcagttttttgagccttgggctggggacctccaggaagctgaagcggaaattgcctaggcccctggggcattggaggtcctaccgcagctcctagtaggtggtgggggcgcagcggctgtccccactcagtcctggtggggtcgcacgtaacggtcctgagctatgcataagccgtttgaccacgcatggagaattttaccacccagagacacgcgagtggccctgtgcaagtttcaactgcgcggggggcggggaattccgcagacaggattctagaatttatgtcttgtgtggtaacatttcagccggtgggtggcggggattaggcgtgaagcggttcagcaggcagaggttctcggacgccctccggcgaagccacctgttgatgcttttgactttctgtccttgttcctcgtcccatctggagcatttccaattctggttttgcggagcagcaggtctgagcttgtccggcgagggtgggagttggtcccggcggagatccagtgggaagagccggcggctgcccgggcgtgagtagaccgagaatcctgcccgatccccgcccctgggctggtgtcgccctgggctcctgggacgtcggggcactgtcccccgatactggcagaaaaggattgagtcctcgcttttggccctaggtctccttgagcctccagaggactcacaacactccggggcatgttgctctttcaaataccaggaatggactctggggaatggggcacccttgaagtctgattatttcttccctgtagagccccaggggctaattaaactcgtgtttatggaa

SEQ ID NO: 366909 - DNA, 1458 bp, Homo sapiens
gcatggtcaggaactccgggaagtcaatggtcccgttcccatctgcatccacctcattgatcatatcctgcagctctgcttcgcattcagcatgagagaaagatggaggccagaagactacaccagtctagtctttccatgttttgcctgcttttattctggcagtgctggcagctgattagatggtgcccacccagattgaggatggtctgcctttcccagtccactgactcaaatgttaaatctcctttggcagcaccctcacagatgtacccgggaacactttgcatccttctattcaatcaagttgatactcagtattaaccatcacagtccatttgggcaactataccaaattaccatagaccaggtgacttaaacagcagttatttctcacagttccggaggctgggaaatccaacatctaagtggtagcatatctggtgtctggtaaggcatgcttccagatcttaccagatgtcagtcttttgatgttctcacatggcagaaaaagaggatgcaaactctcaagtatatctttaagggcacaaattccattcatgagggctctaccctcatcacctaattacctcccaaaggccccaccttctgatactgtcactttggggatactgtctcccctttgaattctggggggaatacaaacattcagtttgtaacaatagccttatgatttagaggttacttgttcattcacctagacctcaaattgcattttacagctagtcaagtatatctttctctgatttgatagtgtgacctaaaaggggaccattgtttgaaatatcattagagttgcttattttattattattattattattattattattattattattattgagacagagtttcattctgctgcccaggctggagtgcagtggcatcatcttggctcattgcaacctctgccttctgggttcaggcgattctcctgcctcagcctcccgagtagctgggattacaggctcctgccaccacacccggctaatttttgtatttttagtggagacagggtttccaccatgttggccagcgtggtcttgaactcctgacctcaggtgattcaccagcctcggcctcccaaagtgctgggattacaggtgtgagccactgcacctggcctattattatttttaaattttttttttttaattgatcattcttgggtgtttctcacagagggtgatttggcagggtcacaggacaatagtggagggaaggtcagcagataaacaagtgaacaaaggtctctggttttcctaggcagaggaccctgcggccttccgcagtgtttgtgtccctgggtacttgagattagggagtggtgatgactcttaaggagcatgctgccttcaagcatctgtttaacaaagcacatcttgcactgcccttaatccatttaaccctgagtggacacagcacatgtttcag

SEQ ID NO: 366910 - DNA, 1030 bp, Homo sapiens
agtttgtaacaatagccttatgatttagaggttacttgttcattcacctagacctcaaattgcattttacagctagtcaagtatatctttctctgatttgatagtgtgacctaaaaggggaccattgtttgaaatatcattagagttgcttattattattattattattattattattattattattattgagacagagtcttgttctgtcgccaggctggagtgcagtggtgcaatcttggctcactgcaacctctccctcccaagttcaagcgattcttctgcctcagcctcctgagtagctgggattacaggcatgcgccaccacgcccagctaatttttcttttttctttttatatttttaatttatttttaagacggagtttcccttttgttgcccaggttggagtgcaatggcgcaatctcagctcaccgcaatctccacctcccaggttcaagcgattctcctgcctcagcctcctgagtaactgggattacaggcatgtgccaccatgcccagctaattttgtatttttagtagagacaaggtttcaccatgtcggccaggctggtctcgatctcctgaccttgtgatctgcccacctcagcctcccaaagtgctacgattacaggcgtcagccatcatgcctggcttattctctccattttcaaggtgaggaagctgagcagtgaactacactcctaccttctctagtactgattgagctgggattcaaaagctggactccaaaacctatgcttttaactactttgcctcaatataatttccatgaaggtgagggagtttatctatctcctactatgggtctccagtacctggaagaatacctgctatgtaggtgttcaataaataattgttgggtgaatgaatgaaggaataagctctcccagtgtcagtgtgtttctaaaagccattcctttttatctttagagtttagcagactctcttctacctatcttcccttctctcctcaaaaaaccagacttttatccaaaaagcatgcaagt

SEQ ID NO: 366911 - DNA, 709 bp, Homo sapiens
ggacttagctctccttcagctttgtaaatggtttctctctctcatcccccagaagaaccagtgaagaaatccattcaggaatcagaagcttttttgcctcagagcatacctgaagagagatacaagatgaagagcaagcccctaggaatctgcctgataatcgattgcattggcaatgagacaggtaggtgtggaagctgcagattaactggtgcccccagattgagatcatggcacaggcaagctgtattcattggagtgatcagcaccaactgccgtgacaaaccagttcaagaatctgtgcttcatcctgggtgcggtggctcatgcctggaattccagcactttgtgaggctgagatgggaggatcacttgagcccagttaaaaattagctggtgtgggctcgggcacggtggcttacacctgtaatcccagcactttgggaggcggaggcgggcggatcatgaggtcaggagttcaagaccagcctggccaatatggtgaaaccccgtctctactaaaaatacaaaaattagctgggcatggtggtgggttcctgtagtcccagctacttgggaggctgaggcagaagaattgcttgaacctgggaggcagagcttgcagtgagccgagatcgcaccaccgcactgtagcctgggtgacagagcaagattctgtctcaaaaaaaaaaaaaattagctggtgtgg

SEQ ID NO: 366912 - DNA, 348 bp, Homo sapiens
  misc_feature (326)..(326): n is a, c, g, or t
  misc_feature (335)..(335): n is a, c, g, or t
ttttttgagatagggtcttgctctgtcgcccagcctggagtgcagtggtacagatctcggccttccaggttaaagcgatactccgccgagcgctgagcatacctgaagagagatacaagatgaagagcaagcccctaggaatctgcctgataatcgattgcattggcaatgagacaggttggagtgcaatggcgcaatctcagctcactgaaacctctgcctcccaggttcaagcgattctcctgtctcagcctcccaagtagctgggaatacaggtgcacaccactatgcccagctaatttttatatttttagtagagacagtcncgctgtatnctaagcggggtcg

SEQ ID NO: 366913 - DNA, 3808 bp, Homo sapiens
ggacgtcgaggcattacaatcgcgaaaccaagccatagcatgaaacagcgagcttgcagcctcaccgacgagtctcaactaaaagggactcccggagctaggggtggggactcggcctcacacagtgagtgccggctattggacttttgtccagtgacagctgagacaacaaggaccacgggaggaggtgtaggagagaagcgccgcgaacagcgatcgcccagcaccaagtccgcttccaggctttcggtttctttgcctccatcttgggtgcgccttcccggcgtctaggggagcgaaggctgaggtggcagcggcaggagagtccggccgcgacaggacgaactcccccactggaaaggattctgaaagaaatgaagtcagccctcagaaatgaagttgactgcctgctggctttctgttgactggcccggagctgtactgcaagacccttgtgagcttccctagtctaagagtaggatgtctgctgaagtcatccatcaggttgaagaagcacttgatacagatgagaaggagatgctgctctttttgtgccgggatgttgctatagatgtggttccacctaatgtcagggaccttctggatattttacgggaaagaggtaagctgtctgtcggggacttggctgaactgctctacagagtgaggcgatttgacctgctcaaacgtatcttgaagatggacagaaaagctgtggagacccacctgctcaggaaccctcaccttgtttcggactatagagtgctgatggcagagattggtgaggatttggataaatctgatgtgtcctcattaattttcctcatgaaggattacatgggccgaggcaagataagcaaggagaagagtttcttggaccttgtggttgagttggagaaactaaatctggttgccccagatcaactggatttattagaaaaatgcctaaagaacatccacagaatagacctgaagacaaaaatccagaagtacaagcagtctgttcaaggagcagggacaagttacaggaatgttctccaagcagcaatccaaaagagtctcaaggatccttcaaataacttcaggctccataatgggagaagtaaagaacaaagacttaaggaacagcttggcgctcaacaagaaccagtgaagaaatccattcaggaatcagaagcttttttgcctcagagcatacctgaagagagatacaagatgaagagcaagcccctaggaatctgcctgataatcgattgcattggcaatgagacagagcttcttcgagacaccttcacttccctgggctatgaagtccagaaattcttgcatctcagtatgcatggtatatcccagattcttggccaatttgcctgtatgcccgagcaccgagactacgacagctttgtgtgtgtcctggtgagccgaggaggctcccagagtgtgtatggtgtggatcagactcactcagggctccccctgcatcacatcaggaggatgttcatgggagattcatgcccttatctagcagggaagccaaagatgttttttattcagaactatgtggtgtcagagggccagctggaggacagcagcctcttggaggtggatgggccagcgatgaagaatgtggaattcaaggctcagaagcgagggctgtgcacagttcaccgagaagctgacttcttctggagcctgtgtactgcggacatgtccctgctggagcagtctcacagctcaccatccctgtacctgcagtgcctctcccagaaactgagacaagaaagaaaacgcccactcctggatcttcacattgaactcaatggctacatgtatgattggaacagcagagtttctgccaaggagaaatattatgtctggctgcagcacactctgagaaagaaacttatcctctcctacacataagaaaccaaaaggctgggcgtagtggctcacacctgtaatcccagcactttgggaggccaaggagggcagatcacttcaggtcaggagttcgagaccagcctggccaacatggtaaacgctgtccctagtaaaaatacaaaaattagctgggtgtgggtgtgggtacctgtattcccagttacttgggaggctgaggtgggaggatcttttgaacccaggagttcagggtcatagcatgctgtgattgtgcctacgaatagccactgcataccaacctgggcaatatagcaagatcccatctctttaaaaaaaaaaaaaaaggacaggaactatcttactcaatgtattagtcatgtttctctagagggacagaactaataggatacatgtatataaaaaggggagtttattaaggagtattgactcacatgatcacagggttaggtcccacaataggtcatctgcaagcaaggaagccaattcaagtcccaaagctgaagaacttggagtccaatgtttgagggcaggaagcattcagcatgagagaaagatggaggccagaagactacaccagtctagtctttccatgttttgcctgcttttattctggcagtgctggcagctgattagatggtgcccacccagattgaggatggtctgcctttcccagtccactgactcaaatgttaaatctcctttggcagcaccctcacagatgtacccgggaacactttgcatccttctattcaatcaagttgatactcagtattaaccatcacagtccatttgggcaactataccaaattaccatagaccaggtgacttaaacagcagttatttctcacagttccggaggctgggaaatccaacatctaagtggtagcatatctggtgtctggtaaggcatgcttccagatcttaccagatgtcagtcttttgatgttctcacatggcagaaaaagaggatgcaaactctcaagtatatctttaagggcacaaattccattcatgagggctctaccctcatcacctaattacctcccaaaggccccaccttctgatactgtcactttggggatactgtctcccctttgaattctggggggaatacaaacattcagtttgtaacaatagccttatgatttagaggttacttgttcattcacctagacctcaaattgcattttacactacttgggaggctgaagtgagtggatcccctgagcccagagaggtcaaggttgtgatgagctgtgatcacaccactgcacttcagcatgggagacagagtgagaccctgtttcagaaaaaataaataaataaaaccaccagcaccacaaacaacaacaaaaagttattttgtacttgttttgagcacaggactcctgagggtatctttgcatttaatattacataggggtgccagtgggaagtaatgtgtatgcttggcctcatgagctaaaaccctgtgttaattatgacagaaggaaagtgtgtgagagggatcttaactacctagcagctctagctgccatcttgaaccatgaagatacgggccacacgtaggggtagctgggtagtgagcagcaagaagccttgttggatgagggcacgaaggagcagaatcactggaatcactgtgtcagccctaattacctacctctggacttttatgtgaggggaaaaaaaattgacagtttatatttatctcaacctagttaacccaagtgatgcattgttatgagattaaaatgtttggaggccgggtgcgatctcagctcacaatcactagtgaattcgcgaggccaaggcgggcggatcacgaggtcaggagatcaagaccatcctggctaacatgtaaaaccccgtctctactaaaaataca

SEQ ID NO: 366914 - DNA, 3482 bp, Homo sapiens
ggacgtcgaggcattacaatcgcgaaaccaagccatagcatgaaacagcgagcttgcagcctcaccgacgagtctcaactaaaagggactcccggagctaggggtggggactcggcctcacacagtgagtgccggctattggacttttgtccagtgacagctgagacaacaaggaccacgggaggaggtgtaggagagaagcgccgcgaacagcgatcgcccagcaccaagtccgcttccaggctttcggtttctttgcctccatcttgggtgcgccttcccggcgtctaggggagcgaaggctgaggtggcagcggcaggagagtccggccgcgacaggacgaactcccccactggaaaggattctgaaagaaatgaagtcagccctcagaaatgaagttgactgcctgctggctttctgttgactggcccggagctgtactgcaagacccttgtgagcttccctagtctaagagtaggatgtctgctgaagtcatccatcaggttgaagaagcacttgatacagatgagaaggagatgctgctctttttgtgccgggatgttgctatagatgtggttccacctaatgtcagggaccttctggatattttacgggaaagaggtaagctgtctgtcggggacttggctgaactgctctacagagtgaggcgatttgacctgctcaaacgtatcttgaagatggacagaaaagctgtggagacccacctgctcaggaaccctcaccttgtttcggactatagagtgctgatggcagagattggtgaggatttggataaatctgatgtgtcctcattaattttcctcatgaaggattacatgggccgaggcaagataagcaaggagaagagtttcttggaccttgtggttgagttggagaaactaaatctggttgccccagatcaactggatttattagaaaaatgcctaaagaacatccacagaatagacctgaagacaaaaatccagaagtacaagcagtctgttcaaggagcagggacaagttacaggaatgttctccaagcagcaatccaaaagagtctcaaggatccttcaaataacttcaggctccataatgggagaagtaaagaacaaagacttaaggaacagcttggcgctcaacaagaaccagtgaagaaatccattcaggaatcagaagcttttttgcctcagagcatacctgaagagagatacaagatgaagagcaagcccctaggaatctgcctgataatcgattgcattggcaatgagacagagcttcttcgagacaccttcacttccctgggctatgaagtccagaaattcttgcatctcagtatgcatggtatatcccagattcttggccaatttgcctgtatgcccgagcaccgagactacgacagctttgtgtgtgtcctggtgagccgaggaggctcccagagtgtgtatggtgtggatcagactcactcagggctccccctgcatcacatcaggaggatgttcatgggagattcatgcccttatctagcagggaagccaaagatgttttttattcagaactatgtggtgtcagagggccagctggaggacagcagcctcttggaggtggatgggccagcgatgaagaatgtggaattcaaggctcagaagcgagggctgtgcacagttcaccgagaagctgacttcttctggagcctgtgtactgcggacatgtccctgctggagcagtctcacagctcaccatccctgtacctgcagtgcctctcccagaaactgagacaagaaagaaaacgcccactcctggatcttcacattgaactcaatggctacatgtatgattggaacagcagagtttctgccaaggagaaatattatgtctggctgcagcacactctgagaaagaaacttatcctctcctacacataagaaaccaaaaggctgggcgtagtggctcacacctgtaatcccagcactttgggaggccaaggagggcagatcacttcaggtcaggagttcgagaccagcctggccaacatggtaaacgctgtccctagtaaaaatacaaaaattagctgggtgtgggtgtgggtacctgtattcccagttacttgggaggctgaggtgggaggatcttttgaacccaggagttcagggtcatagcatgctgtgattgtgcctacgaatagccactgcataccaacctgggcaatatagcaagatcccatctctttaaaaaaaaaaaaaaaggacaggaactatcttactcaatgtattagtcatgtttctctagagggacagaactaataggatacatgtatataaaaaggggagtttattaaggagtattgactcacatgatcacagggttaggtcccacaataggtcatctgcaagcaaggaagccaattcaagtcccaaagctgaagaacttggagtccaatgtttgagggcaggaagcattcagcatgagagaaagatggaggccagaagactacaccagtctagtctttccatgttttgcctgcttttattctggcagtgctggcagctgattagatggtgcccacccagattgaggatggtctgcctttcccagtccactgactcaaatgttaaatctcctttggcagcaccctcacagatgtacccgggaacactttgcatccttctattcaatcaagttgatactcagtattaaccatcacagtccatttgggcaactataccaaattaccatagaccaggtgacttaaacagcagttatttctcacagttccggaggctgggaaatccaacatctaagtggtagcatatctggtgtctggtaaggcatgcttccagatcttaccagatgtcagtcttttgatgttctcacatggcagaaaaagaggatgcaaactctcaagtatatctttaagggcacaaattccattcatgagggctctaccctcatcacctaattacctcccaaaggccccaccttctgatactgtcactttggggatactgtctcccctttgaattctggggggaatacaaacattcagtttgtaacaatagccttatgatttagaggttacttgttcattcacctagacctcaaattgcattttacagctagtcaagtatatctttctctgatttgatagtgtgacctaaaaggggaccattgtttgaaatatcattagagttgcttattttattattattattattattattattattattattattattgagacagagtttcattctgctgcccaggctggagtgcagtggcatcatcttggctcattgcaacctctgccttctgggttcaggcgattctcctgcctcagcctcccgagtagctgggattacaggctcctgccaccacacccggctaatttttgtatttttagtggagacagggtttccaccatgttggcagcctttgggagccacagaggccattcctccaggcagaatcggccctgcccctg

SEQ ID NO: 366915 - DNA, 2898 bp, Homo sapiens
  misc_feature (2895)..(2896): n is a, c, g, or t
ggacgtcgaggcattacaatcgcgaaaccaagccatagcatgaaacagcgagcttgcagcctcaccgacgagtctcaactaaaagggactcccggagctaggggtggggactcggcctcacacagtgagtgccggctattggacttttgtccagtgacagctgagacaacaaggaccacgggaggaggtgtaggagagaagcgccgcgaacagcgatcgcccagcaccaagtccgcttccaggctttcggtttctttgcctccatcttgggtgcgccttcccggcgtctaggggagcgaaggctgaggtggcagcggcaggagagtccggccgcgacaggacgaactcccccactggaaaggattctgaaagaaatgaagtcagccctcagaaatgaagttgactgcctgctggctttctgttgactggcccggagctgtactgcaagacccttgtgagcttccctagtctaagagtaggatgtctgctgaagtcatccatcaggttgaagaagcacttgatacagatgagaaggagatgctgctctttttgtgccgggatgttgctatagatgtggttccacctaatgtcagggaccttctggatattttacgggaaagaggtaagctgtctgtcggggacttggctgaactgctctacagagtgaggcgatttgacctgctcaaacgtatcttgaagatggacagaaaagctgtggagacccacctgctcaggaaccctcaccttgtttcggactatagagtgctgatggcagagattggtgaggatttggataaatctgatgtgtcctcattaattttcctcatgaaggattacatgggccgaggcaagataagcaaggagaagagtttcttggaccttgtggttgagttggagaaactaaatctggttgccccagatcaactggatttattagaaaaatgcctaaagaacatccacagaatagacctgaagacaaaaatccagaagtacaagcagtctgttcaaggagcagggacaagttacaggaatgttctccaagcagcaatccaaaagagtctcaaggatccttcaaataacttcaggctccataatgggagaagtaaagaacaaagacttaaggaacagcttggcgctcaacaagaaccagtgaagaaatccattcaggaatcagaagcttttttgcctcagagcatacctgaagagagatacaagatgaagagcaagcccctaggaatctgcctgataatcgattgcattggcaatgagacagagcttcttcgagacaccttcacttccctgggctatgaagtccagaaattcttgcatctcagtatgcatggtatatcccagattcttggccaatttgcctgtatgcccgagcaccgagactacgacagctttgtgtgtgtcctggtgagccgaggaggctcccagagtgtgtatggtgtggatcagactcactcagggctccccctgcatcacatcaggaggatgttcatgggagattcatgcccttatctagcagggaagccaaagatgttttttattcagaactatgtggtgtcagagggccagctggaggacagcagcctcttggaggtggatgggccagcgatgaagaatgtggaattcaaggctcagaagcgagggctgtgcacagttcaccgagaagctgacttcttctggagcctgtgtactgcggacatgtccctgctggagcagtctcacagctcaccatccctgtacctgcagtgcctctcccagaaactgagacaagaaagaaaacgcccactcctggatcttcacattgaactcaatggctacatgtatgattggaacagcagagtttctgccaaggagaaatattatgtctggctgcagcacactctgagaaagaaacttatcctctcctacacataagaaaccaaaaggctgggcgtagtggctcacacctgtaatcccagcactttgggaggccaaggagggcagatcacttcaggtcaggagttcgagaccagcctggccaacatggtaaacgctgtccctagtaaaaatacaaaaattagctgggtgtgggtgtgggtacctgtattcccagttacttgggaggctgaggtgggaggatcttttgaacccaggagttcagggtcatagcatgctgtgattgtgcctacgaatagccactgcataccaacctgggcaatatagcaagatcccatctctttaaaaaaaaaaaaaaaggacaggaactatcttactcaatgtattagtcatgtttctctagagggacagaactaataggatacatgtatataaaaaggggagtttattaaggagtattgactcacatgatcacagggttaggtcccacaataggtcatctgcaagcaaggaagccaattcaagtcccaaagctgaagaacttggagtccaatgtttgagggcaggaagcattcagcatgagagaaagatggaggccagaagactacaccagtctagtctttccatgttttgcctgcttttattctggcagtgctggcagctgattagatggtgcccacccagattgaggatggtctgcctttcccagtccactgactcaaatgttaaatctcctttggcagcaccctcacagatgtacccgggaacactttgcatccttctattcaatcaagttgatactcagtattaaccatcacagtccatttgggcaactataccaaattaccatagaccaggtgacttaaacagcagttatttctcacagttacttgggaggctgaggtgggaggatcttttgaacccaggagttcagggtcatagcatgctgtgattgtgcctacgaatagccactgcataccaacctgggcaatatagcaagatcccatctcnnta

SEQ ID NO: 366916 - DNA, 3939 bp, Homo sapiens
ttgtttgttcaaggccacgtgggtggagtcattgaggtggaggtttaactctgtgacataagtttccctgatttagtcaggctgtctgtcgttgggcttttcccacttccttctactacgtacttcttccctattcctcctactgaggccattaaacccttagttgtaattttccctgaacatgctttacattctgatgaattctgaaaaagaatgtggggtttccttgcagatgagttcatctgttgtttcatttcctttacaatgtaggttttcttctctgtctttttggattagtctgtttttggttctgtctaccaaggatccctttctttagacttctatagatccctttctatagaacttaatctacttaagtcagggagaccacccagaaggaaagagcccatactttcaatcttaggcataagttagcttgataagattttcagaaaaattcccttttaaccacagaactcccccactggaaaggattctgaaagaaatgaagtcagccctcagaaatgaagttgactgcctgctggctttctgttgactggcccggagctgtactgcaagacccttgtgagcttccctagtctaagagtaggatgtctgctgaagtcatccatcaggttgaagaagcacttgatacagatgagaaggagatgctgctctttttgtgccgggatgttgctatagatgtggttccacctaatgtcagggaccttctggatattttacgggaaagaggtaagctgtctgtcggggacttggctgaactgctctacagagtgaggcgatttgacctgctcaaacgtatcttgaagatggacagaaaagctgtggagacccacctgctcaggaaccctcaccttgtttcggactatagagtgctgatggcagagattggtgaggatttggataaatctgatgtgtcctcattaattttcctcatgaaggattacatgggccgaggcaagataagcaaggagaagagtttcttggaccttgtggttgagttggagaaactaaatctggttgccccagatcaactggatttattagaaaaatgcctaaagaacatccacagaatagacctgaagacaaaaatccagaagtacaagcagtctgttcaaggagcagggacaagttacaggaatgttctccaagcagcaatccaaaagagtctcaaggatccttcaaataacttcaggctccataatgggagaagtaaagaacaaagacttaaggaacagcttggcgctcaacaagaaccagtgaagaaatccattcaggaatcagaagcttttttgcctcagagcatacctgaagagagatacaagatgaagagcaagcccctaggaatctgcctgataatcgattgcattggcaatgagacagagcttcttcgagacaccttcacttccctgggctatgaagtccagaaattcttgcatctcagtatgcatggtatatcccagattcttggccaatttgcctgtatgcccgagcaccgagactacgacagctttgtgtgtgtcctggtgagccgaggaggctcccagagtgtgtatggtgtggatcagactcactcagggctccccctgcatcacatcaggaggatgttcatgggagattcatgcccttatctagcagggaagccaaagatgttttttattcagaactatgtggtgtcagagggccagctggaggacagcagcctcttggaggtggatgggccagcgatgaagaatgtggaattcaaggctcagaagcgagggctgtgcacagttcaccgagaagctgacttcttctggagcctgtgtactgcggacatgtccctgctggagcagtctcacagctcaccatccctgtacctgcagtgcctctcccagaaactgagacaagaaagaaaacgcccactcctggatcttcacattgaactcaatggctacatgtatgattggaacagcagagtttctgccaaggagaaatattatgtctggctgcagcacactctgagaaagaaacttatcctctcctacacataagaaaccaaaaggctgggcgtagtggctcacacctgtaatcccagcactttgggaggccaaggagggcagatcacttcaggtcaggagttcgagaccagcctggccaacatggtaaacgctgtccctagtaaaaatacaaaaattagctgggtgtgggtgtgggtacctgtattcccagttacttgggaggctgaggtgggaggatcttttgaacccaggagttcagggtcatagcatgctgtgattgtgcctacgaatagccactgcataccaacctgggcaatatagcaagatcccatctctttaaaaaaaaaaaaaaaggacaggaactatcttactcaatgtattagtcatgtttctctagagggacagaactaataggatacatgtatataaaaaggggagtttattaaggagtattgactcacatgatcacagggttaggtcccacaataggtcatctgcaagcaaggaagccaattcaagtcccaaagctgaagaacttggagtccaatgtttgagggcaggaagcattcagcatgagagaaagatggaggccagaagactacaccagtctagtctttccatgttttgcctgcttttattctggcagtgctggcagctgattagatggtgcccacccagattgaggatggtctgcctttcccagtccactgactcaaatgttaaatctcctttggcagcaccctcacagatgtacccgggaacactttgcatccttctattcaatcaagttgatactcagtattaaccatcacagtccatttgggcaactataccaaattaccatagaccaggtgacttaaacagcagttatttctcacagttccggaggctgggaaatccaacatctaagtggtagcatatctggtgtctggtaaggcatgcttccagatcttaccagatgtcagtcttttgatgttctcacatggcagaaaaagaggatgcaaactctcaagtatatctttaagggcacaaattccattcatgagggctctaccctcatcacctaattacctcccaaaggccccaccttctgatactgtcactttggggatactgtctcccctttgaattctggggggaatacaaacattcagtttgtaacaatagccttatgatttagaggttacttgttcattcacctagacctcaaattgcattttacactacttgggaggctgaagtgagtggatcccctgagcccagagaggtcaaggttgtgatgagctgtgatcacaccactgcacttcagcatgggagacagagtgagaccctgtttcagaaaaaataaataaataaaaccaccagcaccacaaacaacaacaaaaagttattttgtacttgttttgagcacaggactcctgagggtatctttgcatttaatattacataggggtgccagtgggaagtaatgtgtatgcttggcctcatgagctaaaaccctgtgttaattatgacagaaggaaagtgtgtgagagggatcttaactacctagcagctctagctgccatcttgaaccatgaagatacgggccacacgtaggggtagctgggtagtgagcagcaagaagccttgttggatgagggcacgaaggagcagaatcactggaatcactgtgtcagccctaattacctacctctggacttttatgtgaggggaaaaaaaattgacagtttatatttatctcaacctagttaacccaagtgatgcattgttatgagattaaaatgtttggaggccgggtgcgatctcagctcacaatcactagtgaattcgcgaggccaaggcgggcggatcacgaggtcaggagatcaagaccatcctggctaacatgtaaaaccccgtctctactaaaaataca

SEQ ID NO: 366917 - DNA, 2124 bp, Homo sapiens
ggacgtcgaggcattacaatcgcgaaaccaagccatagcatgaaacagcgagcttgcagcctcaccgacgagtctcaactaaaagggactcccggagctaggggtggggactcggcctcacacagtgagtgccggctattggacttttgtccagtgacagctgagacaacaaggaccacgggaggaggtgtaggagagaagcgccgcgaacagcgatcgcccagcaccaagtccgcttccaggctttcggtttctttgcctccatcttgggtgcgccttcccggcgtctaggggagcgaaggctgaggtggcagcggcaggagagtccggccgcgacaggacgaactcccccactggaaaggattctgaaagaaatgaagtcagccctcagaaatgaagttgactgcctgctggctttctgttgactggcccggagctgtactgcaagacccttgtgagcttccctagtctaagagtaggatgtctgctgaagtcatccatcaggttgaagaagcacttgatacagatgagaaggagatgctgctctttttgtgccgggatgttgctatagatgtggttccacctaatgtcagggaccttctggatattttacgggaaagaggtaagctgtctgtcggggacttggctgaactgctctacagagtgaggcgatttgacctgctcaaacgtatcttgaagatggacagaaaagctgtggagacccacctgctcaggaaccctcaccttgtttcggactatagagtgctgatggcagagattggtgaggatttggataaatctgatgtgtcctcattaattttcctcatgaaggattacatgggccgaggcaagataagcaaggagaagagtttcttggaccttgtggttgagttggagaaactaaatctggttgccccagatcaactggatttattagaaaaatgcctaaagaacatccacagaatagacctgaagacaaaaatccagaagtacaagcagtctgttcaaggagcagggacaagttacaggaatgttctccaagcagcaatccaaaagagtctcaaggatccttcaaataacttcaggagcatacctgaagagagatacaagatgaagagcaagcccctaggaatctgcctgataatcgattgcattggcaatgagacagagcttcttcgagacaccttcacttccctgggctatgaagtccagaaattcttgcatctcagtatgcatggtatatcccagattcttggccaatttgcctgtatgcccgagcaccgagactacgacagctttgtgtgtgtcctggtgagccgaggaggctcccagagtgtgtatggtgtggatcagactcactcagggctccccctgcatcacatcaggaggatgttcatgggagattcatgcccttatctagcagggaagccaaagatgttttttattcagaactatgtggtgtcagagggccagctggaggacagcagcctcttggaggtggatgggccagcgatgaagaatgtggaattcaaggctcagaagcgagggctgtgcacagttcaccgagaagctgacttcttctggagcctgtgtactgcggacatgtccctgctggagcagtctcacagctcaccatccctgtacctgcagtgcctctcccagaaactgagacaagaaagaaaacgcccactcctggatcttcacattgaactcaatggctacatgtatgattggaacagcagagtttctgccaaggagaaatattatgtctggctgcagcacactctgagaaagaaacttatcctctcctacacataagaaaccaaaaggctgggcgtagtggctcacacctgtaatcccagcactttgggaggccaaggagggcagatcacttcaggtcaggagttcgagaccagcctggccaacatggtaaacgctgtccctagtaaaaatacaaaaattagctgggtgtgggtgtgggtacctgtattcccagttacttgggaggctgaggtgggaggatcttttgaacccaggagttcagggtcatagcatgctgtgattgtgcctacgaatagccactgcataccaacctgggcaatatagcaagatcccatctcttta

SEQ ID NO: 366918 - DNA, 4592 bp, Homo sapiens
ggacgtcgaggcattacaatcgcgaaaccaagccatagcatgaaacagcgagcttgcagcctcaccgacgagtctcaactaaaagggactcccggagctaggggtggggactcggcctcacacagtgagtgccggctattggacttttgtccagtgacagctgagacaacaaggaccacgggaggaggtgtaggagagaagcgccgcgaacagcgatcgcccagcaccaagtccgcttccaggctttcggtttctttgcctccatcttgggtgcgccttcccggcgtctaggggagcgaaggctgaggtggcagcggcaggagagtccggccgcgacaggacgaactcccccactggaaaggattctgaaagaaatgaagtcagccctcagaaatgaagttgactgcctgctggctttctgttgactggcccggagctgtactgcaagacccttgtgagcttccctagtctaagagtaggatgtctgctgaagtcatccatcaggttgaagaagcacttgatacagatgagaaggagatgctgctctttttgtgccgggatgttgctatagatgtggttccacctaatgtcagggaccttctggatattttacgggaaagaggtaagctgtctgtcggggacttggctgaactgctctacagagtgaggcgatttgacctgctcaaacgtatcttgaagatggacagaaaagctgtggagacccacctgctcaggaaccctcaccttgtttcggactatagagtgctgatggcagagattggtgaggatttggataaatctgatgtgtcctcattaattttcctcatgaaggattacatgggccgaggcaagataagcaaggagaagagtttcttggaccttgtggttgagttggagaaactaaatctggttgccccagatcaactggatttattagaaaaatgcctaaagaacatccacagaatagacctgaagacaaaaatccagaagtacaagcagtctgttcaaggagcagggacaagttacaggaatgttctccaagcagcaatccaaaagagtctcaaggatccttcaaataacttcaggaagaaccagtgaagaaatccattcaggaatcagaagcttttttgcctcagagcatacctgaagagagatacaagatgaagagcaagcccctaggaatctgcctgataatcgattgcattggcaatgagacagagcttcttcgagacaccttcacttccctgggctatgaagtccagaaattcttgcatctcagtatgcatggtatatcccagattcttggccaatttgcctgtatgcccgagcaccgagactacgacagctttgtgtgtgtcctggtgagccgaggaggctcccagagtgtgtatggtgtggatcagactcactcagggctccccctgcatcacatcaggaggatgttcatgggagattcatgcccttatctagcagggaagccaaagatgttttttattcagaactatgtggtgtcagagggccagctggaggacagcagcctcttggaggtggatgggccagcgatgaagaatgtggaattcaaggctcagaagcgagggctgtgcacagttcaccgagaagctgacttcttctggagcctgtgtactgcggacatgtccctgctggagcagtctcacagctcaccatccctgtacctgcagtgcctctcccagaaactgagacaagaaagggggacaattcccggaagtggaattacagagtcaaaggacatgcatttttcaagcctcggatgcatcttactagatgtcctataggatggtcatatcagctttataggagagtagctgtgtccctgaattctccctgacactgcatgctcttatatttcctcaagttttgacaatttgataggtgaaaagtggtatctgactgttcagatctggaaggctttgttatataaacatttttttaatgtttattggcaagaatacttttctaagagaaacatcagtgagctggtttccatttaagctgaatgaagccacaatgtacctcaagtataagattaactggcctttttcagttgcactctaattacaatttagaatgatgtttctgagccacctgtcaaatgcattctgggctgtacctctgcgtaccccaggaataaatctcatggccttctttacctggcctccttagtggtggcccagcaggaagcgggggttagagcaggagccactcagccttccaagatagatactccatgggccggtggtattactggccttttgagcccatccccatttgcatagatgatccacgtgggttatcatctggctggtatgttcccagagtgaaactcagcagccccttgagggaggggatggtggccatcaggccagagtattgcaagttagtttggatcatttgctaagcagcttgtggtgccttcagaaaggaacagtttcaaagaactttcacatctgttggctcatttcgccctaatgacagtcttctctttgatatttgcatggcattaaattttgcctttcttgttttctccagaaaacgcccactcctggatcttcacattgaactcaatggctacatgtatgattggaacagcagagtttctgccaaggagaaatattatgtctggctgcagcacactctgagaaagaaacttatcctctcctacacataagaaaccaaaaggctgggcgtagtggctcacacctgtaatcccagcactttgggaggccaaggagggcagatcacttcaggtcaggagttcgagaccagcctggccaacatggtaaacgctgtccctagtaaaaatacaaaaattagctgggtgtgggtgtgggtacctgtattcccagttacttgggaggctgaggtgggaggatcttttgaacccaggagttcagggtcatagcatgctgtgattgtgcctacgaatagccactgcataccaacctgggcaatatagcaagatcccatctctttaaaaaaaaaaaaaaaggacaggaactatcttactcaatgtattagtcatgtttctctagagggacagaactaataggatacatgtatataaaaaggggagtttattaaggagtattgactcacatgatcacagggttaggtcccacaataggtcatctgcaagcaaggaagccaattcaagtcccaaagctgaagaacttggagtccaatgtttgagggcaggaagcattcagcatgagagaaagatggaggccagaagactacaccagtctagtctttccatgttttgcctgcttttattctggcagtgctggcagctgattagatggtgcccacccagattgaggatggtctgcctttcccagtccactgactcaaatgttaaatctcctttggcagcaccctcacagatgtacccgggaacactttgcatccttctattcaatcaagttgatactcagtattaaccatcacagtccatttgggcaactataccaaattaccatagaccaggtgacttaaacagcagttatttctcacagttccggaggctgggaaatccaacatctaagtggtagcatatctggtgtctggtaaggcatgcttccagatcttaccagatgtcagtcttttgatgttctcacatggcagaaaaagaggatgcaaactctcaagtatatctttaagggcacaaattccattcatgagggctctaccctcatcacctaattacctcccaaaggccccaccttctgatactgtcactttggggatactgtctcccctttgaattctggggggaatacaaacattcagtttgtaacaatagccttatgatttagaggttacttgttcattcacctagacctcaaattgcattttacactacttgggaggctgaagtgagtggatcccctgagcccagagaggtcaaggttgtgatgagctgtgatcacaccactgcacttcagcatgggagacagagtgagaccctgtttcagaaaaaataaataaataaaaccaccagcaccacaaacaacaacaaaaagttattttgtacttgttttgagcacaggactcctgagggtatctttgcatttaatattacataggggtgccagtgggaagtaatgtgtatgcttggcctcatgagctaaaaccctgtgttaattatgacagaaggaaagtgtgtgagagggatcttaactacctagcagctctagctgccatcttgaaccatgaagatacgggccacacgtaggggtagctgggtagtgagcagcaagaagccttgttggatgagggcacgaaggagcagaatcactggaatcactgtgtcagccctaattacctacctctggacttttatgtgaggggaaaaaaaattgacagtttatatttatctcaacctagttaacccaagtgatgcattgttatgagattaaaatgtttggaggccgggtgcgatctcagctcacaatcactagtgaattcgcgaggccaaggcgggcggatcacgaggtcaggagatcaagaccatcctggctaacatgtaaaaccccgtctctactaaaaataca

SEQ ID NO: 366919 - DNA, 2253 bp, Homo sapiens
ggacgtcgaggcattacaatcgcgaaaccaagccatagcatgaaacagcgagcttgcagcctcaccgacgagtctcaactaaaagggactcccggagctaggggtggggactcggcctcacacagtgagtgccggctattggacttttgtccagtgacagctgagacaacaaggaccacgggaggaggtgtaggagagaagcgccgcgaacagcgatcgcccagcaccaagtccgcttccaggctttcggtttctttgcctccatcttgggtgcgccttcccggcgtctaggggagcgaaggctgaggtggcagcggcaggagagtccggccgcgacaggacgaactcccccactggaaaggattctgaaagaaatgaagtcagccctcagaaatgaagttgactgcctgctggctttctgttgactggcccggagctgtactgcaagacccttgtgagcttccctagtctaagagtaggatgtctgctgaagtcatccatcaggttgaagaagcacttgatacagatgagaaggagatgctgctctttttgtgccgggatgttgctatagatgtggttccacctaatgtcagggaccttctggatattttacgggaaagaggtaagctgtctgtcggggacttggctgaactgctctacagagtgaggcgatttgacctgctcaaacgtatcttgaagatggacagaaaagctgtggagacccacctgctcaggaaccctcaccttgtttcggactatagagtgctgatggcagagattggtgaggatttggataaatctgatgtgtcctcattaattttcctcatgaaggattacatgggccgaggcaagataagcaaggagaagagtttcttggaccttgtggttgagttggagaaactaaatctggttgccccagatcaactggatttattagaaaaatgcctaaagaacatccacagaatagacctgaagacaaaaatccagaagtacaagcagtctgttcaaggagcagggacaagttacaggaatgttctccaagcagcaatccaaaagagtctcaaggatccttcaaataacttcaggctccataatgggagaagtaaagaacaaagacttaaggaacagcttggcgctcaacaagaaccagtgaagaaatccattcaggaatcagaagcttttttgcctcagagcatacctgaagagagatacaagatgaagagcaagcccctaggaatctgcctgataatcgattgcattggcaatgagacagagcttcttcgagacaccttcacttccctgggctatgaagtccagaaattcttgcatctcagtatgcatggtatatcccagattcttggccaatttgcctgtatgcccgagcaccgagactacgacagctttgtgtgtgtcctggtgagccgaggaggctcccagagtgtgtatggtgtggatcagactcactcagggctccccctgcatcacatcaggaggatgttcatgggagattcatgcccttatctagcagggaagccaaagatgttttttattcagaactatgtggtgtcagagggccagctggaggacagcagcctcttggaggtggatgggccagcgatgaagaatgtggaattcaaggctcagaagcgagggctgtgcacagttcaccgagaagctgacttcttctggagcctgtgtactgcggacatgtccctgctggagcagtctcacagctcaccatccctgtacctgcagtgcctctcccagaaactgagacaagaaagaaaacgcccactcctggatcttcacattgaactcaatggctacatgtatgattggaacagcagagtttctgccaaggagaaatattatgtctggctgcagcacactctgagaaagaaacttatcctctcctacacatagttcagcgtctgacgtcagacgctgaactatgtggtcatgaggatgcccagaatcagggcccagatgttcaggcacttggcggtggaggcataggcctgggccccggtcacgtcgccaaccatcttcctgtccctagacttcacggagtaggcgaatgctatgaagcccaggcagcaggggttcatgaagagggtgttgaacagggaccagacgacatggtcgggcacggaggtctcgctgcggatgtggatcacggtggacgtcgggggagcagggttgtggggcgcccccagcacagccactcgtgctcctcccttgagcatcacatag

SEQ ID NO: 366920 - DNA, 3297 bp, Homo sapiens
ggacgtcgaggcattacaatcgcgaaaccaagccatagcatgaaacagcgagcttgcagcctcaccgacgagtctcaactaaaagggactcccggagctaggggtggggactcggcctcacacagtgagtgccggctattggacttttgtccagtgacagctgagacaacaaggaccacgggaggaggtgtaggagagaagcgccgcgaacagcgatcgcccagcaccaagtccgcttccaggctttcggtttctttgcctccatcttgggtgcgccttcccggcgtctaggggagcgaaggctgaggtggcagcggcaggagagtccggccgcgacaggacgaactcccccactggaaaggattctgaaagaaatgaagtcagccctcagaaatgaagttgactgcctgctggctttctgttgactggcccggagctgtactgcaagacccttgtgagcttccctagtctaagagtaggatgtctgctgaagtcatccatcaggttgaagaagcacttgatacagatgagaaggagatgctgctctttttgtgccgggatgttgctatagatgtggttccacctaatgtcagggaccttctggatattttacgggaaagaggtaagctgtctgtcggggacttggctgaactgctctacagagtgaggcgatttgacctgctcaaacgtatcttgaagatggacagaaaagctgtggagacccacctgctcaggaaccctcaccttgtttcggactatagagtgctgatggcagagattggtgaggatttggataaatctgatgtgtcctcattaattttcctcatgaaggattacatgggccgaggcaagataagcaaggagaagagtttcttggaccttgtggttgagttggagaaactaaatctggttgccccagatcaactggatttattagaaaaatgcctaaagaacatccacagaatagacctgaagacaaaaatccagaagtacaagcagtctgttcaaggagcagggacaagttacaggaatgttctccaagcagcaatccaaaagagtctcaaggatccttcaaataacttcaggctccataatgggagaagtaaagaacaaagacttaaggaacagcttggcgctcaacaagaaccagtgaagaaatccattcaggaatcagaagcttttttgcctcagagcatacctgaagagagatacaagatgaagagcaagcccctaggaatctgcctgataatcgattgcattggcaatgagacagaaaacgcccactcctggatcttcacattgaactcaatggctacatgtatgattggaacagcagagtttctgccaaggagaaatattatgtctggctgcagcacactctgagaaagaaacttatcctctcctacacataagaaaccaaaaggctgggcgtagtggctcacacctgtaatcccagcactttgggaggccaaggagggcagatcacttcaggtcaggagttcgagaccagcctggccaacatggtaaacgctgtccctagtaaaaatacaaaaattagctgggtgtgggtgtgggtacctgtattcccagttacttgggaggctgaggtgggaggatcttttgaacccaggagttcagggtcatagcatgctgtgattgtgcctacgaatagccactgcataccaacctgggcaatatagcaagatcccatctctttaaaaaaaaaaaaaaaggacaggaactatcttactcaatgtattagtcatgtttctctagagggacagaactaataggatacatgtatataaaaaggggagtttattaaggagtattgactcacatgatcacagggttaggtcccacaataggtcatctgcaagcaaggaagccaattcaagtcccaaagctgaagaacttggagtccaatgtttgagggcaggaagcattcagcatgagagaaagatggaggccagaagactacaccagtctagtctttccatgttttgcctgcttttattctggcagtgctggcagctgattagatggtgcccacccagattgaggatggtctgcctttcccagtccactgactcaaatgttaaatctcctttggcagcaccctcacagatgtacccgggaacactttgcatccttctattcaatcaagttgatactcagtattaaccatcacagtccatttgggcaactataccaaattaccatagaccaggtgacttaaacagcagttatttctcacagttccggaggctgggaaatccaacatctaagtggtagcatatctggtgtctggtaaggcatgcttccagatcttaccagatgtcagtcttttgatgttctcacatggcagaaaaagaggatgcaaactctcaagtatatctttaagggcacaaattccattcatgagggctctaccctcatcacctaattacctcccaaaggccccaccttctgatactgtcactttggggatactgtctcccctttgaattctggggggaatacaaacattcagtttgtaacaatagccttatgatttagaggttacttgttcattcacctagacctcaaattgcattttacactacttgggaggctgaagtgagtggatcccctgagcccagagaggtcaaggttgtgatgagctgtgatcacaccactgcacttcagcatgggagacagagtgagaccctgtttcagaaaaaataaataaataaaaccaccagcaccacaaacaacaacaaaaagttattttgtacttgttttgagcacaggactcctgagggtatctttgcatttaatattacataggggtgccagtgggaagtaatgtgtatgcttggcctcatgagctaaaaccctgtgttaattatgacagaaggaaagtgtgtgagagggatcttaactacctagcagctctagctgccatcttgaaccatgaagatacgggccacacgtaggggtagctgggtagtgagcagcaagaagccttgttggatgagggcacgaaggagcagaatcactggaatcactgtgtcagccctaattacctacctctggacttttatgtgaggggaaaaaaaattgacagtttatatttatctcaacctagttaacccaagtgatgcattgttatgagattaaaatgtttggaggccgggtgcgatctcagctcacaatcactagtgaattcgcgaggccaaggcgggcggatcacgaggtcaggagatcaagaccatcctggctaacatgtaaaaccccgtctctactaaaaataca

SEQ ID NO: 366921 - DNA, 2719 bp, Homo sapiens
ggacgtcgaggcattacaatcgcgaaaccaagccatagcatgaaacagcgagcttgcagcctcaccgacgagtctcaactaaaagggactcccggagctaggggtggggactcggcctcacacagtgagtgccggctattggacttttgtccagtgacagctgagacaacaaggaccacgggaggaggtgtaggagagaagcgccgcgaacagcgatcgcccagcaccaagtccgcttccaggctttcggtttctttgcctccatcttgggtgcgccttcccggcgtctaggggagcgaaggctgaggtggcagcggcaggagagtccggccgcgacaggacgaactcccccactggaaaggattctgaaagaaatgaagtcagccctcagaaatgaagttgactgcctgctggctttctgttgactggcccggagctgtactgcaagacccttgtgagcttccctagtctaagagtaggatgtctgctgaagtcatccatcaggttgaagaagcacttgatacagatgagaaggagatgctgctctttttgtgccgggatgttgctatagatgtggttccacctaatgtcagggaccttctggatattttacgggaaagaggtaagctgtctgtcggggacttggctgaactgctctacagagtgaggcgatttgacctgctcaaacgtatcttgaagatggacagaaaagctgtggagacccacctgctcaggaaccctcaccttgtttcggactatagagtgctgatggcagagattggtgaggatttggataaatctgatgtgtcctcattaattttcctcatgaaggattacatgggccgaggcaagataagcaaggagaagagtttcttggaccttgtggttgagttggagaaactaaatctggttgccccagatcaactggatttattagaaaaatgcctaaagaacatccacagaatagacctgaagacaaaaatccagaagtacaagcagtctgttcaaggagcagggacaagttacaggaatgttctccaagcagcaatccaaaagagtctcaaggatccttcaaataacttcagggtgagtctggagaaaacatatggaatcccagcatgaaaccgtttcagagttctaataaaaatatgcatattctcacagcatgtactttatttaatatctgaaaaaattgtgatagaaatgtgtatttgttttaaaaacgtgtaacttcttatatttcaaagctaatacatgttcattgagatatttggagactatagagaaagataaaagaaaataaatcacctatattccactatccaaagacaaccactgttagtattttggtatatttccttctagactcttttttatgtgggtttgcatctgtatctgtatgtatatatatatatacatacatacatacatacagttggacaattggacatttttttcactgttcatttattcacttgaaattgtaacttaaaaaaagaaaatgtaactttaaaaataaaaatagatgcaccatgcctatggaaaaaaatttaaatgtactacaagaggttttaaaagtatttttttgcccgggtgcggtggctcatgcgtgtaatcccagcactttgggaggccgagccggaaggatcacctgaggtcaggagttcgagactggcctggccaacatggtgaaactccatctctactaaaaaatacaaaaattagccaggtatggtggcaggtgcctataatcccagctacttgggaggctgaggcaggagaatcatatgaacccaggaagtggaggttgcagtagccaaatcgcgccattgtactccagcctgggtgacaagagcaaaactctgtctcaaaaaaaatgttttcttcctacccctataatactgacctccaattatttttcctaaaggcagctgttgtgaactagttcattctgtaactatccagagatagtctacacatatatttcatttttgcttttttctcttctacagatgataacaccctatgcccattgtcctgatctgaaaattcttggaaattgttccatgtgattaacatggaactgcctctacttaatcattctgaatgattaaatcgtttcattttctaaatgtgttataatgtgtttagccctttcttgttgctgtatgtttagatgctttccaatcttttgttactactaataatgctataaaataaatatccttgtacttctttgtgcatttgtttttttactgagctaattttaatgatttcagcaaaagttattttgttattgagtgatgaaacaaaagatttttgagggtgttcatgagcataagtatcatatagtcacttatggttgttgtgttcctagtacttagtacaaggtatcggaattgttctttagttaatcttttatcttgagaagttaaatcttggtgtaatcttatcctcatgttcatataaagatatgtggagtttgtagtgaggacttagagccgggtacaatttcatggttaaattagaaatgcttttggcagtgttaacagctcttttagaatttgtctagcaggcttttcagtttttgccagaaagccctaaaaaaaaagaaggaaaaaaatgcttttggctgagtgtggtggctcacgcctgtaatcccagcactttgggaggccgaggcaagcggatcgcttgagcccaggagttcgagacaaac

SEQ ID NO: 366922 - DNA, 1793 bp, Homo sapiens
ggacgtcgaggcattacaatcgcgaaaccaagccatagcatgaaacagcgagcttgcagcctcaccgacgagtctcaactaaaagggactcccggagctaggggtggggactcggcctcacacagtgagtgccggctattggacttttgtccagtgacagctgagacaacaaggaccacgggaggaggtgtaggagagaagcgccgcgaacagcgatcgcccagcaccaagtccgcttccaggctttcggtttctttgcctccatcttgggtgcgccttcccggcgtctaggggagcgaaggctgaggtggcagcggcaggagagtccggccgcgacaggacgaactcccccactggaaaggattctgaaagaaatgaagtcagccctcagaaatgaagttgactgcctgctggctttctgttgactggcccggagctgtactgcaagacccttgtgagcttccctagtctaagagtaggatgtctgctgaagtcatccatcaggttgaagaagcacttgatacagatgagaaggagatgctgctctttttgtgccgggatgttgctatagatgtggttccacctaatgtcagggaccttctggatattttacgggaaagaggtaagctgtctgtcggggacttggctgaactgctctacagagtgaggcgatttgacctgctcaaacgtatcttgaagatggacagaaaagctgtggagacccacctgctcaggaaccctcaccttgtttcggactatagagtgctgatggcagagattggtgaggatttggataaatctgatgtgtcctcattaattttcctcatgaaggattacatgggccgaggcaagataagcaaggagaagagtttcttggaccttgtggttgagttggagaaactaaatctggttgccccagatcaactggatttattagaaaaatgcctaaagaacatccacagaatagacctgaagacaaaaatccagaagtacaagcagtctgttcaaggagcagggacaagttacaggaatgttctccaagcagcaatccaaaagagtctcaaggatccttcaaataacttcaggatgataacaccctatgcccattgtcctgatctgaaaattcttggaaattgttccatgtgattaacatggaactgcctctacttaatcattctgaatgattaaatcgtttcattttctaaatgtgttataatgtgtttagccctttcttgttgctgtatgtttagatgctttccaatcttttgttactactaataatgctataaaataaatatccttgtacttctttgtgcatttgtttttttactgagctaattttaatgatttcagcaaaagttattttgttattgagtgatgaaacaaaagatttttgagggtgttcatgagcataagtatcatatagtcacttatggttgttgtgttcctagtacttagtacaaggtatcggaattgttctttagttaatcttttatcttgagaagttaaatcttggtgtaatcttatcctcatgttcatataaagatatgtggagtttgtagtgaggacttagagccgggtacaatttcatggttaaattagaaatgcttttggcagtgttaacagctcttttagaatttgtctagcaggcttttcagtttttgccagaaagccctaaaaaaaaagaaggaaaaaaatgcttttggctgagtgtggtggctcacgcctgtaatcccagcactttgggaggccgaggcaagcggatcgcttgagcccaggagttcgagacaaac

SEQ ID NO: 366923 - DNA, 4538 bp, Homo sapiens
ggacgtcgaggcattacaatcgcgaaaccaagccatagcatgaaacagcgagcttgcagcctcaccgacgagtctcaactaaaagggactcccggagctaggggtggggactcggcctcacacagtgagtgccggctattggacttttgtccagtgacagctgagacaacaaggaccacgggaggaggtgtaggagagaagcgccgcgaacagcgatcgcccagcaccaagtccgcttccaggctttcggtttctttgcctccatcttgggtgcgccttcccggcgtctaggggagcgaaggctgaggtggcagcggcaggagagtccggccgcgacaggacgaactcccccactggaaaggattctgaaagaaatgaagtcagccctcagaaatgaagttgactgcctgctggctttctgttgactggcccggagctgtactgcaagacccttgtgagcttccctagtctaagagtaggatgtctgctgaagtcatccatcaggttgaagaagcacttgatacagatgagaaggagatgctgctctttttgtgccgggatgttgctatagatgtggttccacctaatgtcagggaccttctggatattttacgggaaagaggtaagctgtctgtcggggacttggctgaactgctctacagagtgaggcgatttgacctgctcaaacgtatcttgaagatggacagagtgctgatggcagagattggtgaggatttggataaatctgatgtgtcctcattaattttcctcatgaaggattacatgggccgaggcaagataagcaaggagaagagtttcttggaccttgtggttgagttggagaaactaaatctggttgccccagatcaactggatttattagaaaaatgcctaaagaacatccacagaatagacctgaagacaaaaatccagaagtacaagcagtctgttcaaggagcagggacaagttacaggaatgttctccaagcagcaatccaaaagagtctcaaggatccttcaaataacttcaggaagaaccagtgaagaaatccattcaggaatcagaagcttttttgcctcagagcatacctgaagagagatacaagatgaagagcaagcccctaggaatctgcctgataatcgattgcattggcaatgagacagagcttcttcgagacaccttcacttccctgggctatgaagtccagaaattcttgcatctcagtatgcatggtatatcccagattcttggccaatttgcctgtatgcccgagcaccgagactacgacagctttgtgtgtgtcctggtgagccgaggaggctcccagagtgtgtatggtgtggatcagactcactcagggctccccctgcatcacatcaggaggatgttcatgggagattcatgcccttatctagcagggaagccaaagatgttttttattcagaactatgtggtgtcagagggccagctggaggacagcagcctcttggaggtggatgggccagcgatgaagaatgtggaattcaaggctcagaagcgagggctgtgcacagttcaccgagaagctgacttcttctggagcctgtgtactgcggacatgtccctgctggagcagtctcacagctcaccatccctgtacctgcagtgcctctcccagaaactgagacaagaaagggggacaattcccggaagtggaattacagagtcaaaggacatgcatttttcaagcctcggatgcatcttactagatgtcctataggatggtcatatcagctttataggagagtagctgtgtccctgaattctccctgacactgcatgctcttatatttcctcaagttttgacaatttgataggtgaaaagtggtatctgactgttcagatctggaaggctttgttatataaacatttttttaatgtttattggcaagaatacttttctaagagaaacatcagtgagctggtttccatttaagctgaatgaagccacaatgtacctcaagtataagattaactggcctttttcagttgcactctaattacaatttagaatgatgtttctgagccacctgtcaaatgcattctgggctgtacctctgcgtaccccaggaataaatctcatggccttctttacctggcctccttagtggtggcccagcaggaagcgggggttagagcaggagccactcagccttccaagatagatactccatgggccggtggtattactggccttttgagcccatccccatttgcatagatgatccacgtgggttatcatctggctggtatgttcccagagtgaaactcagcagccccttgagggaggggatggtggccatcaggccagagtattgcaagttagtttggatcatttgctaagcagcttgtggtgccttcagaaaggaacagtttcaaagaactttcacatctgttggctcatttcgccctaatgacagtcttctctttgatatttgcatggcattaaattttgcctttcttgttttctccagaaaacgcccactcctggatcttcacattgaactcaatggctacatgtatgattggaacagcagagtttctgccaaggagaaatattatgtctggctgcagcacactctgagaaagaaacttatcctctcctacacataagaaaccaaaaggctgggcgtagtggctcacacctgtaatcccagcactttgggaggccaaggagggcagatcacttcaggtcaggagttcgagaccagcctggccaacatggtaaacgctgtccctagtaaaaatacaaaaattagctgggtgtgggtgtgggtacctgtattcccagttacttgggaggctgaggtgggaggatcttttgaacccaggagttcagggtcatagcatgctgtgattgtgcctacgaatagccactgcataccaacctgggcaatatagcaagatcccatctctttaaaaaaaaaaaaaaaggacaggaactatcttactcaatgtattagtcatgtttctctagagggacagaactaataggatacatgtatataaaaaggggagtttattaaggagtattgactcacatgatcacagggttaggtcccacaataggtcatctgcaagcaaggaagccaattcaagtcccaaagctgaagaacttggagtccaatgtttgagggcaggaagcattcagcatgagagaaagatggaggccagaagactacaccagtctagtctttccatgttttgcctgcttttattctggcagtgctggcagctgattagatggtgcccacccagattgaggatggtctgcctttcccagtccactgactcaaatgttaaatctcctttggcagcaccctcacagatgtacccgggaacactttgcatccttctattcaatcaagttgatactcagtattaaccatcacagtccatttgggcaactataccaaattaccatagaccaggtgacttaaacagcagttatttctcacagttccggaggctgggaaatccaacatctaagtggtagcatatctggtgtctggtaaggcatgcttccagatcttaccagatgtcagtcttttgatgttctcacatggcagaaaaagaggatgcaaactctcaagtatatctttaagggcacaaattccattcatgagggctctaccctcatcacctaattacctcccaaaggccccaccttctgatactgtcactttggggatactgtctcccctttgaattctggggggaatacaaacattcagtttgtaacaatagccttatgatttagaggttacttgttcattcacctagacctcaaattgcattttacactacttgggaggctgaagtgagtggatcccctgagcccagagaggtcaaggttgtgatgagctgtgatcacaccactgcacttcagcatgggagacagagtgagaccctgtttcagaaaaaataaataaataaaaccaccagcaccacaaacaacaacaaaaagttattttgtacttgttttgagcacaggactcctgagggtatctttgcatttaatattacataggggtgccagtgggaagtaatgtgtatgcttggcctcatgagctaaaaccctgtgttaattatgacagaaggaaagtgtgtgagagggatcttaactacctagcagctctagctgccatcttgaaccatgaagatacgggccacacgtaggggtagctgggtagtgagcagcaagaagccttgttggatgagggcacgaaggagcagaatcactggaatcactgtgtcagccctaattacctacctctggacttttatgtgaggggaaaaaaaattgacagtttatatttatctcaacctagttaacccaagtgatgcattgttatgagattaaaatgtttggaggccgggtgcgatctcagctcacaatcactagtgaattcgcgaggccaaggcgggcggatcacgaggtcaggagatcaagaccatcctggctaacatgtaaaaccccgtctctactaaaaataca

SEQ ID NO: 366924 - DNA, 1397 bp, Homo sapiens
ggacgtcgaggcattacaatcgcgaaaccaagccatagcatgaaacagcgagcttgcagcctcaccgacgagtctcaactaaaagggactcccggagctaggggtggggactcggcctcacacagtgagtgccggctattggacttttgtccagtgacagctgagacaacaaggaccacgggaggaggtgtaggagagaagcgccgcgaacagcgatcgcccagcaccaagtccgcttccaggctttcggtttctttgcctccatcttgggtgcgccttcccggcgtctaggggagcgaaggctgaggtggcagcggcaggagagtccggccgcgacaggacgaactcccccactggaaaggattctgaaagaaatgaagtcagccctcagaaatgaagttgactgcctgctggctttctgttgactggcccggagctgtactgcaagacccttgtgagcttccctagtctaagagtaggatgtctgctgaagtcatccatcaggttgaagaagcacttgatacagatgagaaggagatgctgctctttttgtgccgggatgttgctatagatgtggttccacctaatgtcagggaccttctggatattttacgggaaagaggtaagctgtctgtcggggacttggctgaactgctctacagagtgaggcgatttgacctgctcaaacgtatcttgaagatggacagaaaagctgtggagacccacctgctcaggaaccctcaccttgtttcggactatagagtgctgatggcagagattggtgaggatttggataaatctgatgtgtcctcattaattttcctcatgaaggattacatgggccgaggcaagataagcaaggagaagagtttcttggaccttgtggttgagttggagaaactaaatctggttgccccagatcaactggatttattagaaaaatgcctaaagaacatccacagaatagacctgaagacaaaaatccagaagtacaagcagtctggtggatggaatggaacctggatgaccaaagcctcctttagcttgtggctagaaatcgcgtccctttatattcttcatatcccagatctgccaactccattgccctgtatattcatgatctctgcaaaatgctgccaagcagttcttaacatttcagtcttcaagaaagaatctgggatctgcacaggctggcagagctatggacattcaggggttttgcatgtatgctgaaccctactgccttgctctggtatttggcctcacaaccactgtccaacttcgggtgatgtcacttgggtctcataccttccttgcatgtgtcccaagtttcacaaaacctccttatggaaaagagcacattcgatttcttccttgataaaagggaccagattcca

SEQ ID NO: 366925 - DNA, 2976 bp, Homo sapiens
cttcatgatgtttggtcgaagagtcatctgaaattttgaattcagtaaggtggctagaaagtttagggtattttgaaagatggtgattgaccttggactgaaccactattgaagatttatttgataataatttgtaagttttaactcagtacctcccttctgcttttatagttcaaggagcagggacaagttacaggaatgttctccaagcagcaatccaaaagagtctcaaggatccttcaaataacttcaggctccataatgggagaagtaaagaacaaagacttaaggaacagcttggcgctcaacaagaaccagtgaagaaatccattcaggaatcagaagcttttttgcctcagagcatacctgaagagagatacaagatgaagagcaagcccctaggaatctgcctgataatcgattgcattggcaatgagacagagcttcttcgagacaccttcacttccctgggctatgaagtccagaaattcttgcatctcagtatgcatggtatatcccagattcttggccaatttgcctgtatgcccgagcaccgagactacgacagctttgtgtgtgtcctggtgagccgaggaggctcccagagtgtgtatggtgtggatcagactcactcagggctccccctgcatcacatcaggaggatgttcatgggagattcatgcccttatctagcagggaagccaaagatgttttttattcagaactatgtggtgtcagagggccagctggaggacagcagcctcttggaggtggatgggccagcgatgaagaatgtggaattcaaggctcagaagcgagggctgtgcacagttcaccgagaagctgacttcttctggagcctgtgtactgcggacatgtccctgctggagcagtctcacagctcaccatccctgtacctgcagtgcctctcccagaaactgagacaagaaagaaaacgcccactcctggatcttcacattgaactcaatggctacatgtatgattggaacagcagagtttctgccaaggagaaatattatgtctggctgcagcacactctgagaaagaaacttatcctctcctacacataagaaaccaaaaggctgggcgtagtggctcacacctgtaatcccagcactttgggaggccaaggagggcagatcacttcaggtcaggagttcgagaccagcctggccaacatggtaaacgctgtccctagtaaaaatacaaaaattagctgggtgtgggtgtgggtacctgtattcccagttacttgggaggctgaggtgggaggatcttttgaacccaggagttcagggtcatagcatgctgtgattgtgcctacgaatagccactgcataccaacctgggcaatatagcaagatcccatctctttaaaaaaaaaaaaaaaggacaggaactatcttactcaatgtattagtcatgtttctctagagggacagaactaataggatacatgtatataaaaaggggagtttattaaggagtattgactcacatgatcacagggttaggtcccacaataggtcatctgcaagcaaggaagccaattcaagtcccaaagctgaagaacttggagtccaatgtttgagggcaggaagcattcagcatgagagaaagatggaggccagaagactacaccagtctagtctttccatgttttgcctgcttttattctggcagtgctggcagctgattagatggtgcccacccagattgaggatggtctgcctttcccagtccactgactcaaatgttaaatctcctttggcagcaccctcacagatgtacccgggaacactttgcatccttctattcaatcaagttgatactcagtattaaccatcacagtccatttgggcaactataccaaattaccatagaccaggtgacttaaacagcagttatttctcacagttccggaggctgggaaatccaacatctaagtggtagcatatctggtgtctggtaaggcatgcttccagatcttaccagatgtcagtcttttgatgttctcacatggcagaaaaagaggatgcaaactctcaagtatatctttaagggcacaaattccattcatgagggctctaccctcatcacctaattacctcccaaaggccccaccttctgatactgtcactttggggatactgtctcccctttgaattctggggggaatacaaacattcagtttgtaacaatagccttatgatttagaggttacttgttcattcacctagacctcaaattgcattttacactacttgggaggctgaagtgagtggatcccctgagcccagagaggtcaaggttgtgatgagctgtgatcacaccactgcacttcagcatgggagacagagtgagaccctgtttcagaaaaaataaataaataaaaccaccagcaccacaaacaacaacaaaaagttattttgtacttgttttgagcacaggactcctgagggtatctttgcatttaatattacataggggtgccagtgggaagtaatgtgtatgcttggcctcatgagctaaaaccctgtgttaattatgacagaaggaaagtgtgtgagagggatcttaactacctagcagctctagctgccatcttgaaccatgaagatacgggccacacgtaggggtagctgggtagtgagcagcaagaagccttgttggatgagggcacgaaggagcagaatcactggaatcactgtgtcagccctaattacctacctctggacttttatgtgaggggaaaaaaaattgacagtttatatttatctcaacctagttaacccaagtgatgcattgttatgagattaaaatgtttggaggccgggtgcgatctcagctcacaatcactagtgaattcgcgaggccaaggcgggcggatcacgaggtcaggagatcaagaccatcctggctaacatgtaaaaccccgtctctactaaaaataca

SEQ ID NO: 366926 - DNA, 4201 bp, Homo sapiens
atcttttttttttttttttttttttgagacagcatttcactcttgttgcccaggctggaatgcaatggcactatctctgctcaccgcaacctccgcctgtcgggttcaagcgattctcgtgcctcagcctctcaagtagctgagattacaggcatgcaccaccatgcccggctagttttgtatttttaatagagacggggtttctccatgttggtcagtctggtctcgaactcctgaccttaggtgatccgcccgcctcggcatcccaaagtgctgggattacaggcgtgagccaccatgcccggcccaactccaagatctaaacaaaaaagactgggttgaaagggagtttttaatgtttactgtttgctttacatccattttcttgttttgttaatacttgctttacttaagcttttgggtcaaatgtcctcgttaaaatggctttctctagcgactttatgttttacgtttctgtttgtaactgacatttgaccttcttttaacacggtattacttgcttccttataccggtttccaaggtgaagccatttgcagggtcgctgggtttccccctccccccgaaagtcttgcgcgacccggggtgggccggatagtgtgcagttttttgagccttgggctggggacctccaggaagctgaagcggaaattgcctaggcccctggggcattggaggtcctaccgcagctcctagtaggtggtgggggcgcagcggctgtccccactcagtcctggtggggtcgcacgtaacggtcctgagctatgcataagccgtttgaccacgcatggagaattttaccacccagagacacgcgagtggccctgtgcaagtttcaactgcgcggggggcggggaattccgcagacaggattctagaatttatgtcttgtgtggtaacatttcagccggtgggtggcggggattaggcgtgaagcggttcagcaggcagaggttctcggacgccctccggcgaagccacctgttgatgcttttgactttctgtccttgttcctcgtcccatctggagcatttccaattctggttttgcggagcagcaggtctgagcttgtccggcgagggtgggagttggtcccggcggagatccagtgggaagagccggcggctgcccgggcagtgctgatggcagagattggtgaggatttggataaatctgatgtgtcctcattaattttcctcatgaaggattacatgggccgaggcaagataagcaaggagaagagtttcttggaccttgtggttgagttggagaaactaaatctggttgccccagatcaactggatttattagaaaaatgcctaaagaacatccacagaatagacctgaagacaaaaatccagaagtacaagcagtctgttcaaggagcagggacaagttacaggaatgttctccaagcagcaatccaaaagagtctcaaggatccttcaaataacttcaggctccataatgggagaagtaaagaacaaagacttaaggaacagcttggcgctcaacaagaaccagtgaagaaatccattcaggaatcagaagcttttttgcctcagagcatacctgaagagagatacaagatgaagagcaagcccctaggaatctgcctgataatcgattgcattggcaatgagacagagcttcttcgagacaccttcacttccctgggctatgaagtccagaaattcttgcatctcagtatgcatggtatatcccagattcttggccaatttgcctgtatgcccgagcaccgagactacgacagctttgtgtgtgtcctggtgagccgaggaggctcccagagtgtgtatggtgtggatcagactcactcagggctccccctgcatcacatcaggaggatgttcatgggagattcatgcccttatctagcagggaagccaaagatgttttttattcagaactatgtggtgtcagagggccagctggaggacagcagcctcttggaggtggatgggccagcgatgaagaatgtggaattcaaggctcagaagcgagggctgtgcacagttcaccgagaagctgacttcttctggagcctgtgtactgcggacatgtccctgctggagcagtctcacagctcaccatccctgtacctgcagtgcctctcccagaaactgagacaagaaagaaaacgcccactcctggatcttcacattgaactcaatggctacatgtatgattggaacagcagagtttctgccaaggagaaatattatgtctggctgcagcacactctgagaaagaaacttatcctctcctacacataagaaaccaaaaggctgggcgtagtggctcacacctgtaatcccagcactttgggaggccaaggagggcagatcacttcaggtcaggagttcgagaccagcctggccaacatggtaaacgctgtccctagtaaaaatacaaaaattagctgggtgtgggtgtgggtacctgtattcccagttacttgggaggctgaggtgggaggatcttttgaacccaggagttcagggtcatagcatgctgtgattgtgcctacgaatagccactgcataccaacctgggcaatatagcaagatcccatctctttaaaaaaaaaaaaaaaggacaggaactatcttactcaatgtattagtcatgtttctctagagggacagaactaataggatacatgtatataaaaaggggagtttattaaggagtattgactcacatgatcacagggttaggtcccacaataggtcatctgcaagcaaggaagccaattcaagtcccaaagctgaagaacttggagtccaatgtttgagggcaggaagcattcagcatgagagaaagatggaggccagaagactacaccagtctagtctttccatgttttgcctgcttttattctggcagtgctggcagctgattagatggtgcccacccagattgaggatggtctgcctttcccagtccactgactcaaatgttaaatctcctttggcagcaccctcacagatgtacccgggaacactttgcatccttctattcaatcaagttgatactcagtattaaccatcacagtccatttgggcaactataccaaattaccatagaccaggtgacttaaacagcagttatttctcacagttccggaggctgggaaatccaacatctaagtggtagcatatctggtgtctggtaaggcatgcttccagatcttaccagatgtcagtcttttgatgttctcacatggcagaaaaagaggatgcaaactctcaagtatatctttaagggcacaaattccattcatgagggctctaccctcatcacctaattacctcccaaaggccccaccttctgatactgtcactttggggatactgtctcccctttgaattctggggggaatacaaacattcagtttgtaacaatagccttatgatttagaggttacttgttcattcacctagacctcaaattgcattttacactacttgggaggctgaagtgagtggatcccctgagcccagagaggtcaaggttgtgatgagctgtgatcacaccactgcacttcagcatgggagacagagtgagaccctgtttcagaaaaaataaataaataaaaccaccagcaccacaaacaacaacaaaaagttattttgtacttgttttgagcacaggactcctgagggtatctttgcatttaatattacataggggtgccagtgggaagtaatgtgtatgcttggcctcatgagctaaaaccctgtgttaattatgacagaaggaaagtgtgtgagagggatcttaactacctagcagctctagctgccatcttgaaccatgaagatacgggccacacgtaggggtagctgggtagtgagcagcaagaagccttgttggatgagggcacgaaggagcagaatcactggaatcactgtgtcagccctaattacctacctctggacttttatgtgaggggaaaaaaaattgacagtttatatttatctcaacctagttaacccaagtgatgcattgttatgagattaaaatgtttggaggccgggtgcgatctcagctcacaatcactagtgaattcgcgaggccaaggcgggcggatcacgaggtcaggagatcaagaccatcctggctaacatgtaaaaccccgtctctactaaaaataca

SEQ ID NO: 366927 - DNA, 4174 bp, Homo sapiens
ggacgtcgaggcattacaatcgcgaaaccaagccatagcatgaaacagcgagcttgcagcctcaccgacgagtctcaactaaaagggactcccggagctaggggtggggactcggcctcacacagtgagtgccggctattggacttttgtccagtgacagctgagacaacaaggaccacgggaggaggtgtaggagagaagcgccgcgaacagcgatcgcccagcaccaagtccgcttccaggctttcggtttctttgcctccatcttgggtgcgccttcccggcgtctaggggagcgaaggctgaggtggcagcggcaggagagtccggccgcgacaggacgagtgctgatggcagagattggtgaggatttggataaatctgatgtgtcctcattaattttcctcatgaaggattacatgggccgaggcaagataagcaaggagaagagtttcttggaccttgtggttgagttggagaaactaaatctggttgccccagatcaactggatttattagaaaaatgcctaaagaacatccacagaatagacctgaagacaaaaatccagaagtacaagcagtctgttcaaggagcagggacaagttacaggaatgttctccaagcagcaatccaaaagagtctcaaggatccttcaaataacttcaggaagaaccagtgaagaaatccattcaggaatcagaagcttttttgcctcagagcatacctgaagagagatacaagatgaagagcaagcccctaggaatctgcctgataatcgattgcattggcaatgagacagagcttcttcgagacaccttcacttccctgggctatgaagtccagaaattcttgcatctcagtatgcatggtatatcccagattcttggccaatttgcctgtatgcccgagcaccgagactacgacagctttgtgtgtgtcctggtgagccgaggaggctcccagagtgtgtatggtgtggatcagactcactcagggctccccctgcatcacatcaggaggatgttcatgggagattcatgcccttatctagcagggaagccaaagatgttttttattcagaactatgtggtgtcagagggccagctggaggacagcagcctcttggaggtggatgggccagcgatgaagaatgtggaattcaaggctcagaagcgagggctgtgcacagttcaccgagaagctgacttcttctggagcctgtgtactgcggacatgtccctgctggagcagtctcacagctcaccatccctgtacctgcagtgcctctcccagaaactgagacaagaaagggggacaattcccggaagtggaattacagagtcaaaggacatgcatttttcaagcctcggatgcatcttactagatgtcctataggatggtcatatcagctttataggagagtagctgtgtccctgaattctccctgacactgcatgctcttatatttcctcaagttttgacaatttgataggtgaaaagtggtatctgactgttcagatctggaaggctttgttatataaacatttttttaatgtttattggcaagaatacttttctaagagaaacatcagtgagctggtttccatttaagctgaatgaagccacaatgtacctcaagtataagattaactggcctttttcagttgcactctaattacaatttagaatgatgtttctgagccacctgtcaaatgcattctgggctgtacctctgcgtaccccaggaataaatctcatggccttctttacctggcctccttagtggtggcccagcaggaagcgggggttagagcaggagccactcagccttccaagatagatactccatgggccggtggtattactggccttttgagcccatccccatttgcatagatgatccacgtgggttatcatctggctggtatgttcccagagtgaaactcagcagccccttgagggaggggatggtggccatcaggccagagtattgcaagttagtttggatcatttgctaagcagcttgtggtgccttcagaaaggaacagtttcaaagaactttcacatctgttggctcatttcgccctaatgacagtcttctctttgatatttgcatggcattaaattttgcctttcttgttttctccagaaaacgcccactcctggatcttcacattgaactcaatggctacatgtatgattggaacagcagagtttctgccaaggagaaatattatgtctggctgcagcacactctgagaaagaaacttatcctctcctacacataagaaaccaaaaggctgggcgtagtggctcacacctgtaatcccagcactttgggaggccaaggagggcagatcacttcaggtcaggagttcgagaccagcctggccaacatggtaaacgctgtccctagtaaaaatacaaaaattagctgggtgtgggtgtgggtacctgtattcccagttacttgggaggctgaggtgggaggatcttttgaacccaggagttcagggtcatagcatgctgtgattgtgcctacgaatagccactgcataccaacctgggcaatatagcaagatcccatctctttaaaaaaaaaaaaaaaggacaggaactatcttactcaatgtattagtcatgtttctctagagggacagaactaataggatacatgtatataaaaaggggagtttattaaggagtattgactcacatgatcacagggttaggtcccacaataggtcatctgcaagcaaggaagccaattcaagtcccaaagctgaagaacttggagtccaatgtttgagggcaggaagcattcagcatgagagaaagatggaggccagaagactacaccagtctagtctttccatgttttgcctgcttttattctggcagtgctggcagctgattagatggtgcccacccagattgaggatggtctgcctttcccagtccactgactcaaatgttaaatctcctttggcagcaccctcacagatgtacccgggaacactttgcatccttctattcaatcaagttgatactcagtattaaccatcacagtccatttgggcaactataccaaattaccatagaccaggtgacttaaacagcagttatttctcacagttccggaggctgggaaatccaacatctaagtggtagcatatctggtgtctggtaaggcatgcttccagatcttaccagatgtcagtcttttgatgttctcacatggcagaaaaagaggatgcaaactctcaagtatatctttaagggcacaaattccattcatgagggctctaccctcatcacctaattacctcccaaaggccccaccttctgatactgtcactttggggatactgtctcccctttgaattctggggggaatacaaacattcagtttgtaacaatagccttatgatttagaggttacttgttcattcacctagacctcaaattgcattttacactacttgggaggctgaagtgagtggatcccctgagcccagagaggtcaaggttgtgatgagctgtgatcacaccactgcacttcagcatgggagacagagtgagaccctgtttcagaaaaaataaataaataaaaccaccagcaccacaaacaacaacaaaaagttattttgtacttgttttgagcacaggactcctgagggtatctttgcatttaatattacataggggtgccagtgggaagtaatgtgtatgcttggcctcatgagctaaaaccctgtgttaattatgacagaaggaaagtgtgtgagagggatcttaactacctagcagctctagctgccatcttgaaccatgaagatacgggccacacgtaggggtagctgggtagtgagcagcaagaagccttgttggatgagggcacgaaggagcagaatcactggaatcactgtgtcagccctaattacctacctctggacttttatgtgaggggaaaaaaaattgacagtttatatttatctcaacctagttaacccaagtgatgcattgttatgagattaaaatgtttggaggccgggtgcgatctcagctcacaatcactagtgaattcgcgaggccaaggcgggcggatcacgaggtcaggagatcaagaccatcctggctaacatgtaaaaccccgtctctactaaaaataca

SEQ ID NO: 366928 - DNA, 3186 bp, Homo sapiens
gacgatgcccaccagcttgctgcccatggtacccgtctcagtgatggggatgccagagaagccatgacgcatcttggcctccaacacatcacccacagtgtgcaaggggctcagcaccacggggtgtgtgataaagcccggttcaaacttcttgaccttctgcacctcactggcctggaactctggggtgcagttgtggtgaatgaaaccagtacctcccatcagagccatcacgatggccaggtcggcctctgtcacagtgtccatgggggaggagatcagcggcgtcttcagagtgaccattgggtcagggctgaggtcaggtccacctcatcagctatgaagtctatgaatcctgggagaatcaagaagtcgttgtagttcaaggagcagggacaagttacaggaatgttctccaagcagcaatccaaaagagtctcaaggatccttcaaataacttcaggctccataatgggagaagtaaagaacaaagacttaaggaacagcttggcgctcaacaagaaccagtgaagaaatccattcaggaatcagaagcttttttgcctcagagcatacctgaagagagatacaagatgaagagcaagcccctaggaatctgcctgataatcgattgcattggcaatgagacagagcttcttcgagacaccttcacttccctgggctatgaagtccagaaattcttgcatctcagtatgcatggtatatcccagattcttggccaatttgcctgtatgcccgagcaccgagactacgacagctttgtgtgtgtcctggtgagccgaggaggctcccagagtgtgtatggtgtggatcagactcactcagggctccccctgcatcacatcaggaggatgttcatgggagattcatgcccttatctagcagggaagccaaagatgttttttattcagaactatgtggtgtcagagggccagctggaggacagcagcctcttggaggtggatgggccagcgatgaagaatgtggaattcaaggctcagaagcgagggctgtgcacagttcaccgagaagctgacttcttctggagcctgtgtactgcggacatgtccctgctggagcagtctcacagctcaccatccctgtacctgcagtgcctctcccagaaactgagacaagaaagaaaacgcccactcctggatcttcacattgaactcaatggctacatgtatgattggaacagcagagtttctgccaaggagaaatattatgtctggctgcagcacactctgagaaagaaacttatcctctcctacacataagaaaccaaaaggctgggcgtagtggctcacacctgtaatcccagcactttgggaggccaaggagggcagatcacttcaggtcaggagttcgagaccagcctggccaacatggtaaacgctgtccctagtaaaaatacaaaaattagctgggtgtgggtgtgggtacctgtattcccagttacttgggaggctgaggtgggaggatcttttgaacccaggagttcagggtcatagcatgctgtgattgtgcctacgaatagccactgcataccaacctgggcaatatagcaagatcccatctctttaaaaaaaaaaaaaaaggacaggaactatcttactcaatgtattagtcatgtttctctagagggacagaactaataggatacatgtatataaaaaggggagtttattaaggagtattgactcacatgatcacagggttaggtcccacaataggtcatctgcaagcaaggaagccaattcaagtcccaaagctgaagaacttggagtccaatgtttgagggcaggaagcattcagcatgagagaaagatggaggccagaagactacaccagtctagtctttccatgttttgcctgcttttattctggcagtgctggcagctgattagatggtgcccacccagattgaggatggtctgcctttcccagtccactgactcaaatgttaaatctcctttggcagcaccctcacagatgtacccgggaacactttgcatccttctattcaatcaagttgatactcagtattaaccatcacagtccatttgggcaactataccaaattaccatagaccaggtgacttaaacagcagttatttctcacagttccggaggctgggaaatccaacatctaagtggtagcatatctggtgtctggtaaggcatgcttccagatcttaccagatgtcagtcttttgatgttctcacatggcagaaaaagaggatgcaaactctcaagtatatctttaagggcacaaattccattcatgagggctctaccctcatcacctaattacctcccaaaggccccaccttctgatactgtcactttggggatactgtctcccctttgaattctggggggaatacaaacattcagtttgtaacaatagccttatgatttagaggttacttgttcattcacctagacctcaaattgcattttacactacttgggaggctgaagtgagtggatcccctgagcccagagaggtcaaggttgtgatgagctgtgatcacaccactgcacttcagcatgggagacagagtgagaccctgtttcagaaaaaataaataaataaaaccaccagcaccacaaacaacaacaaaaagttattttgtacttgttttgagcacaggactcctgagggtatctttgcatttaatattacataggggtgccagtgggaagtaatgtgtatgcttggcctcatgagctaaaaccctgtgttaattatgacagaaggaaagtgtgtgagagggatcttaactacctagcagctctagctgccatcttgaaccatgaagatacgggccacacgtaggggtagctgggtagtgagcagcaagaagccttgttggatgagggcacgaaggagcagaatcactggaatcactgtgtcagccctaattacctacctctggacttttatgtgaggggaaaaaaaattgacagtttatatttatctcaacctagttaacccaagtgatgcattgttatgagattaaaatgtttggaggccgggtgcgatctcagctcacaatcactagtgaattcgcgaggccaaggcgggcggatcacgaggtcaggagatcaagaccatcctggctaacatgtaaaaccccgtctctactaaaaataca

SEQ ID NO: 366929 - DNA, 3117 bp, Homo sapiens
gctgctagatatttggtttaacatgggtcattatcatggttggatcaatgtttaacatggcctgattagagctccattccatttcagttataaacatcacattttttaacataccgcccaaatgatgaaacccatggagtaccatggggttcaaacttaaataagctaattcaatagacaactagaaatgcccatgagtcttatcgtagaatttaacccgtttttattttgagagcttacttagattatgtagataaaggaaatgaccaactctaaaaatgcaatatttgtactagaagtacaagcagtctgttcaaggagcagggacaagttacaggaatgttctccaagcagcaatccaaaagagtctcaaggatccttcaaataacttcaggctccataatgggagaagtaaagaacaaagacttaaggaacagcttggcgctcaacaagaaccagtgaagaaatccattcaggaatcagaagcttttttgcctcagagcatacctgaagagagatacaagatgaagagcaagcccctaggaatctgcctgataatcgattgcattggcaatgagacagagcttcttcgagacaccttcacttccctgggctatgaagtccagaaattcttgcatctcagtatgcatggtatatcccagattcttggccaatttgcctgtatgcccgagcaccgagactacgacagctttgtgtgtgtcctggtgagccgaggaggctcccagagtgtgtatggtgtggatcagactcactcagggctccccctgcatcacatcaggaggatgttcatgggagattcatgcccttatctagcagggaagccaaagatgttttttattcagaactatgtggtgtcagagggccagctggaggacagcagcctcttggaggtggatgggccagcgatgaagaatgtggaattcaaggctcagaagcgagggctgtgcacagttcaccgagaagctgacttcttctggagcctgtgtactgcggacatgtccctgctggagcagtctcacagctcaccatccctgtacctgcagtgcctctcccagaaactgagacaagaaagaaaacgcccactcctggatcttcacattgaactcaatggctacatgtatgattggaacagcagagtttctgccaaggagaaatattatgtctggctgcagcacactctgagaaagaaacttatcctctcctacacataagaaaccaaaaggctgggcgtagtggctcacacctgtaatcccagcactttgggaggccaaggagggcagatcacttcaggtcaggagttcgagaccagcctggccaacatggtaaacgctgtccctagtaaaaatacaaaaattagctgggtgtgggtgtgggtacctgtattcccagttacttgggaggctgaggtgggaggatcttttgaacccaggagttcagggtcatagcatgctgtgattgtgcctacgaatagccactgcataccaacctgggcaatatagcaagatcccatctctttaaaaaaaaaaaaaaaggacaggaactatcttactcaatgtattagtcatgtttctctagagggacagaactaataggatacatgtatataaaaaggggagtttattaaggagtattgactcacatgatcacagggttaggtcccacaataggtcatctgcaagcaaggaagccaattcaagtcccaaagctgaagaacttggagtccaatgtttgagggcaggaagcattcagcatgagagaaagatggaggccagaagactacaccagtctagtctttccatgttttgcctgcttttattctggcagtgctggcagctgattagatggtgcccacccagattgaggatggtctgcctttcccagtccactgactcaaatgttaaatctcctttggcagcaccctcacagatgtacccgggaacactttgcatccttctattcaatcaagttgatactcagtattaaccatcacagtccatttgggcaactataccaaattaccatagaccaggtgacttaaacagcagttatttctcacagttccggaggctgggaaatccaacatctaagtggtagcatatctggtgtctggtaaggcatgcttccagatcttaccagatgtcagtcttttgatgttctcacatggcagaaaaagaggatgcaaactctcaagtatatctttaagggcacaaattccattcatgagggctctaccctcatcacctaattacctcccaaaggccccaccttctgatactgtcactttggggatactgtctcccctttgaattctggggggaatacaaacattcagtttgtaacaatagccttatgatttagaggttacttgttcattcacctagacctcaaattgcattttacactacttgggaggctgaagtgagtggatcccctgagcccagagaggtcaaggttgtgatgagctgtgatcacaccactgcacttcagcatgggagacagagtgagaccctgtttcagaaaaaataaataaataaaaccaccagcaccacaaacaacaacaaaaagttattttgtacttgttttgagcacaggactcctgagggtatctttgcatttaatattacataggggtgccagtgggaagtaatgtgtatgcttggcctcatgagctaaaaccctgtgttaattatgacagaaggaaagtgtgtgagagggatcttaactacctagcagctctagctgccatcttgaaccatgaagatacgggccacacgtaggggtagctgggtagtgagcagcaagaagccttgttggatgagggcacgaaggagcagaatcactggaatcactgtgtcagccctaattacctacctctggacttttatgtgaggggaaaaaaaattgacagtttatatttatctcaacctagttaacccaagtgatgcattgttatgagattaaaatgtttggaggccgggtgcgatctcagctcacaatcactagtgaattcgcgaggccaaggcgggcggatcacgaggtcaggagatcaagaccatcctggctaacatgtaaaaccccgtctctactaaaaataca

SEQ ID NO: 366930 - DNA, 3192 bp, Homo sapiens
caaaaaaagaaaaaaaaaagtgaccctgattattcattcattcatttagtaagcaggcactatggcatatgaatgcagtgactttcttaaaaggtttaggagccgaatacctagaagttaattcatatgaggctgcagaagtgcttcaaaaattactgtatgattaaatgccacaggataccacaagatattatagaattaaaaaaaggtgttgggattacaggtgtcagccatcgctcccggcctattttcatcttttaaaagcagaatttccctgttctttggtaatatgatacgggatttatggagttaacagctcttgctattctttagataatttaactgttgggacgatatttttatttttttcctgagttaagaatcctattgagacatttaaagaggtgtaatgtatagtgtacctctgaaataactaacaggaagtatgaccttattctttgtatttgaagctccataatgggagaagtaaagaacaaagacttaaggaacagcttggcgctcaacaagaaccagtgaagaaatccattcaggaatcagaagcttttttgcctcagagcatacctgaagagagatacaagatgaagagcaagcccctaggaatctgcctgataatcgattgcattggcaatgagacagagcttcttcgagacaccttcacttccctgggctatgaagtccagaaattcttgcatctcagtatgcatggtatatcccagattcttggccaatttgcctgtatgcccgagcaccgagactacgacagctttgtgtgtgtcctggtgagccgaggaggctcccagagtgtgtatggtgtggatcagactcactcagggctccccctgcatcacatcaggaggatgttcatgggagattcatgcccttatctagcagggaagccaaagatgttttttattcagaactatgtggtgtcagagggccagctggaggacagcagcctcttggaggtggatgggccagcgatgaagaatgtggaattcaaggctcagaagcgagggctgtgcacagttcaccgagaagctgacttcttctggagcctgtgtactgcggacatgtccctgctggagcagtctcacagctcaccatccctgtacctgcagtgcctctcccagaaactgagacaagaaagaaaacgcccactcctggatcttcacattgaactcaatggctacatgtatgattggaacagcagagtttctgccaaggagaaatattatgtctggctgcagcacactctgagaaagaaacttatcctctcctacacataagaaaccaaaaggctgggcgtagtggctcacacctgtaatcccagcactttgggaggccaaggagggcagatcacttcaggtcaggagttcgagaccagcctggccaacatggtaaacgctgtccctagtaaaaatacaaaaattagctgggtgtgggtgtgggtacctgtattcccagttacttgggaggctgaggtgggaggatcttttgaacccaggagttcagggtcatagcatgctgtgattgtgcctacgaatagccactgcataccaacctgggcaatatagcaagatcccatctctttaaaaaaaaaaaaaaaggacaggaactatcttactcaatgtattagtcatgtttctctagagggacagaactaataggatacatgtatataaaaaggggagtttattaaggagtattgactcacatgatcacagggttaggtcccacaataggtcatctgcaagcaaggaagccaattcaagtcccaaagctgaagaacttggagtccaatgtttgagggcaggaagcattcagcatgagagaaagatggaggccagaagactacaccagtctagtctttccatgttttgcctgcttttattctggcagtgctggcagctgattagatggtgcccacccagattgaggatggtctgcctttcccagtccactgactcaaatgttaaatctcctttggcagcaccctcacagatgtacccgggaacactttgcatccttctattcaatcaagttgatactcagtattaaccatcacagtccatttgggcaactataccaaattaccatagaccaggtgacttaaacagcagttatttctcacagttccggaggctgggaaatccaacatctaagtggtagcatatctggtgtctggtaaggcatgcttccagatcttaccagatgtcagtcttttgatgttctcacatggcagaaaaagaggatgcaaactctcaagtatatctttaagggcacaaattccattcatgagggctctaccctcatcacctaattacctcccaaaggccccaccttctgatactgtcactttggggatactgtctcccctttgaattctggggggaatacaaacattcagtttgtaacaatagccttatgatttagaggttacttgttcattcacctagacctcaaattgcattttacactacttgggaggctgaagtgagtggatcccctgagcccagagaggtcaaggttgtgatgagctgtgatcacaccactgcacttcagcatgggagacagagtgagaccctgtttcagaaaaaataaataaataaaaccaccagcaccacaaacaacaacaaaaagttattttgtacttgttttgagcacaggactcctgagggtatctttgcatttaatattacataggggtgccagtgggaagtaatgtgtatgcttggcctcatgagctaaaaccctgtgttaattatgacagaaggaaagtgtgtgagagggatcttaactacctagcagctctagctgccatcttgaaccatgaagatacgggccacacgtaggggtagctgggtagtgagcagcaagaagccttgttggatgagggcacgaaggagcagaatcactggaatcactgtgtcagccctaattacctacctctggacttttatgtgaggggaaaaaaaattgacagtttatatttatctcaacctagttaacccaagtgatgcattgttatgagattaaaatgtttggaggccgggtgcgatctcagctcacaatcactagtgaattcgcgaggccaaggcgggcggatcacgaggtcaggagatcaagaccatcctggctaacatgtaaaaccccgtctctactaaaaataca

SEQ ID NO: 366931 - DNA, 1342 bp, Homo sapiens
ttgtttgttcaaggccacgtgggtggagtcattgaggtggaggtttaactctgtgacataagtttccctgatttagtcaggctgtctgtcgttgggcttttcccacttccttctactacgtacttcttccctattcctcctactgaggccattaaacccttagttgtaattttccctgaacatgctttacattctgatgaattctgaaaaagaatgtggggtttccttgcagatgagttcatctgttgtttcatttcctttacaatgtaggttttcttctctgtctttttggattagtctgtttttggttctgtctaccaaggatccctttctttagacttctatagatccctttctatagaacttaatctacttaagtcagggagaccacccagaaggaaagagcccatactttcaatcttaggcataagttagcttgataagattttcagaaaaattcccttttaaccacagaactcccccactggaaaggattctgaaagaaatgaagtcagccctcagaaatgaagttgactgcctgctggctttctgttgactggcccggagctgtactgcaagacccttgtgagcttccctagtctaagagtaggatgtctgctgaagtcatccatcaggttgaagaagcacttgatacagatgagaaggagatgctgctctttttgtgccgggatgttgctatagatgtggttccacctaatgtcagggaccttctggatattttacgggaaagaggtaagctgtctgtcggggacttggctgaactgctctacagagtgaggcgatttgacctgctcaaacgtatcttgaagatggacagaaaagctgtggagacccacctgctcaggaaccctcaccttgtttcggactatagagtgctgatggcagagattggtgaggatttggataaatctgatgtgtcctcattaattttcctcatgaaggattacatgggccgaggcaagataagcaaggagaagagtttcttggaccttgtggttgagttggagaaactaaatctggttgccccagatcaactggatttattagaaaaatgcctaaagaacatccacagaatagacctgaagacaaaaatccagaagtacaagcagtctgttcaaggagcagggacaagttacaggaatgttctccaagcagcaatccaaaagagtctcaaggatccttcaaataacttcaggatgataacaccctatgcccattgtcctgatctgaaaattcttggaaattgttccatgtgattaacatggaactgcctctacttaatcattctgaatgattaaatcgtttcattttctaaatgtgt

SEQ ID NO: 366932 - DNA, 1528 bp, Homo sapiens
ttgtttgttcaaggccacgtgggtggagtcattgaggtggaggtttaactctgtgacataagtttccctgatttagtcaggctgtctgtcgttgggcttttcccacttccttctactacgtacttcttccctattcctcctactgaggccattaaacccttagttgtaattttccctgaacatgctttacattctgatgaattctgaaaaagaatgtggggtttccttgcagatgagttcatctgttgtttcatttcctttacaatgtaggttttcttctctgtctttttggattagtctgtttttggttctgtctaccaaggatccctttctttagacttctatagatccctttctatagaacttaatctacttaagtcagggagaccacccagaaggaaagagcccatactttcaatcttaggcataagttagcttgataagattttcagaaaaattcccttttaaccacagaactcccccactggaaaggattctgaaagaaatgaagtcagccctcagaaatgaagttgactgcctgctggctttctgttgactggcccggagctgtactgcaagacccttgtgagcttccctagtctaagagtaggatgtctgctgaagtcatccatcaggttgaagaagcacttgatacagatgagaaggagatgctgctctttttgtgccgggatgttgctatagatgtggttccacctaatgtcagggaccttctggatattttacgggaaagaggtaagctgtctgtcggggacttggctgaactgctctacagagtgaggcgatttgacctgctcaaacgtatcttgaagatggacagaaaagctgtggagacccacctgctcaggaaccctcaccttgtttcggactatagagtgctgatggcagagattggtgaggatttggataaatctgatgtgtcctcattaattttcctcatgaaggattacatgggccgaggcaagataagcaaggagaagagtttcttggaccttgtggttgagttggagaaactaaatctggttgccccagatcaactggatttattagaaaaatgcctaaagaacatccacagaatagacctgaagacaaaaatccagaagtacaagcagtctggtggatggaatggaacctggatgaccaaagcctcctttagcttgtggctagaaatcgcgtccctttatattcttcatatcccagatctgccaactccattgccctgtatattcatgatctctgcaaaatgctgccaagcagttcttaacatttcagtcttcaagaaagaatctgggatctgcacaggctggcagagctatggacattcaggggttttgcatgtatgctgaaccctactgccttgctctggtatttggcctcacaaccactgtccaacttcgggtgatgtcacttgggtctcataccttccttgcatgtgtcccaagtttcacaaaacctccttatggaaaagagcacattcgatttcttccttgataaaagggaccagattcca

SEQ ID NO: 366933 - DNA, 1205 bp, Homo sapiens
tcgctctagagtatcccctccccgtacgcccaagagggagaccgtggaaagagagagagagggagaccgtggggagagggagaagagagggagggggagagggctatttttaaaattttttaaaattgctgaacaggggtacctctgggcagtgtgtcagaataccactttttaaatattttatgatttatttatttttctatttcttgaggttttaactgatgtgtatctgtatgtctatttgtgtatattttgtcatgatcatgtaacagagtctgaaaagtgtcgaagagacagttttcaggaacaacaagcaattattcctactttccaagttattttgatgccatggtggctcatacctataatctgagtactttgggaggctgaggtggactgatcacttgagcccaggagtttgagaccagcctgggcaacatagcaagactccatctctacaaaaaaagacaaaatttagctgagcgtggtggcgtgttcctgtagtcccagctacttgggaggctgaagtgagtggatcccctgagcccagagaggtcaaggttgtgatgagctgtgatcacaccactgcacttcagcatgggagacagagtgagaccctgtttcagaaaaaataaataaataaaaccaccagcaccacaaacaacaacaaaaagttattttgtacttgttttgagcacaggactcctgagggtatctttgcatttaatattacataggggtgccagtgggaagtaatgtgtatgcttggcctcatgagctaaaaccctgtgttaattatgacagaaggaaagtgtgtgagagggatcttaactacctagcagctctagctgccatcttgaaccatgaagatacgggccacacgtaggggtagctgggtagtgagcagcaagaagccttgttggatgagggcacgaaggagcagaatcactggaatcactgtgtcagccctaattacctacctctggacttttatgtgaggggaaaaaaaattgacagtttatatttatctcaacctagttaacccaagtgatgcattgttatgagattaaaatgtttggaggccgggtgcgatctcagctcacaatcactagtgaattcgcgaggccaaggcgggcggatcacgaggtcaggagatcaagaccatcctggctaacatgtaaaaccccgtctctactaaaaataca

SEQ ID NO: 366934 - DNA, 1364 bp, Homo sapiens
gggaggccgaggctggcagatcactcgcagtcaggagctggagaccagcccggccaacacagtgaaaccctgtctccaccaaaaaaatacgaaaaccagtcaggcgtggcggcgcccgcaatggcaggcacgcggcaggccgaggcgggagaatcaggcagggaggctgcagtgagccgagatggcagcagtacagtccagcttcggctcggcatcagagggagaccgtggggagagggagaagagagggagggggagagggctatttttaaaattttttaaaattgctgaacaggggtacctctgggcagtgtgtcagaataccactttttaaatattttatgatttatttatttttctatttcttgaggttttaactgatgtgtatctgtatgtctatttgtgtatattttgtcatgatcatgtaacagagtctgaaaagtgtcgaagagacagttttcaggaacaacaagcaattattcctactttccaagttattttgatgccatggtggctcatacctataatctgagtactttgggaggctgaggtggactgatcacttgagcccaggagtttgagaccagcctgggcaacatagcaagactccatctctacaaaaaaagacaaaatttagctgagcgtggtggcgtgttcctgtagtcccagctacttgggaggctgaagtgagtggatcccctgagcccagagaggtcaaggttgtgatgagctgtgatcacaccactgcacttcagcatgggagacagagtgagaccctgtttcagaaaaaataaataaataaaaccaccagcaccacaaacaacaacaaaaagttattttgtacttgttttgagcacaggactcctgagggtatctttgcatttaatattacataggggtgccagtgggaagtaatgtgtatgcttggcctcatgagctaaaaccctgtgttaattatgacagaaggaaagtgtgtgagagggatcttaactacctagcagctctagctgccatcttgaaccatgaagatacgggccacacgtaggggtagctgggtagtgagcagcaagaagccttgttggatgagggcacgaaggagcagaatcactggaatcactgtgtcagccctaattacctacctctggacttttatgtgaggggaaaaaaaattgacagtttatatttatctcaacctagttaacccaagtgatgcattgttatgagattaaaatgtttggaggccgggtgcgatctcagctcacaatcactagtgaattcgcgaggccaaggcgggcggatcacgaggtcaggagatcaagaccatcctggctaacatgtaaaaccccgtctctactaaaaataca

SEQ ID NO: 366935 - DNA, 1200 bp, Homo sapiens
ttcctctacaacttgatgaattttatttcattttcttgtgtaattgccctgctagaatctccaggacaatgttgagtaaaagtgatgagagtggacatccttatctaccttctgatgttagggagaaaacattattttttttttcactaatgagtaagatgttggctgtaggtttttcatagattgctatttttctatttcttgaggttttaactgatgtgtatctgtatgtctatttgtgtatattttgtcatgatcatgtaacagagtctgaaaagtgtcgaagagacagttttcaggaacaacaagcaattattcctactttccaagttattttgatgccatggtggctcatacctataatctgagtactttgggaggctgaggtggactgatcacttgagcccaggagtttgagaccagcctgggcaacatagcaagactccatctctacaaaaaaagacaaaatttagctgagcgtggtggcgtgttcctgtagtcccagctacttgggaggctgaagtgagtggatcccctgagcccagagaggtcaaggttgtgatgagctgtgatcacaccactgcacttcagcatgggagacagagtgagaccctgtttcagaaaaaataaataaataaaaccaccagcaccacaaacaacaacaaaaagttattttgtacttgttttgagcacaggactcctgagggtatctttgcatttaatattacataggggtgccagtgggaagtaatgtgtatgcttggcctcatgagctaaaaccctgtgttaattatgacagaaggaaagtgtgtgagagggatcttaactacctagcagctctagctgccatcttgaaccatgaagatacgggccacacgtaggggtagctgggtagtgagcagcaagaagccttgttggatgagggcacgaaggagcagaatcactggaatcactgtgtcagccctaattacctacctctggacttttatgtgaggggaaaaaaaattgacagtttatatttatctcaacctagttaacccaagtgatgcattgttatgagattaaaatgtttggaggccgggtgcgatctcagctcacaatcactagtgaattcgcgaggccaaggcgggcggatcacgaggtcaggagatcaagaccatcctggctaacatgtaaaaccccgtctctactaaaaataca

SEQ ID NO: 366936 - DNA, 1551 bp, Homo sapiens
gtgttagctccagccaccagtgagtcaggagaggctttctaggcaaagacatctaagttcagaatccttgtgatccagatgcctgtaccctttgagttcagaggtgggccagggtatctcaggtatttctttcctttagcatcttgcaattcaaaatatggtccttgaatcaacatcacctgagagcttgttaaacagagaaggctacttcaaattctatttctgtcttttatgttagtcatttgggttcttaagtcatttcactgtaacctctgggggagctaggggattctttaaggaagtttccattctctgagttgttttcagaaactgttagttggcaaaggatgtaccatctcctattaaacgggcaaggacaagttcccttttctgaggtcccttaagatctcttcctggggtgatctaggcttgctgttttatgagggagggacatatttacacaggggcaagaactagtcttttaatccattgttgcataggggaggcgtgggcacttggagttgtcttaggactgatgtctgaattaactaaatgaacttgtctggtttgcagagtgctgatggcagagattggtgaggatttggataaatctgatgtgtcctcattaattttcctcatgaaggattacatgggccgaggcaagataagcaaggagaagagtttcttggaccttgtggttgagttggagaaactaaatctggttgccccagatcaactggatttattagaaaaatgcctaaagaacatccacagaatagacctgaagacaaaaatccagaagtacaagcagtctgttcaaggagcagggacaagttacaggaatgttctccaagcagcaatccaaaagagtctcaaggatccttcaaataacttcaggatgataacaccctatgcccattgtcctgatctgattctgaatgattaaatcgtttcattttctaaatgtgttataatgtgtttagccctttcttgttgctgtatgtttagatgctttccaatcttttgttactactaataatgctataaaataaatatccttgtacttctttgtgcatttgtttttttactgagctaattttaatgatttcagcaaaagttattttgttattgagtgatgaaacaaaagatttttgagggtgttcatgagcataagtatcatatagtcacttatggttgttgtgttcctagtacttagtacaaggtatcggaattgttctttagttaatcttttatcttgagaagttaaatcttggtgtaatcttatcctcatgttcatataaagatatgtggagtttgtagtgaggacttagagccgggtacaatttcatggttaaattagaaatgcttttggcagtgttaacagctcttttagaatttgtctagcaggcttttcagtttttgccagaaagccctaaaaaaaaagaaggaaaaaaatgcttttggctgagtgtggtggctcacgcctgtaatcccagcactttgggaggccgaggcaagcggatcgcttgagcccaggagttcgagacaaac

SEQ ID NO: 366937 - DNA, 1306 bp, Homo sapiens
atcttttttttttttttttttttttgagacagcatttcactcttgttgcccaggctggaatgcaatggcactatctctgctcaccgcaacctccgcctgtcgggttcaagcgattctcgtgcctcagcctctcaagtagctgagattacaggcatgcaccaccatgcccggctagttttgtatttttaatagagacggggtttctccatgttggtcagtctggtctcgaactcctgaccttaggtgatccgcccgcctcggcatcccaaagtgctgggattacaggcgtgagccaccatgcccggcccaactccaagatctaaacaaaaaagactgggttgaaagggagtttttaatgtttactgtttgctttacatccattttcttgttttgttaatacttgctttacttaagcttttgggtcaaatgtcctcgttaaaatggctttctctagcgactttatgttttacgtttctgtttgtaactgacatttgaccttcttttaacacggtattacttgcttccttataccggtttccaaggtgaagccatttgcagggtcgctgggtttccccctccccccgaaagtcttgcgcgacccggggtgggccggatagtgtgcagttttttgagccttgggctggggacctccaggaagctgaagcggaaattgcctaggcccctggggcattggaggtcctaccgcagctcctagtaggtggtgggggcgcagcggctgtccccactcagtcctggtggggtcgcacgtaacggtcctgagctatgcataagccgtttgaccacgcatggagaattttaccacccagagacacgcgagtggccctgtgcaagtttcaactgcgcggggggcggggaattccgcagacaggattctagaatttatgtcttgtgtggtaacatttcagccggtgggtggcggggattaggcgtgaagcggttcagcaggcagaggttctcggacgccctccggcgaagccacctgttgatgcttttgactttctgtccttgttcctcgtcccatctggagcatttccaattctggttttgcggagcagcaggtctgagcttgtccggcgagggtgggagttggtcccggcggagatccagtgggaagagccggcggctgcccgggcgtctccttgagcctccagaggactcacaacactccggggcatgttgctctttcaaataccaggaatggactctggggaatggggcacccttgaagtctgattatttcttccctgtagagccccaggggctaattaaactcgtgtttatggaa

SEQ ID NO: 366938 - DNA, 498 bp, Homo sapiens
tcgctctagagtatcccctccccgtacgcccaagagggagaccgtggaaagagagagagagggagaccgtggggagagggagaagagagggagggggagagggctatttttaaaattttttaaaattgctgaacaggggtacctctgggcagtgtgtcagaataccactttttaaatattttatgatttatttatttttctatttcttgaggttttaactgatgtgtatctgtatgtctatttgtgtatattttgtcatgatcatgtaacagagtctgaaaagtgtcgaagagacagttttcaggaacaacaagcaattattcctactttccaagttattttgatgccatggtggctcatacctataatctgagtactttgggaggctgaggcagaagactcgcttgaacccaggaggtggaggttgcagtgagctgagatcacgccattgcactccagcctgggtgacagagcgagatgctgtctcaaaaaaaaaaa

SEQ ID NO: 366939 - DNA, 866 bp, Homo sapiens
aagtgatcctccacctctgcctcctgagtagctgggaccacaggtgtgtgccaacacactcagcttattttttttattttttgtagagatgggggtctcactattttgctcaggctggtctcaaactcttgggctcaagcagtcttcctgcctcagcctccaaagtgctgggattacaggtatgaacttctgcacctggcctagctagctctattgacatttgttttttgttggtggttctcttagagtttcttggaccttgtggttgagttggagaaactaaatctggttgccccagatcaactggatttattagaaaaatgcctaaagaacatccacagaatagacctgaagacaaaaatccagaagtacaagcagtctggtaagaattttggcctctcagtggtctaggggaagtactctgtgcatgggggtgggcatcatgactgataaatattcatttgttggataggtggatggaatggaacctggatgaccaaagcctcctttagcttgtggctagaaatcgcgtccctttatattcttcatatcccagatctgccaactccattgccctgtatattcatgatctctgcaaaatgctgccaagcagttcttaacatttcagtcttcaagaaagaatctgggatctgcacaggctggcagagctatggacattcaggggttttgcatgtatgctgaaccctactgccttgctctggtatttggcctcacaaccactgtccaacttcgggtgatgtcacttgggtctcataccttccttgcatgtgtcccaagtttcacaaaacctccttatggaaaagagcacattcgatttcttccttgataaaagggaccagattcca

SEQ ID NO: 366940 - DNA, 425 bp, Homo sapiens
cactcagaagagagaaagattgtgaggtctggacttcaataagaagattgttgaagaaaaaaaggttttgtccccccttggtttgattggactagagtgggctcagtctgtgcctgtggctggcatcaggcaggaacagtggtatagcagggtatagaccatatttagggacctaaaatcacatctttcatgattcatgtggttcttgttccaactgcccaggactcaggcacatcaaaatatgacacaaaagcagaagcttttcataatggagattagaccatgtctaggattcctacccagtcctcttgagctctcctcactccagtgttgttttccgtgtttgttttttgttttccccagagcttcttcgagacaccttcacttccctgggctatgaagtccagaaattcttgcatctcagt

SEQ ID NO: 366941 - DNA, 2229 bp, Homo sapiens
ggacgtcgaggcattacaatcgcgaaaccaagccatagcatgaaacagcgagcttgcagcctcaccgacgagtctcaactaaaagggactcccggagctaggggtggggactcggcctcacacagtgagtgccggctattggacttttgtccagtgacagctgagacaacaaggaccacgggaggaggtgtaggagagaagcgccgcgaacagcgatcgcccagcaccaagtccgcttccaggctttcggtttctttgcctccatcttgggtgcgccttcccggcgtctaggggagcgaaggctgaggtggcagcggcaggagagtccggccgcgacaggacgaactcccccactggaaaggattctgaaagaaatgaagtcagccctcagaaatgaagttgactgcctgctggctttctgttgactggcccggagctgtactgcaagacccttgtgagcttccctagtctaagagtaggatgtctgctgaagtcatccatcaggttgaagaagcacttgatacagatgagaaggagatgctgctctttttgtgccgggatgttgctatagatgtggttccacctaatgtcagggaccttctggatattttacgggaaagaggtaagctgtctgtcggggacttggctgaactgctctacagagtgaggcgatttgacctgctcaaacgtatcttgaagatggacagaaaagctgtggagacccacctgctcaggaaccctcaccttgtttcggactatagagtgctgatggcagagattggtgaggatttggataaatctgatgtgtcctcattaattttcctcatgaaggattacatgggccgaggcaagataagcaaggagaagagtttcttggaccttgtggttgagttggagaaactaaatctggttgccccagatcaactggatttattagaaaaatgcctaaagaacatccacagaatagacctgaagacaaaaatccagaagtacaagcagtctgttcaaggagcagggacaagttacaggaatgttctccaagcagcaatccaaaagagtctcaaggatccttcaaataacttcaggctccataatgggagaagtaaagaacaaagacttaaggaacagcttggcgctcaacaagaaccagtgaagaaatccattcaggaatcagaagcttttttgcctcagagcatacctgaagagagatacaagatgaagagcaagcccctaggaatctgcctgataatcgattgcattggcaatgagacagagcttcttcgagacaccttcacttccctgggctatgaagtccagaaattcttgcatctcagtatgcatggtatatcccagattcttggccaatttgcctgtatgcccgagcaccgagactacgacagctttgtgtgtgtcctggtgagccgaggaggctcccagagtgtgtatggtgtggatcagactcactcagggctccccctgcatcacatcaggaggatgttcatgggagattcatgcccttatctagcagggaagccaaagatgttttttattcagaactatgtggtgtcagagggccagctggaggacagcagcctcttggaggtggatgggccagcgatgaagaatgtggaattcaaggctcagaagcgagggctgtgcacagttcaccgagaagctgacttcttctggagcctgtgtactgcggacatgtccctgctggagcagtctcacagctcaccatccctgtacctgcagtgcctctcccagaaactgagacaagaaagaaaacgcccactcctggatcttcacattgaactcaatggctacatgtatgattggaacagcagagtttctgccaaggagaaatattatgtctggctgcagcacactctgagaaagaaacttatcctctcctacacataagaaaccaaaaggctgggcgtagtggctcacacctgtaatcccagcactttgggaggccaaggagggcagatcacttcaggtcaggagttcgagaccagcctggccaacatggtaaacgctgtccctagtaaaaatacaaaaattagctgggtgtgggtgtgggtacctgtattcccagttacttgggaggctgaggtgggaggatcttttgaacccaggagttcagggtcatagcatgctgtgattgtgcctacgaatagccactgcataccaacctgggcaatatagcaagatcccatctcttta

SEQ ID NO: 366942 - DNA, 1311 bp, Homo sapiens
ggacgtcgaggcattacaatcgcgaaaccaagccatagcatgaaacagcgagcttgcagcctcaccgacgagtctcaactaaaagggactcccggagctaggggtggggactcggcctcacacagtgagtgccggctattggacttttgtccagtgacagctgagacaacaaggaccacgggaggaggtgtaggagagaagcgccgcgaacagcgatcgcccagcaccaagtccgcttccaggctttcggtttctttgcctccatcttgggtgcgccttcccggcgtctaggggagcgaaggctgaggtggcagcggcaggagagtccggccgcgacaggacgaactcccccactggaaaggattctgaaagaaatgaagtcagccctcagaaatgaagttgactgcctgctggctttctgttgactggcccggagctgtactgcaagacccttgtgagcttccctagtctaagagtaggatgtctgctgaagtcatccatcaggttgaagaagcacttgatacagatgagaaggagatgctgctctttttgtgccgggatgttgctatagatgtggttccacctaatgtcagggaccttctggatattttacgggaaagaggtaagctgtctgtcggggacttggctgaactgctctacagagtgaggcgatttgacctgctcaaacgtatcttgaagatggacagaaaagctgtggagacccacctgctcaggaaccctcaccttgtttcggactatagagtgctgatggcagagattggtgaggatttggataaatctgatgtgtcctcattaattttcctcatgaaggattacatgggccgaggcaagataagcaaggagaagagtttcttggaccttgtggttgagttggagaaactaaatctggttgccccagatcaactggatttattagaaaaatgcctaaagaacatccacagaatagacctgaagacaaaaatccagaagtacaagcagtctgttcaaggagcagggacaagttacaggaatgttctccaagcagcaatccaaaagagtctcaaggatccttcaaataacttcaggatgataacaccctatgcccattgtcctgatctgaaaattcttggaaattgttccatgtgattaacatggaactgcctctacttaatcattctgaatgattaaatcgtttcattttctaaatgtgttataatgtgtttagccctttcttgttgctgtatgtttagatgctttccaatcttttgttactactaataatgctataaaataaatatccttgtacttctt

SEQ ID NO: 366943 - DNA, 836 bp, Homo sapiens
gacgatgcccaccagcttgctgcccatggtacccgtctcagtgatggggatgccagagaagccatgacgcatcttggcctccaacacatcacccacagtgtgcaaggggctcagcaccacggggtgtgtgataaagcccggttcaaacttcttgaccttctgcacctcactggcctggaactctggggtgcagttgtggtgaatgaaaccagtacctcccatcagagccatcacgatggccaggtcggcctctgtcacagtgtccatgggggaggagatcagcggcgtcttcagagtgaccattgggtcagggctgaggtcaggtccacctcatcagctatgaagtctatgaatcctgggagaatcaagaagtcgttgtaggtgagtccctggtcactggcgaagagctgctgcacggtgtggggaaaagaaagagagatcagattgttactgtgtctgtgtagaaagaagtagacataggagactccattttgttctgtactaagaaaaattctgcctcgagatgctgttaatctgtaaccttacccccaaccctgtgctccctgaaacatgtgctatgtcaactcagggttaagtggattaagggctgtgcaagatgtgctttgttaaacagatgcttgaaggcagcgtgctcgttaagagtcatcaccactccctaatctcaagtacccagggacacaaacactgcggaaggccgcagggacctctgcctaggaaagccaggtattgtccaaggtttctccccatgtgatagtctgaaatatggcctcatgggaagggaaagacctgaccgtcccccagcccgacacccataa

SEQ ID NO: 366944 - DNA, 2067 bp, Homo sapiens
ggacgtcgaggcattacaatcgcgaaaccaagccatagcatgaaacagcgagcttgcagcctcaccgacgagtctcaactaaaagggactcccggagctaggggtggggactcggcctcacacagtgagtgccggctattggacttttgtccagtgacagctgagacaacaaggaccacgggaggaggtgtaggagagaagcgccgcgaacagcgatcgcccagcaccaagtccgcttccaggctttcggtttctttgcctccatcttgggtgcgccttcccggcgtctaggggagcgaaggctgaggtggcagcggcaggagagtccggccgcgacaggacgaactcccccactggaaaggattctgaaagaaatgaagtcagccctcagaaatgaagttgactgcctgctggctttctgttgactggcccggagctgtactgcaagacccttgtgagcttccctagtctaagagtaggatgtctgctgaagtcatccatcaggttgaagaagcacttgatacagatgagaaggagatgctgctctttttgtgccgggatgttgctatagatgtggttccacctaatgtcagggaccttctggatattttacgggaaagaggtaagctgtctgtcggggacttggctgaactgctctacagagtgaggcgatttgacctgctcaaacgtatcttgaagatggacagaaaagctgtggagacccacctgctcaggaaccctcaccttgtttcggactatagagtgctgatggcagagattggtgaggatttggataaatctgatgtgtcctcattaattttcctcatgaaggattacatgggccgaggcaagataagcaaggagaagagtttcttggaccttgtggttgagttggagaaactaaatctggttgccccagatcaactggatttattagaaaaatgcctaaagaacatccacagaatagacctgaagacaaaaatccagaagtacaagcagtctgttcaaggagcagggacaagttacaggaatgttctccaagcagcaatccaaaagagtctcaaggatccttcaaataacttcaggctccataatgggagaagtaaagaacaaagacttaaggaacagcttggcgctcaacaagaaccagtgaagaaatccattcaggaatcagaagcttttttgcctcagagcatacctgaagagagatacaagatgaagagcaagcccctaggaatctgcctgataatcgattgcattggcaatgagacagagcttcttcgagacaccttcacttccctgggctatgaagtccagaaattcttgcatctcagtatgcatggtatatcccagattcttggccaatttgcctgtatgcccgagcaccgagactacgacagctttgtgtgtgtcctggtgagccgaggaggctcccagagtgtgtatggtgtggatcagactcactcagggctccccctgcatcacatcaggaggatgttcatgggagattcatgcccttatctagcagggaagccaaagatgttttttattcagaactatgtggtgtcagagggccagctggaggacagcagcctcttggaggtggatgggccagcgatgaagaatgtggaattcaaggctcagaagcgagggctgtgcacagttcaccgagaagctgacttcttctggagcctgtgtactgcggacatgtccctgctggagcagtctcacagctcaccatccctgtacctgcagtgcctctcccagaaactgagacaagaaagaaaacgcccactcctggatcttcacattgaactcaatggctacatgtatgattggaacagcagagtttctgccaaggagaaatattatgtctggctgcagcacactctgagaaagaaacttatcctctcctacacataagaaaccaaaaggctgggcgtagtggctcacacctgtaatcccagcactttgggaggccaaggagggcagatcacttcaggtcaggagttcgagaccagcctggccaacatggtaaacgctgtccctagtaaaaatacaaaaatt

SEQ ID NO: 366945 - DNA, 3835 bp, Homo sapiens
ggacgtcgaggcattacaatcgcgaaaccaagccatagcatgaaacagcgagcttgcagcctcaccgacgagtctcaactaaaagggactcccggagctaggggtggggactcggcctcacacagtgagtgccggctattggacttttgtccagtgacagctgagacaacaaggaccacgggaggaggtgtaggagagaagcgccgcgaacagcgatcgcccagcaccaagtccgcttccaggctttcggtttctttgcctccatcttgggtgcgccttcccggcgtctaggggagcgaaggctgaggtggcagcggcaggagagtccggccgcgacaggacgaactcccccactggaaaggattctgaaagaaatgaagtcagccctcagaaatgaagttgactgcctgctggctttctgttgactggcccggagctgtactgcaagacccttgtgagcttccctagtctaagagtaggatgtctgctgaagtcatccatcaggttgaagaagcacttgatacagatgagaaggagatgctgctctttttgtgccgggatgttgctatagatgtggttccacctaatgtcagggaccttctggatattttacgggaaagaggtaagctgtctgtcggggacttggctgaactgctctacagagtgaggcgatttgacctgctcaaacgtatcttgaagatggacagaaaagctgtggagacccacctgctcaggaaccctcaccttgtttcggactatagagtgctgatggcagagattggtgaggatttggataaatctgatgtgtcctcattaattttcctcatgaaggattacatgggccgaggcaagataagcaaggagaagagtttcttggaccttgtggttgagttggagaaactaaatctggttgccccagatcaactggatttattagaaaaatgcctaaagaacatccacagaatagacctgaagacaaaaatccagaagtacaagcagtctgttcaaggagcagggacaagttacaggaatgttctccaagcagcaatccaaaagagtctcaaggatccttcaaataacttcaggctccataatgggagaagtaaagaacaaagacttaaggaacagcttggcgctcaacaagaaccagtgaagaaatccattcaggaatcagaagcttttttgcctcagagcatacctgaagagagatacaagatgaagagcaagcccctaggaatctgcctgataatcgattgcattggcaatgagacagagcttcttcgagacaccttcacttccctgggctatgaagtccagaaattcttgcatctcagtatgcatggtatatcccagattcttggccaatttgcctgtatgcccgagcaccgagactacgacagctttgtgtgtgtcctggtgagccgaggaggctcccagagtgtgtatggtgtggatcagactcactcagggctccccctgcatcacatcaggaggatgttcatgggagattcatgcccttatctagcagggaagccaaagatgttttttattcagaactatgtggtgtcagagggccagctggaggacagcagcctcttggaggtggatgggccagcgatgaagaatgtggaattcaaggctcagaagcgagggctgtgcacagttcaccgagaagctgacttcttctggagcctgtgtactgcggacatgtccctgctggagcagtctcacagctcaccatccctgtacctgcagtgcctctcccagaaactgagacaagaaagaaaacgcccactcctggatcttcacattgaactcaatggctacatgtatgattggaacagcagagtttctgccaaggagaaatattatgtctggctgcagcacactctgagaaagaaacttatcctctcctacacataagaaaccaaaaggctgggcgtagtggctcacacctgtaatcccagcactttgggaggccaaggagggcagatcacttcaggtcaggagttcgagaccagcctggccaacatggtaaacgctgtccctagtaaaaatacaaaaattagctgggtgtgggtgtgggtacctgtattcccagttacttgggaggctgaggtgggaggatcttttgaacccaggagttcagggtcatagcatgctgtgattgtgcctacgaatagccactgcataccaacctgggcaatatagcaagatcccatctctttaaaaaaaaaaaaaaaggacaggaactatcttactcaatgtattagtcatgtttctctagagggacagaactaataggatacatgtatataaaaaggggagtttattaaggagtattgactcacatgatcacagggttaggtcccacaataggtcatctgcaagcaaggaagccaattcaagtcccaaagctgaagaacttggagtccaatgtttgagggcaggaagcattcagcatgagagaaagatggaggccagaagactacaccagtctagtctttccatgttttgcctgcttttattctggcagtgctggcagctgattagatggtgcccacccagattgaggatggtctgcctttcccagtccactgactcaaatgttaaatctcctttggcagcaccctcacagatgtacccgggaacactttgcatccttctattcaatcaagttgatactcagtattaaccatcacagtccatttgggcaactataccaaattaccatagaccaggtgacttaaacagcagttatttctcacagttccggaggctgggaaatccaacatctaagtggtagcatatctggtgtctggtaaggcatgcttccagatcttaccagatgtcagtcttttgatgttctcacatggcagaaaaagaggatgcaaactctcaagtatatctttaagggcacaaattccattcatgagggctctaccctcatcacctaattacctcccaaaggccccaccttctgatactgtcactttggggatactgtctcccctttgaattctggggggaatacaaacattcagtttgtaacaatagccttatgatttagaggttacttgttcattcacctagacctcaaattgcattttacagctagtcaagtatatctttctctgatttgatagtgtgacctaaaaggggaccattgtttgaaatatcattagagttgcttattttattattattattattattattattattattattgagacagagtgagaccctgtttcagaaaaaataaataaataaaaccaccagcaccacaaacaacaacaaaaagttattttgtacttgttttgagcacaggactcctgagggtatctttgcatttaatattacataggggtgccagtgggaagtaatgtgtatgcttggcctcatgagctaaaaccctgtgttaattatgacagaaggaaagtgtgtgagagggatcttaactacctagcagctctagctgccatcttgaaccatgaagatacgggccacacgtaggggtagctgggtagtgagcagcaagaagccttgttggatgagggcacgaaggagcagaatcactggaatcactgtgtcagccctaattacctacctctggacttttatgtgaggggaaaaaaaattgacagtttatatttatctcaacctagttaacccaagtgatgcattgttatgagattaaaatgtttggaggccgggtgcgatctcagctcacaatcactagtgaattcgcgaggccaaggcgggcggatcacgaggtcaggagatcaagaccatcctggctaacatgtaaaaccccgtctctactaaaaataca

SEQ ID NO: 366946 - DNA, 3510 bp, Homo sapiens
  misc_feature (3369)..(3369): n is a, c, g, or t
  misc_feature (3375)..(3375): n is a, c, g, or t
  misc_feature (3507)..(3508): n is a, c, g, or t
ggacgtcgaggcattacaatcgcgaaaccaagccatagcatgaaacagcgagcttgcagcctcaccgacgagtctcaactaaaagggactcccggagctaggggtggggactcggcctcacacagtgagtgccggctattggacttttgtccagtgacagctgagacaacaaggaccacgggaggaggtgtaggagagaagcgccgcgaacagcgatcgcccagcaccaagtccgcttccaggctttcggtttctttgcctccatcttgggtgcgccttcccggcgtctaggggagcgaaggctgaggtggcagcggcaggagagtccggccgcgacaggacgaactcccccactggaaaggattctgaaagaaatgaagtcagccctcagaaatgaagttgactgcctgctggctttctgttgactggcccggagctgtactgcaagacccttgtgagcttccctagtctaagagtaggatgtctgctgaagtcatccatcaggttgaagaagcacttgatacagatgagaaggagatgctgctctttttgtgccgggatgttgctatagatgtggttccacctaatgtcagggaccttctggatattttacgggaaagaggtaagctgtctgtcggggacttggctgaactgctctacagagtgaggcgatttgacctgctcaaacgtatcttgaagatggacagaaaagctgtggagacccacctgctcaggaaccctcaccttgtttcggactatagagtgctgatggcagagattggtgaggatttggataaatctgatgtgtcctcattaattttcctcatgaaggattacatgggccgaggcaagataagcaaggagaagagtttcttggaccttgtggttgagttggagaaactaaatctggttgccccagatcaactggatttattagaaaaatgcctaaagaacatccacagaatagacctgaagacaaaaatccagaagtacaagcagtctgttcaaggagcagggacaagttacaggaatgttctccaagcagcaatccaaaagagtctcaaggatccttcaaataacttcaggctccataatgggagaagtaaagaacaaagacttaaggaacagcttggcgctcaacaagaaccagtgaagaaatccattcaggaatcagaagcttttttgcctcagagcatacctgaagagagatacaagatgaagagcaagcccctaggaatctgcctgataatcgattgcattggcaatgagacagagcttcttcgagacaccttcacttccctgggctatgaagtccagaaattcttgcatctcagtatgcatggtatatcccagattcttggccaatttgcctgtatgcccgagcaccgagactacgacagctttgtgtgtgtcctggtgagccgaggaggctcccagagtgtgtatggtgtggatcagactcactcagggctccccctgcatcacatcaggaggatgttcatgggagattcatgcccttatctagcagggaagccaaagatgttttttattcagaactatgtggtgtcagagggccagctggaggacagcagcctcttggaggtggatgggccagcgatgaagaatgtggaattcaaggctcagaagcgagggctgtgcacagttcaccgagaagctgacttcttctggagcctgtgtactgcggacatgtccctgctggagcagtctcacagctcaccatccctgtacctgcagtgcctctcccagaaactgagacaagaaagaaaacgcccactcctggatcttcacattgaactcaatggctacatgtatgattggaacagcagagtttctgccaaggagaaatattatgtctggctgcagcacactctgagaaagaaacttatcctctcctacacataagaaaccaaaaggctgggcgtagtggctcacacctgtaatcccagcactttgggaggccaaggagggcagatcacttcaggtcaggagttcgagaccagcctggccaacatggtaaacgctgtccctagtaaaaatacaaaaattagctgggtgtgggtgtgggtacctgtattcccagttacttgggaggctgaggtgggaggatcttttgaacccaggagttcagggtcatagcatgctgtgattgtgcctacgaatagccactgcataccaacctgggcaatatagcaagatcccatctctttaaaaaaaaaaaaaaaggacaggaactatcttactcaatgtattagtcatgtttctctagagggacagaactaataggatacatgtatataaaaaggggagtttattaaggagtattgactcacatgatcacagggttaggtcccacaataggtcatctgcaagcaaggaagccaattcaagtcccaaagctgaagaacttggagtccaatgtttgagggcaggaagcattcagcatgagagaaagatggaggccagaagactacaccagtctagtctttccatgttttgcctgcttttattctggcagtgctggcagctgattagatggtgcccacccagattgaggatggtctgcctttcccagtccactgactcaaatgttaaatctcctttggcagcaccctcacagatgtacccgggaacactttgcatccttctattcaatcaagttgatactcagtattaaccatcacagtccatttgggcaactataccaaattaccatagaccaggtgacttaaacagcagttatttctcacagttccggaggctgggaaatccaacatctaagtggtagcatatctggtgtctggtaaggcatgcttccagatcttaccagatgtcagtcttttgatgttctcacatggcagaaaaagaggatgcaaactctcaagtatatctttaagggcacaaattccattcatgagggctctaccctcatcacctaattacctcccaaaggccccaccttctgatactgtcactttggggatactgtctcccctttgaattctggggggaatacaaacattcagtttgtaacaatagccttatgatttagaggttacttgttcattcacctagacctcaaattgcattttacagctagtcaagtatatctttctctgatttgatagtgtgacctaaaaggggaccattgtttgaaatatcattagagttgcttattttattattattattattattattattattattattattattgagacagagtttcattctgctgcccaggctggagtgcagtggcatcatcttggctcattgcaacctctgccttctgggttcaggcgattctcctgcctcagcctcccgagtagctgggtgtgggtgtgggtncctgtnttcccagttacttgggaggctgaggtgggaggatcttttgaacccaggagttcagggtcatagcatgctgtgattgtgcctacgaatagccactgcataccaacctgggcaatatagcaagatcccatctcnnta

SEQ ID NO: 366947 - DNA, 2967 bp, Homo sapiens
ggacgtcgaggcattacaatcgcgaaaccaagccatagcatgaaacagcgagcttgcagcctcaccgacgagtctcaactaaaagggactcccggagctaggggtggggactcggcctcacacagtgagtgccggctattggacttttgtccagtgacagctgagacaacaaggaccacgggaggaggtgtaggagagaagcgccgcgaacagcgatcgcccagcaccaagtccgcttccaggctttcggtttctttgcctccatcttgggtgcgccttcccggcgtctaggggagcgaaggctgaggtggcagcggcaggagagtccggccgcgacaggacgaactcccccactggaaaggattctgaaagaaatgaagtcagccctcagaaatgaagttgactgcctgctggctttctgttgactggcccggagctgtactgcaagacccttgtgagcttccctagtctaagagtaggatgtctgctgaagtcatccatcaggttgaagaagcacttgatacagatgagaaggagatgctgctctttttgtgccgggatgttgctatagatgtggttccacctaatgtcagggaccttctggatattttacgggaaagaggtaagctgtctgtcggggacttggctgaactgctctacagagtgaggcgatttgacctgctcaaacgtatcttgaagatggacagaaaagctgtggagacccacctgctcaggaaccctcaccttgtttcggactatagagtgctgatggcagagattggtgaggatttggataaatctgatgtgtcctcattaattttcctcatgaaggattacatgggccgaggcaagataagcaaggagaagagtttcttggaccttgtggttgagttggagaaactaaatctggttgccccagatcaactggatttattagaaaaatgcctaaagaacatccacagaatagacctgaagacaaaaatccagaagtacaagcagtctgttcaaggagcagggacaagttacaggaatgttctccaagcagcaatccaaaagagtctcaaggatccttcaaataacttcaggctccataatgggagaagtaaagaacaaagacttaaggaacagcttggcgctcaacaagaaccagtgaagaaatccattcaggaatcagaagcttttttgcctcagagcatacctgaagagagatacaagatgaagagcaagcccctaggaatctgcctgataatcgattgcattggcaatgagacagagcttcttcgagacaccttcacttccctgggctatgaagtccagaaattcttgcatctcagtatgcatggtatatcccagattcttggccaatttgcctgtatgcccgagcaccgagactacgacagctttgtgtgtgtcctggtgagccgaggaggctcccagagtgtgtatggtgtggatcagactcactcagggctccccctgcatcacatcaggaggatgttcatgggagattcatgcccttatctagcagggaagccaaagatgttttttattcagaactatgtggtgtcagagggccagctggaggacagcagcctcttggaggtggatgggccagcgatgaagaatgtggaattcaaggctcagaagcgagggctgtgcacagttcaccgagaagctgacttcttctggagcctgtgtactgcggacatgtccctgctggagcagtctcacagctcaccatccctgtacctgcagtgcctctcccagaaactgagacaagaaagaaaacgcccactcctggatcttcacattgaactcaatggctacatgtatgattggaacagcagagtttctgccaaggagaaatattatgtctggctgcagcacactctgagaaagaaacttatcctctcctacacataagaaaccaaaaggctgggcgtagtggctcacacctgtaatcccagcactttgggaggccaaggagggcagatcacttcaggtcaggagttcgagaccagcctggccaacatgagtctgaaaagtgtcgaagagacagttttcaggaacaacaagcaattattcctactttccaagttattttgatgccatggtggctcatacctataatctgagtactttgggaggctgaggtggactgatcacttgagcccaggagtttgagaccagcctgggcaacatagcaagactccatctctacaaaaaaagacaaaatttagctgagcgtggtggcgtgttcctgtagtcccagctacttgggaggctgaagtgagtggatcccctgagcccagagaggtcaaggttgtgatgagctgtgatcacaccactgcacttcagcatgggagacagagtgagaccctgtttcagaaaaaataaataaataaaaccaccagcaccacaaacaacaacaaaaagttattttgtacttgttttgagcacaggactcctgagggtatctttgcatttaatattacataggggtgccagtgggaagtaatgtgtatgcttggcctcatgagctaaaaccctgtgttaattatgacagaaggaaagtgtgtgagagggatcttaactacctagcagctctagctgccatcttgaaccatgaagatacgggccacacgtaggggtagctgggtagtgagcagcaagaagccttgttggatgagggcacgaaggagcagaatcactggaatcactgtgtcagccctaattacctacctctggacttttatgtgaggggaaaaaaaattgacagtttatatttatctcaacctagttaacccaagtgatgcattgttatgagattaaaatgtttggaggccgggtgcgatctcagctcacaatcactagtgaattcgcgaggccaaggcgggcggatcacgaggtcaggagatcaagaccatcctggctaacatgtaaaaccccgtctctactaaaaataca

SEQ ID NO: 366948 - DNA, 2076 bp, Homo sapiens
ggacgtcgaggcattacaatcgcgaaaccaagccatagcatgaaacagcgagcttgcagcctcaccgacgagtctcaactaaaagggactcccggagctaggggtggggactcggcctcacacagtgagtgccggctattggacttttgtccagtgacagctgagacaacaaggaccacgggaggaggtgtaggagagaagcgccgcgaacagcgatcgcccagcaccaagtccgcttccaggctttcggtttctttgcctccatcttgggtgcgccttcccggcgtctaggggagcgaaggctgaggtggcagcggcaggagagtccggccgcgacaggacgaactcccccactggaaaggattctgaaagaaatgaagtcagccctcagaaatgaagttgactgcctgctggctttctgttgactggcccggagctgtactgcaagacccttgtgagcttccctagtctaagagtaggatgtctgctgaagtcatccatcaggttgaagaagcacttgatacagatgagaaggagatgctgctctttttgtgccgggatgttgctatagatgtggttccacctaatgtcagggaccttctggatattttacgggaaagaggtaagctgtctgtcggggacttggctgaactgctctacagagtgaggcgatttgacctgctcaaacgtatcttgaagatggacagaaaagctgtggagacccacctgctcaggaaccctcaccttgtttcggactatagagtgctgatggcagagattggtgaggatttggataaatctgatgtgtcctcattaattttcctcatgaaggattacatgggccgaggcaagataagcaaggagaagagtttcttggaccttgtggttgagttggagaaactaaatctggttgccccagatcaactggatttattagaaaaatgcctaaagaacatccacagaatagacctgaagacaaaaatccagaagtacaagcagtctgttcaaggagcagggacaagttacaggaatgttctccaagcagcaatccaaaagagtctcaaggatccttcaaataacttcaggctccataatgggagaagtaaagaacaaagacttaaggaacagcttggcgctcaacaagaaccagtgaagaaatccattcaggaatcagaagcttttttgcctcagagcatacctgaagagagatacaagatgaagagcaagcccctaggaatctgcctgataatcgattgcattggcaatgagacagagcttcttcgagacaccttcacttccctgggctatgaagtccagaaattcttgcatctcagtatgcatggtatatcccagattcttggccaatttgcctgtatgcccgagcaccgagactacgacagctttgtgtgtgtcctggtgagccgaggaggctcccagagtgtgtatggtgtggatcagactcactcagggctccccctgcatcacatcaggaggatgttcatgggagattcatgcccttatctagcagggaagccaaagatgttttttattcagaactatgtggtgtcagagggccagctggaggacagcagcctcttggaggtggatgggccagcgatgaagaatgtggaattcaaggctcagaagcgagggctgtgcacagttcaccgagaagctgacttcttctggagcctgtgtactgcggacatgtccctgctggagcagtctcacagctcaccatccctgtacctgcagtgcctctcccagaaactgagacaagaaagaaaacgcccactcctggatcttcacattgaactcaatggctacatgtatgattggaacagcagagtttctgccaaggagaaatattatgtctggctgcagcacactctgagaaagaaacttatcctctcctacacataagaaaccaaaaggctgggcgtagtggctcacacctgtaatcccagcactttgggaggccaaggagggcacatgcgttgggagcggcacatgcgttgggagcggcacatgcgttgggagcggcacatgcgttgggagcggcacatgcgttgggag

SEQ ID NO: 366949 - DNA, 3800 bp, Homo sapiens
ccggattcccagaaaggggcgacctgggccacagcggtacaagctgcaccccgatggacctgagagaccggaagtaacccttggccaactctggccgccccctgcagccgcagccccagaggcccacccgcgagcttcagtggcgggccctcagcgtcgtgtaaactttgcttaaaatgatcttgagagttcaattcttggggtgaactgttgagaagatctggcatttttcctttcgaaagttgttgggaacgtggactttcccaacaattgtgtatgcgctcgatctcactcagtgggagccgccgccctggagggaatttcacaatagcctgaactcccccactggaaaggattctgaaagaaatgaagtcagccctcagaaatgaagttgactgcctgctggctttctgttgactggcccggagctgtactgcaagacccttgtgagcttccctagtctaagagtaggatgtctgctgaagtcatccatcaggttgaagaagcacttgatacagatgagaaggagatgctgctctttttgtgccgggatgttgctatagatgtggttccacctaatgtcagggaccttctggatattttacgggaaagaggtaagctgtctgtcggggacttggctgaactgctctacagagtgaggcgatttgacctgctcaaacgtatcttgaagatggacagaaaagctgtggagacccacctgctcaggaaccctcaccttgtttcggactatagagtgctgatggcagagattggtgaggatttggataaatctgatgtgtcctcattaattttcctcatgaaggattacatgggccgaggcaagataagcaaggagaagagtttcttggaccttgtggttgagttggagaaactaaatctggttgccccagatcaactggatttattagaaaaatgcctaaagaacatccacagaatagacctgaagacaaaaatccagaagtacaagcagtctgttcaaggagcagggacaagttacaggaatgttctccaagcagcaatccaaaagagtctcaaggatccttcaaataacttcaggctccataatgggagaagtaaagaacaaagacttaaggaacagcttggcgctcaacaagaaccagtgaagaaatccattcaggaatcagaagcttttttgcctcagagcatacctgaagagagatacaagatgaagagcaagcccctaggaatctgcctgataatcgattgcattggcaatgagacagagcttcttcgagacaccttcacttccctgggctatgaagtccagaaattcttgcatctcagtatgcatggtatatcccagattcttggccaatttgcctgtatgcccgagcaccgagactacgacagctttgtgtgtgtcctggtgagccgaggaggctcccagagtgtgtatggtgtggatcagactcactcagggctccccctgcatcacatcaggaggatgttcatgggagattcatgcccttatctagcagggaagccaaagatgttttttattcagaactatgtggtgtcagagggccagctggaggacagcagcctcttggaggtggatgggccagcgatgaagaatgtggaattcaaggctcagaagcgagggctgtgcacagttcaccgagaagctgacttcttctggagcctgtgtactgcggacatgtccctgctggagcagtctcacagctcaccatccctgtacctgcagtgcctctcccagaaactgagacaagaaagaaaacgcccactcctggatcttcacattgaactcaatggctacatgtatgattggaacagcagagtttctgccaaggagaaatattatgtctggctgcagcacactctgagaaagaaacttatcctctcctacacataagaaaccaaaaggctgggcgtagtggctcacacctgtaatcccagcactttgggaggccaaggagggcagatcacttcaggtcaggagttcgagaccagcctggccaacatggtaaacgctgtccctagtaaaaatacaaaaattagctgggtgtgggtgtgggtacctgtattcccagttacttgggaggctgaggtgggaggatcttttgaacccaggagttcagggtcatagcatgctgtgattgtgcctacgaatagccactgcataccaacctgggcaatatagcaagatcccatctctttaaaaaaaaaaaaaaaggacaggaactatcttactcaatgtattagtcatgtttctctagagggacagaactaataggatacatgtatataaaaaggggagtttattaaggagtattgactcacatgatcacagggttaggtcccacaataggtcatctgcaagcaaggaagccaattcaagtcccaaagctgaagaacttggagtccaatgtttgagggcaggaagcattcagcatgagagaaagatggaggccagaagactacaccagtctagtctttccatgttttgcctgcttttattctggcagtgctggcagctgattagatggtgcccacccagattgaggatggtctgcctttcccagtccactgactcaaatgttaaatctcctttggcagcaccctcacagatgtacccgggaacactttgcatccttctattcaatcaagttgatactcagtattaaccatcacagtccatttgggcaactataccaaattaccatagaccaggtgacttaaacagcagttatttctcacagttccggaggctgggaaatccaacatctaagtggtagcatatctggtgtctggtaaggcatgcttccagatcttaccagatgtcagtcttttgatgttctcacatggcagaaaaagaggatgcaaactctcaagtatatctttaagggcacaaattccattcatgagggctctaccctcatcacctaattacctcccaaaggccccaccttctgatactgtcactttggggatactgtctcccctttgaattctggggggaatacaaacattcagtttgtaacaatagccttatgatttagaggttacttgttcattcacctagacctcaaattgcattttacactacttgggaggctgaagtgagtggatcccctgagcccagagaggtcaaggttgtgatgagctgtgatcacaccactgcacttcagcatgggagacagagtgagaccctgtttcagaaaaaataaataaataaaaccaccagcaccacaaacaacaacaaaaagttattttgtacttgttttgagcacaggactcctgagggtatctttgcatttaatattacataggggtgccagtgggaagtaatgtgtatgcttggcctcatgagctaaaaccctgtgttaattatgacagaaggaaagtgtgtgagagggatcttaactacctagcagctctagctgccatcttgaaccatgaagatacgggccacacgtaggggtagctgggtagtgagcagcaagaagccttgttggatgagggcacgaaggagcagaatcactggaatcactgtgtcagccctaattacctacctctggacttttatgtgaggggaaaaaaaattgacagtttatatttatctcaacctagttaacccaagtgatgcattgttatgagattaaaatgtttggaggccgggtgcgatctcagctcacaatcactagtgaattcgcgaggccaaggcgggcggatcacgaggtcaggagatcaagaccatcctggctaacatgtaaaaccccgtctctactaaaaataca

SEQ ID NO: 366950 - DNA, 3731 bp, Homo sapiens
ttgtttgttcaaggccacgtgggtggagtcattgaggtggaggtttaactctgtgacataagtttccctgatttagtcaggctgtctgtcgttgggcttttcccacttccttctactacgtacttcttccctattcctcctactgaggccattaaacccttagttgtaattttccctgaacatgctttacattctgatgaattctgaaaaagaatgtggggtttccttgcagatgagttcatctgttgtttcatttcctttacaataactcccccactggaaaggattctgaaagaaatgaagtcagccctcagaaatgaagttgactgcctgctggctttctgttgactggcccggagctgtactgcaagacccttgtgagcttccctagtctaagagtaggatgtctgctgaagtcatccatcaggttgaagaagcacttgatacagatgagaaggagatgctgctctttttgtgccgggatgttgctatagatgtggttccacctaatgtcagggaccttctggatattttacgggaaagaggtaagctgtctgtcggggacttggctgaactgctctacagagtgaggcgatttgacctgctcaaacgtatcttgaagatggacagaaaagctgtggagacccacctgctcaggaaccctcaccttgtttcggactatagagtgctgatggcagagattggtgaggatttggataaatctgatgtgtcctcattaattttcctcatgaaggattacatgggccgaggcaagataagcaaggagaagagtttcttggaccttgtggttgagttggagaaactaaatctggttgccccagatcaactggatttattagaaaaatgcctaaagaacatccacagaatagacctgaagacaaaaatccagaagtacaagcagtctgttcaaggagcagggacaagttacaggaatgttctccaagcagcaatccaaaagagtctcaaggatccttcaaataacttcaggctccataatgggagaagtaaagaacaaagacttaaggaacagcttggcgctcaacaagaaccagtgaagaaatccattcaggaatcagaagcttttttgcctcagagcatacctgaagagagatacaagatgaagagcaagcccctaggaatctgcctgataatcgattgcattggcaatgagacagagcttcttcgagacaccttcacttccctgggctatgaagtccagaaattcttgcatctcagtatgcatggtatatcccagattcttggccaatttgcctgtatgcccgagcaccgagactacgacagctttgtgtgtgtcctggtgagccgaggaggctcccagagtgtgtatggtgtggatcagactcactcagggctccccctgcatcacatcaggaggatgttcatgggagattcatgcccttatctagcagggaagccaaagatgttttttattcagaactatgtggtgtcagagggccagctggaggacagcagcctcttggaggtggatgggccagcgatgaagaatgtggaattcaaggctcagaagcgagggctgtgcacagttcaccgagaagctgacttcttctggagcctgtgtactgcggacatgtccctgctggagcagtctcacagctcaccatccctgtacctgcagtgcctctcccagaaactgagacaagaaagaaaacgcccactcctggatcttcacattgaactcaatggctacatgtatgattggaacagcagagtttctgccaaggagaaatattatgtctggctgcagcacactctgagaaagaaacttatcctctcctacacataagaaaccaaaaggctgggcgtagtggctcacacctgtaatcccagcactttgggaggccaaggagggcagatcacttcaggtcaggagttcgagaccagcctggccaacatggtaaacgctgtccctagtaaaaatacaaaaattagctgggtgtgggtgtgggtacctgtattcccagttacttgggaggctgaggtgggaggatcttttgaacccaggagttcagggtcatagcatgctgtgattgtgcctacgaatagccactgcataccaacctgggcaatatagcaagatcccatctctttaaaaaaaaaaaaaaaggacaggaactatcttactcaatgtattagtcatgtttctctagagggacagaactaataggatacatgtatataaaaaggggagtttattaaggagtattgactcacatgatcacagggttaggtcccacaataggtcatctgcaagcaaggaagccaattcaagtcccaaagctgaagaacttggagtccaatgtttgagggcaggaagcattcagcatgagagaaagatggaggccagaagactacaccagtctagtctttccatgttttgcctgcttttattctggcagtgctggcagctgattagatggtgcccacccagattgaggatggtctgcctttcccagtccactgactcaaatgttaaatctcctttggcagcaccctcacagatgtacccgggaacactttgcatccttctattcaatcaagttgatactcagtattaaccatcacagtccatttgggcaactataccaaattaccatagaccaggtgacttaaacagcagttatttctcacagttccggaggctgggaaatccaacatctaagtggtagcatatctggtgtctggtaaggcatgcttccagatcttaccagatgtcagtcttttgatgttctcacatggcagaaaaagaggatgcaaactctcaagtatatctttaagggcacaaattccattcatgagggctctaccctcatcacctaattacctcccaaaggccccaccttctgatactgtcactttggggatactgtctcccctttgaattctggggggaatacaaacattcagtttgtaacaatagccttatgatttagaggttacttgttcattcacctagacctcaaattgcattttacactacttgggaggctgaagtgagtggatcccctgagcccagagaggtcaaggttgtgatgagctgtgatcacaccactgcacttcagcatgggagacagagtgagaccctgtttcagaaaaaataaataaataaaaccaccagcaccacaaacaacaacaaaaagttattttgtacttgttttgagcacaggactcctgagggtatctttgcatttaatattacataggggtgccagtgggaagtaatgtgtatgcttggcctcatgagctaaaaccctgtgttaattatgacagaaggaaagtgtgtgagagggatcttaactacctagcagctctagctgccatcttgaaccatgaagatacgggccacacgtaggggtagctgggtagtgagcagcaagaagccttgttggatgagggcacgaaggagcagaatcactggaatcactgtgtcagccctaattacctacctctggacttttatgtgaggggaaaaaaaattgacagtttatatttatctcaacctagttaacccaagtgatgcattgttatgagattaaaatgtttggaggccgggtgcgatctcagctcacaatcactagtgaattcgcgaggccaaggcgggcggatcacgaggtcaggagatcaagaccatcctggctaacatgtaaaaccccgtctctactaaaaataca

SEQ ID NO: 366951 - DNA, 3625 bp, Homo sapiens
ccggattcccagaaaggggcgacctgggccacagcggtacaagctgcaccccgatggacctgagagaccggaagtaacccttggccaactctggccgccccctgcagccgcagccccagaggcccacccgcgagcttcagtggcgggccctcagcgtcgtaactcccccactggaaaggattctgaaagaaatgaagtcagccctcagaaatgaagttgactgcctgctggctttctgttgactggcccggagctgtactgcaagacccttgtgagcttccctagtctaagagtaggatgtctgctgaagtcatccatcaggttgaagaagcacttgatacagatgagaaggagatgctgctctttttgtgccgggatgttgctatagatgtggttccacctaatgtcagggaccttctggatattttacgggaaagaggtaagctgtctgtcggggacttggctgaactgctctacagagtgaggcgatttgacctgctcaaacgtatcttgaagatggacagaaaagctgtggagacccacctgctcaggaaccctcaccttgtttcggactatagagtgctgatggcagagattggtgaggatttggataaatctgatgtgtcctcattaattttcctcatgaaggattacatgggccgaggcaagataagcaaggagaagagtttcttggaccttgtggttgagttggagaaactaaatctggttgccccagatcaactggatttattagaaaaatgcctaaagaacatccacagaatagacctgaagacaaaaatccagaagtacaagcagtctgttcaaggagcagggacaagttacaggaatgttctccaagcagcaatccaaaagagtctcaaggatccttcaaataacttcaggctccataatgggagaagtaaagaacaaagacttaaggaacagcttggcgctcaacaagaaccagtgaagaaatccattcaggaatcagaagcttttttgcctcagagcatacctgaagagagatacaagatgaagagcaagcccctaggaatctgcctgataatcgattgcattggcaatgagacagagcttcttcgagacaccttcacttccctgggctatgaagtccagaaattcttgcatctcagtatgcatggtatatcccagattcttggccaatttgcctgtatgcccgagcaccgagactacgacagctttgtgtgtgtcctggtgagccgaggaggctcccagagtgtgtatggtgtggatcagactcactcagggctccccctgcatcacatcaggaggatgttcatgggagattcatgcccttatctagcagggaagccaaagatgttttttattcagaactatgtggtgtcagagggccagctggaggacagcagcctcttggaggtggatgggccagcgatgaagaatgtggaattcaaggctcagaagcgagggctgtgcacagttcaccgagaagctgacttcttctggagcctgtgtactgcggacatgtccctgctggagcagtctcacagctcaccatccctgtacctgcagtgcctctcccagaaactgagacaagaaagaaaacgcccactcctggatcttcacattgaactcaatggctacatgtatgattggaacagcagagtttctgccaaggagaaatattatgtctggctgcagcacactctgagaaagaaacttatcctctcctacacataagaaaccaaaaggctgggcgtagtggctcacacctgtaatcccagcactttgggaggccaaggagggcagatcacttcaggtcaggagttcgagaccagcctggccaacatggtaaacgctgtccctagtaaaaatacaaaaattagctgggtgtgggtgtgggtacctgtattcccagttacttgggaggctgaggtgggaggatcttttgaacccaggagttcagggtcatagcatgctgtgattgtgcctacgaatagccactgcataccaacctgggcaatatagcaagatcccatctctttaaaaaaaaaaaaaaaggacaggaactatcttactcaatgtattagtcatgtttctctagagggacagaactaataggatacatgtatataaaaaggggagtttattaaggagtattgactcacatgatcacagggttaggtcccacaataggtcatctgcaagcaaggaagccaattcaagtcccaaagctgaagaacttggagtccaatgtttgagggcaggaagcattcagcatgagagaaagatggaggccagaagactacaccagtctagtctttccatgttttgcctgcttttattctggcagtgctggcagctgattagatggtgcccacccagattgaggatggtctgcctttcccagtccactgactcaaatgttaaatctcctttggcagcaccctcacagatgtacccgggaacactttgcatccttctattcaatcaagttgatactcagtattaaccatcacagtccatttgggcaactataccaaattaccatagaccaggtgacttaaacagcagttatttctcacagttccggaggctgggaaatccaacatctaagtggtagcatatctggtgtctggtaaggcatgcttccagatcttaccagatgtcagtcttttgatgttctcacatggcagaaaaagaggatgcaaactctcaagtatatctttaagggcacaaattccattcatgagggctctaccctcatcacctaattacctcccaaaggccccaccttctgatactgtcactttggggatactgtctcccctttgaattctggggggaatacaaacattcagtttgtaacaatagccttatgatttagaggttacttgttcattcacctagacctcaaattgcattttacactacttgggaggctgaagtgagtggatcccctgagcccagagaggtcaaggttgtgatgagctgtgatcacaccactgcacttcagcatgggagacagagtgagaccctgtttcagaaaaaataaataaataaaaccaccagcaccacaaacaacaacaaaaagttattttgtacttgttttgagcacaggactcctgagggtatctttgcatttaatattacataggggtgccagtgggaagtaatgtgtatgcttggcctcatgagctaaaaccctgtgttaattatgacagaaggaaagtgtgtgagagggatcttaactacctagcagctctagctgccatcttgaaccatgaagatacgggccacacgtaggggtagctgggtagtgagcagcaagaagccttgttggatgagggcacgaaggagcagaatcactggaatcactgtgtcagccctaattacctacctctggacttttatgtgaggggaaaaaaaattgacagtttatatttatctcaacctagttaacccaagtgatgcattgttatgagattaaaatgtttggaggccgggtgcgatctcagctcacaatcactagtgaattcgcgaggccaaggcgggcggatcacgaggtcaggagatcaagaccatcctggctaacatgtaaaaccccgtctctactaaaaataca

SEQ ID NO: 366952 - DNA, 4329 bp, Homo sapiens
atcttttttttttttttttttttttgagacagcatttcactcttgttgcccaggctggaatgcaatggcactatctctgctcaccgcaacctccgcctgtcgggttcaagcgattctcgtgcctcagcctctcaagtagctgagattacaggcatgcaccaccatgcccggctagttttgtatttttaatagagacggggtttctccatgttggtcagtctggtctcgaactcctgaccttaggtgatccgcccgcctcggcatcccaaagtgctgggattacaggcgtgagccaccatgcccggcccaactccaagatctaaacaaaaaagactgggttgaaagggagtttttaatgtttactgtttgctttacatccattttcttgttttgttaatacttgctttacttaagcttttgggtcaaatgtcctcgttaaaatggctttctctagcgactttatgttttacgtttctgtttgtaactgacatttgaccttcttttaacacggtattacttgcttccttataccggtttccaaggtgaagccatttgcagggtcgctgggtttccccctccccccgaaagtcttgcgcgacccggggtgggccggatagtgtgcagttttttgagccttgggctggggacctccaggaagctgaagcggaaattgcctaggcccctggggcattggaggtcctaccgcagctcctagtaggtggtgggggcgcagcggctgtccccactcagtcctggtggggtcgcacgtaacggtcctgagctatgcataagccgtttgaccacgcatggagaattttaccacccagagacacgcgagtggccctgtgcaagtttcaactgcgcggggggcggggaattccgcagacaggattctagaatttatgtcttgtgtggtaacatttcagccggtgggtggcggggattaggcgtgaagcggttcagcaggcagaggttctcggacgccctagtctaagagtaggatgtctgctgaagtcatccatcaggttgaagaagcacttgatacagatgagaaggagatgctgctctttttgtgccgggatgttgctatagatgtggttccacctaatgtcagggaccttctggatattttacgggaaagaggtaagctgtctgtcggggacttggctgaactgctctacagagtgaggcgatttgacctgctcaaacgtatcttgaagatggacagaaaagctgtggagacccacctgctcaggaaccctcaccttgtttcggactatagagtgctgatggcagagattggtgaggatttggataaatctgatgtgtcctcattaattttcctcatgaaggattacatgggccgaggcaagataagcaaggagaagagtttcttggaccttgtggttgagttggagaaactaaatctggttgccccagatcaactggatttattagaaaaatgcctaaagaacatccacagaatagacctgaagacaaaaatccagaagtacaagcagtctgttcaaggagcagggacaagttacaggaatgttctccaagcagcaatccaaaagagtctcaaggatccttcaaataacttcaggctccataatgggagaagtaaagaacaaagacttaaggaacagcttggcgctcaacaagaaccagtgaagaaatccattcaggaatcagaagcttttttgcctcagagcatacctgaagagagatacaagatgaagagcaagcccctaggaatctgcctgataatcgattgcattggcaatgagacagagcttcttcgagacaccttcacttccctgggctatgaagtccagaaattcttgcatctcagtatgcatggtatatcccagattcttggccaatttgcctgtatgcccgagcaccgagactacgacagctttgtgtgtgtcctggtgagccgaggaggctcccagagtgtgtatggtgtggatcagactcactcagggctccccctgcatcacatcaggaggatgttcatgggagattcatgcccttatctagcagggaagccaaagatgttttttattcagaactatgtggtgtcagagggccagctggaggacagcagcctcttggaggtggatgggccagcgatgaagaatgtggaattcaaggctcagaagcgagggctgtgcacagttcaccgagaagctgacttcttctggagcctgtgtactgcggacatgtccctgctggagcagtctcacagctcaccatccctgtacctgcagtgcctctcccagaaactgagacaagaaagaaaacgcccactcctggatcttcacattgaactcaatggctacatgtatgattggaacagcagagtttctgccaaggagaaatattatgtctggctgcagcacactctgagaaagaaacttatcctctcctacacataagaaaccaaaaggctgggcgtagtggctcacacctgtaatcccagcactttgggaggccaaggagggcagatcacttcaggtcaggagttcgagaccagcctggccaacatggtaaacgctgtccctagtaaaaatacaaaaattagctgggtgtgggtgtgggtacctgtattcccagttacttgggaggctgaggtgggaggatcttttgaacccaggagttcagggtcatagcatgctgtgattgtgcctacgaatagccactgcataccaacctgggcaatatagcaagatcccatctctttaaaaaaaaaaaaaaaggacaggaactatcttactcaatgtattagtcatgtttctctagagggacagaactaataggatacatgtatataaaaaggggagtttattaaggagtattgactcacatgatcacagggttaggtcccacaataggtcatctgcaagcaaggaagccaattcaagtcccaaagctgaagaacttggagtccaatgtttgagggcaggaagcattcagcatgagagaaagatggaggccagaagactacaccagtctagtctttccatgttttgcctgcttttattctggcagtgctggcagctgattagatggtgcccacccagattgaggatggtctgcctttcccagtccactgactcaaatgttaaatctcctttggcagcaccctcacagatgtacccgggaacactttgcatccttctattcaatcaagttgatactcagtattaaccatcacagtccatttgggcaactataccaaattaccatagaccaggtgacttaaacagcagttatttctcacagttccggaggctgggaaatccaacatctaagtggtagcatatctggtgtctggtaaggcatgcttccagatcttaccagatgtcagtcttttgatgttctcacatggcagaaaaagaggatgcaaactctcaagtatatctttaagggcacaaattccattcatgagggctctaccctcatcacctaattacctcccaaaggccccaccttctgatactgtcactttggggatactgtctcccctttgaattctggggggaatacaaacattcagtttgtaacaatagccttatgatttagaggttacttgttcattcacctagacctcaaattgcattttacactacttgggaggctgaagtgagtggatcccctgagcccagagaggtcaaggttgtgatgagctgtgatcacaccactgcacttcagcatgggagacagagtgagaccctgtttcagaaaaaataaataaataaaaccaccagcaccacaaacaacaacaaaaagttattttgtacttgttttgagcacaggactcctgagggtatctttgcatttaatattacataggggtgccagtgggaagtaatgtgtatgcttggcctcatgagctaaaaccctgtgttaattatgacagaaggaaagtgtgtgagagggatcttaactacctagcagctctagctgccatcttgaaccatgaagatacgggccacacgtaggggtagctgggtagtgagcagcaagaagccttgttggatgagggcacgaaggagcagaatcactggaatcactgtgtcagccctaattacctacctctggacttttatgtgaggggaaaaaaaattgacagtttatatttatctcaacctagttaacccaagtgatgcattgttatgagattaaaatgtttggaggccgggtgcgatctcagctcacaatcactagtgaattcgcgaggccaaggcgggcggatcacgaggtcaggagatcaagaccatcctggctaacatgtaaaaccccgtctctactaaaaataca

SEQ ID NO: 366953 - DNA, 4647 bp, Homo sapiens
ggacgtcgaggcattacaatcgcgaaaccaagccatagcatgaaacagcgagcttgcagcctcaccgacgagtctcaactaaaagggactcccggagctaggggtggggactcggcctcacacagtgagtgccggctattggacttttgtccagtgacagctgagacaacaaggaccacgggaggaggtgtaggagagaagcgccgcgaacagcgatcgcccagcaccaagtccgcttccaggctttcggtttctttgcctccatcttgggtgcgccttcccggcgtctaggggagcgaaggctgaggtggcagcggcaggagagtccggccgcgacaggacgaactcccccactggaaaggattctgaaagaaatgaagtcagccctcagaaatgaagttgactgcctgctggctttctgttgactggcccggagctgtactgcaagacccttgtgagcttccctagtctaagagtaggatgtctgctgaagtcatccatcaggttgaagaagcacttgatacagatgagaaggagatgctgctctttttgtgccgggatgttgctatagatgtggttccacctaatgtcagggaccttctggatattttacgggaaagaggtaagctgtctgtcggggacttggctgaactgctctacagagtgaggcgatttgacctgctcaaacgtatcttgaagatggacagaaaagctgtggagacccacctgctcaggaaccctcaccttgtttcggactatagagtgctgatggcagagattggtgaggatttggataaatctgatgtgtcctcattaattttcctcatgaaggattacatgggccgaggcaagataagcaaggagaagagtttcttggaccttgtggttgagttggagaaactaaatctggttgccccagatcaactggatttattagaaaaatgcctaaagaacatccacagaatagacctgaagacaaaaatccagaagtacaagcagtctgttcaaggagcagggacaagttacaggaatgttctccaagcagcaatccaaaagagtctcaaggatccttcaaataacttcaggctccataatgggagaagtaaagaacaaagacttaaggaacagcttggcgctcaacaagaaccagtgaagaaatccattcaggaatcagaagcttttttgcctcagagcatacctgaagagagatacaagatgaagagcaagcccctaggaatctgcctgataatcgattgcattggcaatgagacagagcttcttcgagacaccttcacttccctgggctatgaagtccagaaattcttgcatctcagtatgcatggtatatcccagattcttggccaatttgcctgtatgcccgagcaccgagactacgacagctttgtgtgtgtcctggtgagccgaggaggctcccagagtgtgtatggtgtggatcagactcactcagggctccccctgcatcacatcaggaggatgttcatgggagattcatgcccttatctagcagggaagccaaagatgttttttattcagaactatgtggtgtcagagggccagctggaggacagcagcctcttggaggtggatgggccagcgatgaagaatgtggaattcaaggctcagaagcgagggctgtgcacagttcaccgagaagctgacttcttctggagcctgtgtactgcggacatgtccctgctggagcagtctcacagctcaccatccctgtacctgcagtgcctctcccagaaactgagacaagaaagggggacaattcccggaagtggaattacagagtcaaaggacatgcatttttcaagcctcggatgcatcttactagatgtcctataggatggtcatatcagctttataggagagtagctgtgtccctgaattctccctgacactgcatgctcttatatttcctcaagttttgacaatttgataggtgaaaagtggtatctgactgttcagatctggaaggctttgttatataaacatttttttaatgtttattggcaagaatacttttctaagagaaacatcagtgagctggtttccatttaagctgaatgaagccacaatgtacctcaagtataagattaactggcctttttcagttgcactctaattacaatttagaatgatgtttctgagccacctgtcaaatgcattctgggctgtacctctgcgtaccccaggaataaatctcatggccttctttacctggcctccttagtggtggcccagcaggaagcgggggttagagcaggagccactcagccttccaagatagatactccatgggccggtggtattactggccttttgagcccatccccatttgcatagatgatccacgtgggttatcatctggctggtatgttcccagagtgaaactcagcagccccttgagggaggggatggtggccatcaggccagagtattgcaagttagtttggatcatttgctaagcagcttgtggtgccttcagaaaggaacagtttcaaagaactttcacatctgttggctcatttcgccctaatgacagtcttctctttgatatttgcatggcattaaattttgcctttcttgttttctccagaaaacgcccactcctggatcttcacattgaactcaatggctacatgtatgattggaacagcagagtttctgccaaggagaaatattatgtctggctgcagcacactctgagaaagaaacttatcctctcctacacataagaaaccaaaaggctgggcgtagtggctcacacctgtaatcccagcactttgggaggccaaggagggcagatcacttcaggtcaggagttcgagaccagcctggccaacatggtaaacgctgtccctagtaaaaatacaaaaattagctgggtgtgggtgtgggtacctgtattcccagttacttgggaggctgaggtgggaggatcttttgaacccaggagttcagggtcatagcatgctgtgattgtgcctacgaatagccactgcataccaacctgggcaatatagcaagatcccatctctttaaaaaaaaaaaaaaaggacaggaactatcttactcaatgtattagtcatgtttctctagagggacagaactaataggatacatgtatataaaaaggggagtttattaaggagtattgactcacatgatcacagggttaggtcccacaataggtcatctgcaagcaaggaagccaattcaagtcccaaagctgaagaacttggagtccaatgtttgagggcaggaagcattcagcatgagagaaagatggaggccagaagactacaccagtctagtctttccatgttttgcctgcttttattctggcagtgctggcagctgattagatggtgcccacccagattgaggatggtctgcctttcccagtccactgactcaaatgttaaatctcctttggcagcaccctcacagatgtacccgggaacactttgcatccttctattcaatcaagttgatactcagtattaaccatcacagtccatttgggcaactataccaaattaccatagaccaggtgacttaaacagcagttatttctcacagttccggaggctgggaaatccaacatctaagtggtagcatatctggtgtctggtaaggcatgcttccagatcttaccagatgtcagtcttttgatgttctcacatggcagaaaaagaggatgcaaactctcaagtatatctttaagggcacaaattccattcatgagggctctaccctcatcacctaattacctcccaaaggccccaccttctgatactgtcactttggggatactgtctcccctttgaattctggggggaatacaaacattcagtttgtaacaatagccttatgatttagaggttacttgttcattcacctagacctcaaattgcattttacactacttgggaggctgaagtgagtggatcccctgagcccagagaggtcaaggttgtgatgagctgtgatcacaccactgcacttcagcatgggagacagagtgagaccctgtttcagaaaaaataaataaataaaaccaccagcaccacaaacaacaacaaaaagttattttgtacttgttttgagcacaggactcctgagggtatctttgcatttaatattacataggggtgccagtgggaagtaatgtgtatgcttggcctcatgagctaaaaccctgtgttaattatgacagaaggaaagtgtgtgagagggatcttaactacctagcagctctagctgccatcttgaaccatgaagatacgggccacacgtaggggtagctgggtagtgagcagcaagaagccttgttggatgagggcacgaaggagcagaatcactggaatcactgtgtcagccctaattacctacctctggacttttatgtgaggggaaaaaaaattgacagtttatatttatctcaacctagttaacccaagtgatgcattgttatgagattaaaatgtttggaggccgggtgcgatctcagctcacaatcactagtgaattcgcgaggccaaggcgggcggatcacgaggtcaggagatcaagaccatcctggctaacatgtaaaaccccgtctctactaaaaataca

SEQ ID NO: 366954 - DNA, 3422 bp, Homo sapiens
ggacgtcgaggcattacaatcgcgaaaccaagccatagcatgaaacagcgagcttgcagcctcaccgacgagtctcaactaaaagggactcccggagctaggggtggggactcggcctcacacagtgagtgccggctattggacttttgtccagtgacagctgagacaacaaggaccacgggaggaggtgtaggagagaagcgccgcgaacagcgatcgcccagcaccaagtccgcttccaggctttcggtttctttgcctccatcttgggtgcgccttcccggcgtctaggggagcgaaggctgaggtggcagcggcaggagagtccggccgcgacaggacgaactcccccactggaaaggattctgaaagaaatgaagtcagccctcagaaatgaagttgactgcctgctggctttctgttgactggcccggagctgtactgcaagacccttgtgagcttccctagtctaagagtaggatgtctgctgaagtcatccatcaggttgaagaagcacttgatacagatgagaaggagatgctgctctttttgtgccgggatgttgctatagatgtggttccacctaatgtcagggaccttctggatattttacgggaaagaggtaagctgtctgtcggggacttggctgaactgctctacagagtgaggcgatttgacctgctcaaacgtatcttgaagatggacagaaaagctgtggagacccacctgctcaggaaccctcaccttgtttcggactatagagtgctgatggcagagattggtgaggatttggataaatctgatgtgtcctcattaattttcctcatgaaggattacatgggccgaggcaagataagcaaggagaagagtttcttggaccttgtggttgagttggagaaactaaatctggttgccccagatcaactggatttattagaaaaatgcctaaagaacatccacagaatagacctgaagacaaaaatccagaagtacaagcagtctgttcaaggagcagggacaagttacaggaatgttctccaagcagcaatccaaaagagtctcaaggatccttcaaataacttcaggagcatacctgaagagagatacaagatgaagagcaagcccctaggaatctgcctgataatcgattgcattggcaatgagacagaactatgtggtgtcagagggccagctggaggacagcagcctcttggaggtggatgggccagcgatgaagaatgtggaattcaaggctcagaagcgagggctgtgcacagttcaccgagaagctgacttcttctggagcctgtgtactgcggacatgtccctgctggagcagtctcacagctcaccatccctgtacctgcagtgcctctcccagaaactgagacaagaaagaaaacgcccactcctggatcttcacattgaactcaatggctacatgtatgattggaacagcagagtttctgccaaggagaaatattatgtctggctgcagcacactctgagaaagaaacttatcctctcctacacataagaaaccaaaaggctgggcgtagtggctcacacctgtaatcccagcactttgggaggccaaggagggcagatcacttcaggtcaggagttcgagaccagcctggccaacatggtaaacgctgtccctagtaaaaatacaaaaattagctgggtgtgggtgtgggtacctgtattcccagttacttgggaggctgaggtgggaggatcttttgaacccaggagttcagggtcatagcatgctgtgattgtgcctacgaatagccactgcataccaacctgggcaatatagcaagatcccatctctttaaaaaaaaaaaaaaaggacaggaactatcttactcaatgtattagtcatgtttctctagagggacagaactaataggatacatgtatataaaaaggggagtttattaaggagtattgactcacatgatcacagggttaggtcccacaataggtcatctgcaagcaaggaagccaattcaagtcccaaagctgaagaacttggagtccaatgtttgagggcaggaagcattcagcatgagagaaagatggaggccagaagactacaccagtctagtctttccatgttttgcctgcttttattctggcagtgctggcagctgattagatggtgcccacccagattgaggatggtctgcctttcccagtccactgactcaaatgttaaatctcctttggcagcaccctcacagatgtacccgggaacactttgcatccttctattcaatcaagttgatactcagtattaaccatcacagtccatttgggcaactataccaaattaccatagaccaggtgacttaaacagcagttatttctcacagttccggaggctgggaaatccaacatctaagtggtagcatatctggtgtctggtaaggcatgcttccagatcttaccagatgtcagtcttttgatgttctcacatggcagaaaaagaggatgcaaactctcaagtatatctttaagggcacaaattccattcatgagggctctaccctcatcacctaattacctcccaaaggccccaccttctgatactgtcactttggggatactgtctcccctttgaattctggggggaatacaaacattcagtttgtaacaatagccttatgatttagaggttacttgttcattcacctagacctcaaattgcattttacactacttgggaggctgaagtgagtggatcccctgagcccagagaggtcaaggttgtgatgagctgtgatcacaccactgcacttcagcatgggagacagagtgagaccctgtttcagaaaaaataaataaataaaaccaccagcaccacaaacaacaacaaaaagttattttgtacttgttttgagcacaggactcctgagggtatctttgcatttaatattacataggggtgccagtgggaagtaatgtgtatgcttggcctcatgagctaaaaccctgtgttaattatgacagaaggaaagtgtgtgagagggatcttaactacctagcagctctagctgccatcttgaaccatgaagatacgggccacacgtaggggtagctgggtagtgagcagcaagaagccttgttggatgagggcacgaaggagcagaatcactggaatcactgtgtcagccctaattacctacctctggacttttatgtgaggggaaaaaaaattgacagtttatatttatctcaacctagttaacccaagtgatgcattgttatgagattaaaatgtttggaggccgggtgcgatctcagctcacaatcactagtgaattcgcgaggccaaggcgggcggatcacgaggtcaggagatcaagaccatcctggctaacatgtaaaaccccgtctctactaaaaataca

SEQ ID NO: 366955 - DNA, 1900 bp, Homo sapiens
ggacgtcgaggcattacaatcgcgaaaccaagccatagcatgaaacagcgagcttgcagcctcaccgacgagtctcaactaaaagggactcccggagctaggggtggggactcggcctcacacagtgagtgccggctattggacttttgtccagtgacagctgagacaacaaggaccacgggaggaggtgtaggagagaagcgccgcgaacagcgatcgcccagcaccaagtccgcttccaggctttcggtttctttgcctccatcttgggtgcgccttcccggcgtctaggggagcgaaggctgaggtggcagcggcaggagagtccggccgcgacaggacgaactcccccactggaaaggattctgaaagaaatgaagtcagccctcagaaatgaagttgactgcctgctggctttctgttgactggcccggagctgtactgcaagacccttgtgagcttccctagtctaagagtaggatgtctgctgaagtcatccatcaggttgaagaagcacttgatacagatgagaaggagatgctgctctttttgtgccgggatgttgctatagatgtggttccacctaatgtcagggaccttctggatattttacgggaaagaggtaagctgtctgtcggggacttggctgaactgctctacagagtgaggcgatttgacctgctcaaacgtatcttgaagatggacagaaaagctgtggagacccacctgctcaggaaccctcaccttgtttcggactatagagtgctgatggcagagattggtgaggatttggataaatctgatgtgtcctcattaattttcctcatgaaggattacatgggccgaggcaagataagcaaggagaagagtttcttggaccttgtggttgagttggagaaactaaatctggttgccccagatcaactggatttattagaaaaatgcctaaagaacatccacagaatagacctgaagacaaaaatccagaagtacaagcagtctgttcaaggagcagggacaagttacaggaatgttctccaagcagcaatccaaaagagtctcaaggatccttcaaataacttcaggctccataatgggagaagtaaagaacaaagacttaaggaacagcttggcgctcaacaagaaccagtgaagaaatccattcaggaatcagaagcttttttgcctcagagcatacctgaagagagatacaagatgaagagcaagcccctaggaatctgcctgataatcgattgcattggcaatgagacaggttggagtgcaatggcgcaatctcagctcaccgcaatctccacctcccaggttcaagcgattctcctgcctcagcctcctgagtaactgggattacaggcatgtgccaccatgcccagctaattttgtatttttagtagagacaaggtttcaccatgtcggccaggctggtctcgatctcctgaccttgtgatctgcccacctcagcctcccaaagtgctacgattacaggcgtcagccatcatgcctggcttattctctccattttcaaggtgaggaagctgagcagtgaactacactcctaccttctctagtactgattgagctgggattcaaaagctggactccaaaacctatgcttttaactactttgcctcaatataatttccatgaaggtgagggagtttatctatctcctactatgggtctccagtacctggaagaatacctgctatgtaggtgttcaataaataattgttgggtgaatgaatgaaggaataagctctcccagtgtcagtgtgtttctaaaagccattcctttttatctttagagtttagcagactctcttctacctatcttcccttctctcctcaaaaaaccagacttttatccaaaaagcatgcaagt

SEQ ID NO: 366956 - DNA, 1834 bp, Homo sapiens
ggacgtcgaggcattacaatcgcgaaaccaagccatagcatgaaacagcgagcttgcagcctcaccgacgagtctcaactaaaagggactcccggagctaggggtggggactcggcctcacacagtgagtgccggctattggacttttgtccagtgacagctgagacaacaaggaccacgggaggaggtgtaggagagaagcgccgcgaacagcgatcgcccagcaccaagtccgcttccaggctttcggtttctttgcctccatcttgggtgcgccttcccggcgtctaggggagcgaaggctgaggtggcagcggcaggagagtccggccgcgacaggacgaactcccccactggaaaggattctgaaagaaatgaagtcagccctcagaaatgaagttgactgcctgctggctttctgttgactggcccggagctgtactgcaagacccttgtgagcttccctagtctaagagtaggatgtctgctgaagtcatccatcaggttgaagaagcacttgatacagatgagaaggagatgctgctctttttgtgccgggatgttgctatagatgtggttccacctaatgtcagggaccttctggatattttacgggaaagaggtaagctgtctgtcggggacttggctgaactgctctacagagtgaggcgatttgacctgctcaaacgtatcttgaagatggacagaaaagctgtggagacccacctgctcaggaaccctcaccttgtttcggactatagagtgctgatggcagagattggtgaggatttggataaatctgatgtgtcctcattaattttcctcatgaaggattacatgggccgaggcaagataagcaaggagaagagtttcttggaccttgtggttgagttggagaaactaaatctggttgccccagatcaactggatttattagaaaaatgcctaaagaacatccacagaatagacctgaagacaaaaatccagaagtacaagcagtctgttcaaggagcagggacaagttacaggaatgttctccaagcagcaatccaaaagagtctcaaggatccttcaaataacttcaggctccataatgggagaagtaaagaacaaagacttaaggaacagcttggcgctcaacaagaaccagtgaagaaatccattcaggaatcagaagcttttttgcctcagagcatacctgaagagagatacaagatgaagagcaagcccctaggaatctgcctgataatcgattgcattggcaatgagacagagcttcttcgagacaccttcacttccctgggctatgaagtccagaaattcttgcatctcagtatgcatggtatatcccagattcttggccaatttgcctgtatgcccgagcaccgagactacgacagctttgtgtgtgtcctggtgagccgaggaggctcccagagtgtgtatggtgtggatcagactcactcagggctccccctgcatcacatcaggaggatgttcatgggagattcatgcccttatctagcagggaagccaaagatgttttttattcagaactatgtggtgtcagagggccagctggaggacagcagcctcttggaggtggatgggccagcgatgaagaatgtggaattcaaggctcagaagcgagggctgtgcacagttcaccgagaagctgacttcttctggagcctgtgtactgcggacatgtccctgctggagcagtctcacagctcaccatccctgtacctgcagtgcctctcccagaaactgagacaagaaagaaaacgcccactcctggatcatcacatagttcagcgtctgacggtaccgc

SEQ ID NO: 366957 - DNA, 3754 bp, Homo sapiens
ggacgtcgaggcattacaatcgcgaaaccaagccatagcatgaaacagcgagcttgcagcctcaccgacgagtctcaactaaaagggactcccggagctaggggtggggactcggcctcacacagtgagtgccggctattggacttttgtccagtgacagctgagacaacaaggaccacgggaggaggtgtaggagagaagcgccgcgaacagcgatcgcccagcaccaagtccgcttccaggctttcggtttctttgcctccatcttgggtgcgccttcccggcgtctaggggagcgaaggctgaggtggcagcggcaggagagtccggccgcgacaggacgaactcccccactggaaaggattctgaaagaaatgaagtcagccctcagaaatgaagttgactgcctgctggctttctgttgactggcccggagctgtactgcaagacccttgtgagcttccctagtctaagagtaggatgtctgctgaagtcatccatcaggttgaagaagcacttgatacagatgagaaggagatgctgctctttttgtgccgggatgttgctatagatgtggttccacctaatgtcagggaccttctggatattttacgggaaagaggtaagctgtctgtcggggacttggctgaactgctctacagagtgaggcgatttgacctgctcaaacgtatcttgaagatggacagagtgctgatggcagagattggtgaggatttggataaatctgatgtgtcctcattaattttcctcatgaaggattacatgggccgaggcaagataagcaaggagaagagtttcttggaccttgtggttgagttggagaaactaaatctggttgccccagatcaactggatttattagaaaaatgcctaaagaacatccacagaatagacctgaagacaaaaatccagaagtacaagcagtctgttcaaggagcagggacaagttacaggaatgttctccaagcagcaatccaaaagagtctcaaggatccttcaaataacttcaggctccataatgggagaagtaaagaacaaagacttaaggaacagcttggcgctcaacaagaaccagtgaagaaatccattcaggaatcagaagcttttttgcctcagagcatacctgaagagagatacaagatgaagagcaagcccctaggaatctgcctgataatcgattgcattggcaatgagacagagcttcttcgagacaccttcacttccctgggctatgaagtccagaaattcttgcatctcagtatgcatggtatatcccagattcttggccaatttgcctgtatgcccgagcaccgagactacgacagctttgtgtgtgtcctggtgagccgaggaggctcccagagtgtgtatggtgtggatcagactcactcagggctccccctgcatcacatcaggaggatgttcatgggagattcatgcccttatctagcagggaagccaaagatgttttttattcagaactatgtggtgtcagagggccagctggaggacagcagcctcttggaggtggatgggccagcgatgaagaatgtggaattcaaggctcagaagcgagggctgtgcacagttcaccgagaagctgacttcttctggagcctgtgtactgcggacatgtccctgctggagcagtctcacagctcaccatccctgtacctgcagtgcctctcccagaaactgagacaagaaagaaaacgcccactcctggatcttcacattgaactcaatggctacatgtatgattggaacagcagagtttctgccaaggagaaatattatgtctggctgcagcacactctgagaaagaaacttatcctctcctacacataagaaaccaaaaggctgggcgtagtggctcacacctgtaatcccagcactttgggaggccaaggagggcagatcacttcaggtcaggagttcgagaccagcctggccaacatggtaaacgctgtccctagtaaaaatacaaaaattagctgggtgtgggtgtgggtacctgtattcccagttacttgggaggctgaggtgggaggatcttttgaacccaggagttcagggtcatagcatgctgtgattgtgcctacgaatagccactgcataccaacctgggcaatatagcaagatcccatctctttaaaaaaaaaaaaaaaggacaggaactatcttactcaatgtattagtcatgtttctctagagggacagaactaataggatacatgtatataaaaaggggagtttattaaggagtattgactcacatgatcacagggttaggtcccacaataggtcatctgcaagcaaggaagccaattcaagtcccaaagctgaagaacttggagtccaatgtttgagggcaggaagcattcagcatgagagaaagatggaggccagaagactacaccagtctagtctttccatgttttgcctgcttttattctggcagtgctggcagctgattagatggtgcccacccagattgaggatggtctgcctttcccagtccactgactcaaatgttaaatctcctttggcagcaccctcacagatgtacccgggaacactttgcatccttctattcaatcaagttgatactcagtattaaccatcacagtccatttgggcaactataccaaattaccatagaccaggtgacttaaacagcagttatttctcacagttccggaggctgggaaatccaacatctaagtggtagcatatctggtgtctggtaaggcatgcttccagatcttaccagatgtcagtcttttgatgttctcacatggcagaaaaagaggatgcaaactctcaagtatatctttaagggcacaaattccattcatgagggctctaccctcatcacctaattacctcccaaaggccccaccttctgatactgtcactttggggatactgtctcccctttgaattctggggggaatacaaacattcagtttgtaacaatagccttatgatttagaggttacttgttcattcacctagacctcaaattgcattttacactacttgggaggctgaagtgagtggatcccctgagcccagagaggtcaaggttgtgatgagctgtgatcacaccactgcacttcagcatgggagacagagtgagaccctgtttcagaaaaaataaataaataaaaccaccagcaccacaaacaacaacaaaaagttattttgtacttgttttgagcacaggactcctgagggtatctttgcatttaatattacataggggtgccagtgggaagtaatgtgtatgcttggcctcatgagctaaaaccctgtgttaattatgacagaaggaaagtgtgtgagagggatcttaactacctagcagctctagctgccatcttgaaccatgaagatacgggccacacgtaggggtagctgggtagtgagcagcaagaagccttgttggatgagggcacgaaggagcagaatcactggaatcactgtgtcagccctaattacctacctctggacttttatgtgaggggaaaaaaaattgacagtttatatttatctcaacctagttaacccaagtgatgcattgttatgagattaaaatgtttggaggccgggtgcgatctcagctcacaatcactagtgaattcgcgaggccaaggcgggcggatcacgaggtcaggagatcaagaccatcctggctaacatgtaaaaccccgtctctactaaaaataca

SEQ ID NO: 366958 - DNA, 1487 bp, Homo sapiens
ggacgtcgaggcattacaatcgcgaaaccaagccatagcatgaaacagcgagcttgcagcctcaccgacgagtctcaactaaaagggactcccggagctaggggtggggactcggcctcacacagtgagtgccggctattggacttttgtccagtgacagctgagacaacaaggaccacgggaggaggtgtaggagagaagcgccgcgaacagcgatcgcccagcaccaagtccgcttccaggctttcggtttctttgcctccatcttgggtgcgccttcccggcgtctaggggagcgaaggctgaggtggcagcggcaggagagtccggccgcgacaggacgaactcccccactggaaaggattctgaaagaaatgaagtcagccctcagaaatgaagttgactgcctgctggctttctgttgactggcccggagctgtactgcaagacccttgtgagcttccctagtctaagagtaggatgtctgctgaagtcatccatcaggttgaagaagcacttgatacagatgagaaggagatgctgctctttttgtgccgggatgttgctatagatgtggttccacctaatgtcagggaccttctggatattttacgggaaagaggtaagctgtctgtcggggacttggctgaactgctctacagagtgaggcgatttgacctgctcaaacgtatcttgaagatggacagaaaagctgtggagacccacctgctcaggaaccctcaccttgtttcggactatagagtgctgatggcagagattggtgaggatttggataaatctgatgtgtcctcattaattttcctcatgaaggattacatgggccgaggcaagataagcaaggagaagagtttcttggaccttgtggttgagttggagaaactaaatctggttgccccagatcaactggatttattagaaaaatgcctaaagaacatccacagaatagacctgaagacaaaaatccagaagtacaagcagtctggtaagaattttggcctctcagtggtctaggggaagtactctgtgcatgggggtgggcatcatgactgataaatattcatttgttggataggtggatggaatggaacctggatgaccaaagcctcctttagcttgtggctagaaatcgcgtccctttatattcttcatatcccagatctgccaactccattgccctgtatattcatgatctctgcaaaatgctgccaagcagttcttaacatttcagtcttcaagaaagaatctgggatctgcacaggctggcagagctatggacattcaggggttttgcatgtatgctgaaccctactgccttgctctggtatttggcctcacaaccactgtccaacttcgggtgatgtcacttgggtctcataccttccttgcatgtgtcccaagtttcacaaaacctccttatggaaaagagcacattcgatttcttccttgataaaagggaccagattcca

SEQ ID NO: 366959 - DNA, 4404 bp, Homo sapiens
gtgttagctccagccaccagtgagtcaggagaggctttctaggcaaagacatctaagttcagaatccttgtgatccagatgcctgtaccctttgagttcagaggtgggccagggtatctcaggtatttctttcctttagcatcttgcaattcaaaatatggtccttgaatcaacatcacctgagagcttgttaaacagagaaggctacttcaaattctatttctgtcttttatgttagtcatttgggttcttaagtcatttcactgtaacctctgggggagctaggggattctttaaggaagtttccattctctgagttgttttcagaaactgttagttggcaaaggatgtaccatctcctattaaacgggcaaggacaagttcccttttctgaggtcccttaagatctcttcctggggtgatctaggcttgctgttttatgagggagggacatatttacacaggggcaagaactagtcttttaatccattgttgcataggggaggcgtgggcacttggagttgtcttaggactgatgtctgaattaactaaatgaacttgtctggtttgcagagtgctgatggcagagattggtgaggatttggataaatctgatgtgtcctcattaattttcctcatgaaggattacatgggccgaggcaagataagcaaggagaagagtttcttggaccttgtggttgagttggagaaactaaatctggttgccccagatcaactggatttattagaaaaatgcctaaagaacatccacagaatagacctgaagacaaaaatccagaagtacaagcagtctgttcaaggagcagggacaagttacaggaatgttctccaagcagcaatccaaaagagtctcaaggatccttcaaataacttcaggaagaaccagtgaagaaatccattcaggaatcagaagcttttttgcctcagagcatacctgaagagagatacaagatgaagagcaagcccctaggaatctgcctgataatcgattgcattggcaatgagacagagcttcttcgagacaccttcacttccctgggctatgaagtccagaaattcttgcatctcagtatgcatggtatatcccagattcttggccaatttgcctgtatgcccgagcaccgagactacgacagctttgtgtgtgtcctggtgagccgaggaggctcccagagtgtgtatggtgtggatcagactcactcagggctccccctgcatcacatcaggaggatgttcatgggagattcatgcccttatctagcagggaagccaaagatgttttttattcagaactatgtggtgtcagagggccagctggaggacagcagcctcttggaggtggatgggccagcgatgaagaatgtggaattcaaggctcagaagcgagggctgtgcacagttcaccgagaagctgacttcttctggagcctgtgtactgcggacatgtccctgctggagcagtctcacagctcaccatccctgtacctgcagtgcctctcccagaaactgagacaagaaagggggacaattcccggaagtggaattacagagtcaaaggacatgcatttttcaagcctcggatgcatcttactagatgtcctataggatggtcatatcagctttataggagagtagctgtgtccctgaattctccctgacactgcatgctcttatatttcctcaagttttgacaatttgataggtgaaaagtggtatctgactgttcagatctggaaggctttgttatataaacatttttttaatgtttattggcaagaatacttttctaagagaaacatcagtgagctggtttccatttaagctgaatgaagccacaatgtacctcaagtataagattaactggcctttttcagttgcactctaattacaatttagaatgatgtttctgagccacctgtcaaatgcattctgggctgtacctctgcgtaccccaggaataaatctcatggccttctttacctggcctccttagtggtggcccagcaggaagcgggggttagagcaggagccactcagccttccaagatagatactccatgggccggtggtattactggccttttgagcccatccccatttgcatagatgatccacgtgggttatcatctggctggtatgttcccagagtgaaactcagcagccccttgagggaggggatggtggccatcaggccagagtattgcaagttagtttggatcatttgctaagcagcttgtggtgccttcagaaaggaacagtttcaaagaactttcacatctgttggctcatttcgccctaatgacagtcttctctttgatatttgcatggcattaaattttgcctttcttgttttctccagaaaacgcccactcctggatcttcacattgaactcaatggctacatgtatgattggaacagcagagtttctgccaaggagaaatattatgtctggctgcagcacactctgagaaagaaacttatcctctcctacacataagaaaccaaaaggctgggcgtagtggctcacacctgtaatcccagcactttgggaggccaaggagggcagatcacttcaggtcaggagttcgagaccagcctggccaacatggtaaacgctgtccctagtaaaaatacaaaaattagctgggtgtgggtgtgggtacctgtattcccagttacttgggaggctgaggtgggaggatcttttgaacccaggagttcagggtcatagcatgctgtgattgtgcctacgaatagccactgcataccaacctgggcaatatagcaagatcccatctctttaaaaaaaaaaaaaaaggacaggaactatcttactcaatgtattagtcatgtttctctagagggacagaactaataggatacatgtatataaaaaggggagtttattaaggagtattgactcacatgatcacagggttaggtcccacaataggtcatctgcaagcaaggaagccaattcaagtcccaaagctgaagaacttggagtccaatgtttgagggcaggaagcattcagcatgagagaaagatggaggccagaagactacaccagtctagtctttccatgttttgcctgcttttattctggcagtgctggcagctgattagatggtgcccacccagattgaggatggtctgcctttcccagtccactgactcaaatgttaaatctcctttggcagcaccctcacagatgtacccgggaacactttgcatccttctattcaatcaagttgatactcagtattaaccatcacagtccatttgggcaactataccaaattaccatagaccaggtgacttaaacagcagttatttctcacagttccggaggctgggaaatccaacatctaagtggtagcatatctggtgtctggtaaggcatgcttccagatcttaccagatgtcagtcttttgatgttctcacatggcagaaaaagaggatgcaaactctcaagtatatctttaagggcacaaattccattcatgagggctctaccctcatcacctaattacctcccaaaggccccaccttctgatactgtcactttggggatactgtctcccctttgaattctggggggaatacaaacattcagtttgtaacaatagccttatgatttagaggttacttgttcattcacctagacctcaaattgcattttacactacttgggaggctgaagtgagtggatcccctgagcccagagaggtcaaggttgtgatgagctgtgatcacaccactgcacttcagcatgggagacagagtgagaccctgtttcagaaaaaataaataaataaaaccaccagcaccacaaacaacaacaaaaagttattttgtacttgttttgagcacaggactcctgagggtatctttgcatttaatattacataggggtgccagtgggaagtaatgtgtatgcttggcctcatgagctaaaaccctgtgttaattatgacagaaggaaagtgtgtgagagggatcttaactacctagcagctctagctgccatcttgaaccatgaagatacgggccacacgtaggggtagctgggtagtgagcagcaagaagccttgttggatgagggcacgaaggagcagaatcactggaatcactgtgtcagccctaattacctacctctggacttttatgtgaggggaaaaaaaattgacagtttatatttatctcaacctagttaacccaagtgatgcattgttatgagattaaaatgtttggaggccgggtgcgatctcagctcacaatcactagtgaattcgcgaggccaaggcgggcggatcacgaggtcaggagatcaagaccatcctggctaacatgtaaaaccccgtctctactaaaaataca

SEQ ID NO: 366960 - DNA, 4530 bp, Homo sapiens
ttgtttgttcaaggccacgtgggtggagtcattgaggtggaggtttaactctgtgacataagtttccctgatttagtcaggctgtctgtcgttgggcttttcccacttccttctactacgtacttcttccctattcctcctactgaggccattaaacccttagttgtaattttccctgaacatgctttacattctgatgaattctgaaaaagaatgtggggtttccttgcagatgagttcatctgttgtttcatttcctttacaatgtaggttttcttctctgtctttttggattagtctgtttttggttctgtctaccaaggatccctttctttagacttctatagatccctttctatagaacttaatctacttaagtcagggagaccacccagaaggaaagagcccatactttcaatcttaggcataagttagcttgataagattttcagagaagtcagccctcagaaatgaagttgactgcctgctggctttctgttgactggcccggagctgtactgcaagacccttgtgagcttccctagtctaagagtaggatgtctgctgaagtcatccatcaggttgaagaagcacttgatacagatgagaaggagatgctgctctttttgtgccgggatgttgctatagatgtggttccacctaatgtcagggaccttctggatattttacgggaaagagagtgctgatggcagagattggtgaggatttggataaatctgatgtgtcctcattaattttcctcatgaaggattacatgggccgaggcaagataagcaaggagaagagtttcttggaccttgtggttgagttggagaaactaaatctggttgccccagatcaactggatttattagaaaaatgcctaaagaacatccacagaatagacctgaagacaaaaatccagaagtacaagcagtctgttcaaggagcagggacaagttacaggaatgttctccaagcagcaatccaaaagagtctcaaggatccttcaaataacttcaggaagaaccagtgaagaaatccattcaggaatcagaagcttttttgcctcagagcatacctgaagagagatacaagatgaagagcaagcccctaggaatctgcctgataatcgattgcattggcaatgagacagagcttcttcgagacaccttcacttccctgggctatgaagtccagaaattcttgcatctcagtatgcatggtatatcccagattcttggccaatttgcctgtatgcccgagcaccgagactacgacagctttgtgtgtgtcctggtgagccgaggaggctcccagagtgtgtatggtgtggatcagactcactcagggctccccctgcatcacatcaggaggatgttcatgggagattcatgcccttatctagcagggaagccaaagatgttttttattcagaactatgtggtgtcagagggccagctggaggacagcagcctcttggaggtggatgggccagcgatgaagaatgtggaattcaaggctcagaagcgagggctgtgcacagttcaccgagaagctgacttcttctggagcctgtgtactgcggacatgtccctgctggagcagtctcacagctcaccatccctgtacctgcagtgcctctcccagaaactgagacaagaaagggggacaattcccggaagtggaattacagagtcaaaggacatgcatttttcaagcctcggatgcatcttactagatgtcctataggatggtcatatcagctttataggagagtagctgtgtccctgaattctccctgacactgcatgctcttatatttcctcaagttttgacaatttgataggtgaaaagtggtatctgactgttcagatctggaaggctttgttatataaacatttttttaatgtttattggcaagaatacttttctaagagaaacatcagtgagctggtttccatttaagctgaatgaagccacaatgtacctcaagtataagattaactggcctttttcagttgcactctaattacaatttagaatgatgtttctgagccacctgtcaaatgcattctgggctgtacctctgcgtaccccaggaataaatctcatggccttctttacctggcctccttagtggtggcccagcaggaagcgggggttagagcaggagccactcagccttccaagatagatactccatgggccggtggtattactggccttttgagcccatccccatttgcatagatgatccacgtgggttatcatctggctggtatgttcccagagtgaaactcagcagccccttgagggaggggatggtggccatcaggccagagtattgcaagttagtttggatcatttgctaagcagcttgtggtgccttcagaaaggaacagtttcaaagaactttcacatctgttggctcatttcgccctaatgacagtcttctctttgatatttgcatggcattaaattttgcctttcttgttttctccagaaaacgcccactcctggatcttcacattgaactcaatggctacatgtatgattggaacagcagagtttctgccaaggagaaatattatgtctggctgcagcacactctgagaaagaaacttatcctctcctacacataagaaaccaaaaggctgggcgtagtggctcacacctgtaatcccagcactttgggaggccaaggagggcagatcacttcaggtcaggagttcgagaccagcctggccaacatggtaaacgctgtccctagtaaaaatacaaaaattagctgggtgtgggtgtgggtacctgtattcccagttacttgggaggctgaggtgggaggatcttttgaacccaggagttcagggtcatagcatgctgtgattgtgcctacgaatagccactgcataccaacctgggcaatatagcaagatcccatctctttaaaaaaaaaaaaaaaggacaggaactatcttactcaatgtattagtcatgtttctctagagggacagaactaataggatacatgtatataaaaaggggagtttattaaggagtattgactcacatgatcacagggttaggtcccacaataggtcatctgcaagcaaggaagccaattcaagtcccaaagctgaagaacttggagtccaatgtttgagggcaggaagcattcagcatgagagaaagatggaggccagaagactacaccagtctagtctttccatgttttgcctgcttttattctggcagtgctggcagctgattagatggtgcccacccagattgaggatggtctgcctttcccagtccactgactcaaatgttaaatctcctttggcagcaccctcacagatgtacccgggaacactttgcatccttctattcaatcaagttgatactcagtattaaccatcacagtccatttgggcaactataccaaattaccatagaccaggtgacttaaacagcagttatttctcacagttccggaggctgggaaatccaacatctaagtggtagcatatctggtgtctggtaaggcatgcttccagatcttaccagatgtcagtcttttgatgttctcacatggcagaaaaagaggatgcaaactctcaagtatatctttaagggcacaaattccattcatgagggctctaccctcatcacctaattacctcccaaaggccccaccttctgatactgtcactttggggatactgtctcccctttgaattctggggggaatacaaacattcagtttgtaacaatagccttatgatttagaggttacttgttcattcacctagacctcaaattgcattttacactacttgggaggctgaagtgagtggatcccctgagcccagagaggtcaaggttgtgatgagctgtgatcacaccactgcacttcagcatgggagacagagtgagaccctgtttcagaaaaaataaataaataaaaccaccagcaccacaaacaacaacaaaaagttattttgtacttgttttgagcacaggactcctgagggtatctttgcatttaatattacataggggtgccagtgggaagtaatgtgtatgcttggcctcatgagctaaaaccctgtgttaattatgacagaaggaaagtgtgtgagagggatcttaactacctagcagctctagctgccatcttgaaccatgaagatacgggccacacgtaggggtagctgggtagtgagcagcaagaagccttgttggatgagggcacgaaggagcagaatcactggaatcactgtgtcagccctaattacctacctctggacttttatgtgaggggaaaaaaaattgacagtttatatttatctcaacctagttaacccaagtgatgcattgttatgagattaaaatgtttggaggccgggtgcgatctcagctcacaatcactagtgaattcgcgaggccaaggcgggcggatcacgaggtcaggagatcaagaccatcctggctaacatgtaaaaccccgtctctactaaaaataca

SEQ ID NO: 366961 - DNA, 2999 bp, Homo sapiens
agaggagtcccggaagtgtactgtgttacatgggccgagggagataagcaaggagaagagtttcttggaccttgtggttgagttggagaaactaaatctggttgccccagatcaactggatttattagaaaaatgcctaaagaacatccacagaatagacctgaagacaaaaatccagaagtacaagcagtctgttcaaggagcagggacaagttacaggaatgttctccaagcagcaatccaaaagagtctcaaggatccttcaaataacttcaggctccataatgggagaagtaaagaacaaagacttaaggaacagcttggcgctcaacaagaaccagtgaagaaatccattcaggaatcagaagcttttttgcctcagagcatacctgaagagagatacaagatgaagagcaagcccctaggaatctgcctgataatcgattgcattggcaatgagacagagcttcttcgagacaccttcacttccctgggctatgaagtccagaaattcttgcatctcagtatgcatggtatatcccagattcttggccaatttgcctgtatgcccgagcaccgagactacgacagctttgtgtgtgtcctggtgagccgaggaggctcccagagtgtgtatggtgtggatcagactcactcagggctccccctgcatcacatcaggaggatgttcatgggagattcatgcccttatctagcagggaagccaaagatgttttttattcagaactatgtggtgtcagagggccagctggaggacagcagcctcttggaggtggatgggccagcgatgaagaatgtggaattcaaggctcagaagcgagggctgtgcacagttcaccgagaagctgacttcttctggagcctgtgtactgcggacatgtccctgctggagcagtctcacagctcaccatccctgtacctgcagtgcctctcccagaaactgagacaagaaagaaaacgcccactcctggatcttcacattgaactcaatggctacatgtatgattggaacagcagagtttctgccaaggagaaatattatgtctggctgcagcacactctgagaaagaaacttatcctctcctacacataagaaaccaaaaggctgggcgtagtggctcacacctgtaatcccagcactttgggaggccaaggagggcagatcacttcaggtcaggagttcgagaccagcctggccaacatggtaaacgctgtccctagtaaaaatacaaaaattagctgggtgtgggtgtgggtacctgtattcccagttacttgggaggctgaggtgggaggatcttttgaacccaggagttcagggtcatagcatgctgtgattgtgcctacgaatagccactgcataccaacctgggcaatatagcaagatcccatctctttaaaaaaaaaaaaaaaggacaggaactatcttactcaatgtattagtcatgtttctctagagggacagaactaataggatacatgtatataaaaaggggagtttattaaggagtattgactcacatgatcacagggttaggtcccacaataggtcatctgcaagcaaggaagccaattcaagtcccaaagctgaagaacttggagtccaatgtttgagggcaggaagcattcagcatgagagaaagatggaggccagaagactacaccagtctagtctttccatgttttgcctgcttttattctggcagtgctggcagctgattagatggtgcccacccagattgaggatggtctgcctttcccagtccactgactcaaatgttaaatctcctttggcagcaccctcacagatgtacccgggaacactttgcatccttctattcaatcaagttgatactcagtattaaccatcacagtccatttgggcaactataccaaattaccatagaccaggtgacttaaacagcagttatttctcacagttccggaggctgggaaatccaacatctaagtggtagcatatctggtgtctggtaaggcatgcttccagatcttaccagatgtcagtcttttgatgttctcacatggcagaaaaagaggatgcaaactctcaagtatatctttaagggcacaaattccattcatgagggctctaccctcatcacctaattacctcccaaaggccccaccttctgatactgtcactttggggatactgtctcccctttgaattctggggggaatacaaacattcagtttgtaacaatagccttatgatttagaggttacttgttcattcacctagacctcaaattgcattttacactacttgggaggctgaagtgagtggatcccctgagcccagagaggtcaaggttgtgatgagctgtgatcacaccactgcacttcagcatgggagacagagtgagaccctgtttcagaaaaaataaataaataaaaccaccagcaccacaaacaacaacaaaaagttattttgtacttgttttgagcacaggactcctgagggtatctttgcatttaatattacataggggtgccagtgggaagtaatgtgtatgcttggcctcatgagctaaaaccctgtgttaattatgacagaaggaaagtgtgtgagagggatcttaactacctagcagctctagctgccatcttgaaccatgaagatacgggccacacgtaggggtagctgggtagtgagcagcaagaagccttgttggatgagggcacgaaggagcagaatcactggaatcactgtgtcagccctaattacctacctctggacttttatgtgaggggaaaaaaaattgacagtttatatttatctcaacctagttaacccaagtgatgcattgttatgagattaaaatgtttggaggccgggtgcgatctcagctcacaatcactagtgaattcgcgaggccaaggcgggcggatcacgaggtcaggagatcaagaccatcctggctaacatgtaaaaccccgtctctactaaaaataca

SEQ ID NO: 366962 - DNA, 3010 bp, Homo sapiens
ggacgtcgaggcattacaatcgcgaaaccaagccatagcatgaaacagcgagcttgcagcctcaccgacgagtctcaactaaaagggactcccggagctaggggtggggactcggcctcacacagtgagtgccggctattggacttttgtccagtgacagctgagacaacaaggaccacgggaggaggtgtaggagagaagcgccgcgaacagcgatcgcccagcaccaagtccgcttccaggctttcggtttctttgcctccatcttgggtgcgccttcccggcgtctaggggagcgaaggctgaggtggcagcggcaggagagtccggccgcgacaggacgaagaaccagtgaagaaatccattcaggaatcagaagcttttttgcctcagagcatacctgaagagagatacaagatgaagagcaagcccctaggaatctgcctgataatcgattgcattggcaatgagacagagcttcttcgagacaccttcacttccctgggctatgaagtccagaaattcttgcatctcagtatgcatggtatatcccagattcttggccaatttgcctgtatgcccgagcaccgagactacgacagctttgtgtgtgtcctggtgagccgaggaggctcccagagtgtgtatggtgtggatcagactcactcagggctccccctgcatcacatcaggaggatgttcatgggagattcatgcccttatctagcagggaagccaaagatgttttttattcagaactatgtggtgtcagagggccagctggaggacagcagcctcttggaggtggatgggccagcgatgaagaatgtggaattcaaggctcagaagcgagggctgtgcacagttcaccgagaagctgacttcttctggagcctgtgtactgcggacatgtccctgctggagcagtctcacagctcaccatccctgtacctgcagtgcctctcccagaaactgagacaagaaagaaaacgcccactcctggatcttcacattgaactcaatggctacatgtatgattggaacagcagagtttctgccaaggagaaatattatgtctggctgcagcacactctgagaaagaaacttatcctctcctacacataagaaaccaaaaggctgggcgtagtggctcacacctgtaatcccagcactttgggaggccaaggagggcagatcacttcaggtcaggagttcgagaccagcctggccaacatggtaaacgctgtccctagtaaaaatacaaaaattagctgggtgtgggtgtgggtacctgtattcccagttacttgggaggctgaggtgggaggatcttttgaacccaggagttcagggtcatagcatgctgtgattgtgcctacgaatagccactgcataccaacctgggcaatatagcaagatcccatctctttaaaaaaaaaaaaaaaggacaggaactatcttactcaatgtattagtcatgtttctctagagggacagaactaataggatacatgtatataaaaaggggagtttattaaggagtattgactcacatgatcacagggttaggtcccacaataggtcatctgcaagcaaggaagccaattcaagtcccaaagctgaagaacttggagtccaatgtttgagggcaggaagcattcagcatgagagaaagatggaggccagaagactacaccagtctagtctttccatgttttgcctgcttttattctggcagtgctggcagctgattagatggtgcccacccagattgaggatggtctgcctttcccagtccactgactcaaatgttaaatctcctttggcagcaccctcacagatgtacccgggaacactttgcatccttctattcaatcaagttgatactcagtattaaccatcacagtccatttgggcaactataccaaattaccatagaccaggtgacttaaacagcagttatttctcacagttccggaggctgggaaatccaacatctaagtggtagcatatctggtgtctggtaaggcatgcttccagatcttaccagatgtcagtcttttgatgttctcacatggcagaaaaagaggatgcaaactctcaagtatatctttaagggcacaaattccattcatgagggctctaccctcatcacctaattacctcccaaaggccccaccttctgatactgtcactttggggatactgtctcccctttgaattctggggggaatacaaacattcagtttgtaacaatagccttatgatttagaggttacttgttcattcacctagacctcaaattgcattttacactacttgggaggctgaagtgagtggatcccctgagcccagagaggtcaaggttgtgatgagctgtgatcacaccactgcacttcagcatgggagacagagtgagaccctgtttcagaaaaaataaataaataaaaccaccagcaccacaaacaacaacaaaaagttattttgtacttgttttgagcacaggactcctgagggtatctttgcatttaatattacataggggtgccagtgggaagtaatgtgtatgcttggcctcatgagctaaaaccctgtgttaattatgacagaaggaaagtgtgtgagagggatcttaactacctagcagctctagctgccatcttgaaccatgaagatacgggccacacgtaggggtagctgggtagtgagcagcaagaagccttgttggatgagggcacgaaggagcagaatcactggaatcactgtgtcagccctaattacctacctctggacttttatgtgaggggaaaaaaaattgacagtttatatttatctcaacctagttaacccaagtgatgcattgttatgagattaaaatgtttggaggccgggtgcgatctcagctcacaatcactagtgaattcgcgaggccaaggcgggcggatcacgaggtcaggagatcaagaccatcctggctaacatgtaaaaccccgtctctactaaaaataca

SEQ ID NO: 366963 - DNA, 890 bp, Homo sapiens
ggacgtcgaggcattacaatcgcgaaaccaagccatagcatgaaacagcgagcttgcagcctcaccgacgagtctcaactaaaagggactcccggagctaggggtggggactcggcctcacacagtgagtgccggctattggacttttgtccagtgacagctgagacaacaaggaccacgggaggaggtgtaggagagaagcgccgcgaacagcgatcgcccagcaccaagtccgcttccaggctttcggtttctttgcctccatcttgggtgcgccttcccggcgtctaggggagcgaaggctgaggtggcagcggcaggagagtccggccgcgacaggacgaactcccccactggaaaggattctgaaagaaatgaagtcagccctcagaaatgaagttgactgcctgctggctttctgttgactggcccggagctgtactgcaagacccttgtgagcttccctagtctaagagtaggatgtctgctgaagtcatccatcaggttgaagaagcacttgatacagatgagaaggagatgctgctctttttgtgccgggatgttgctatagatgtggttccacctaatgtcagggaccttctggatattttacgggaaagaggtaagctgtctgtcggggacttggctgaactgctctacagagtgaggcgatttgacctgctcaaacgtatcttgaagatggacagaaaagctgtggagacccacctgctcaggaaccctcaccttgtttcggactatagagtgctgatggcagagattggtgaggatttggataacacgtttcgcgagatttcaactgttacacaggaagtagagaaaaaggaatctgaagaggctgggtatggtggctcacgcctgtaatcccaaaa

SEQ ID NO: 366964 - DNA, 280 bp, Homo sapiens
ccagctggaggacagcagcctcttggaggtggatgggccagcgatgaagaatgtggaattcaaggctcagaagcgagggctgtgcacagttcaccgagaagctgacttcttctggagcctgtgtactgcggacatgtccctgctggagcagtctcacagctcaccatccctgtacctgcagtgcctctcccagaaactgagacaagaaaggtgagcccccaggaggtggtcagttccggaccacctgcttattttcgtgccaccaggatgggaattacca

SEQ ID NO: 366965 - DNA, 1356 bp, Homo sapiens
acttttctacattctacggtgagagaacatcatcaattatgtaaaattctttctaaactagcttttgaaatgagtcactcaggcttaaagcaggttattgtagcttctgaggaaagtgagtgctccaattcctttaaagaacgttttcaattggaaaagagtaagatgaaatctaaatatttgaacttgctaagtaatgatcacaatctatggcccaggctcagaaaatctgctactgaaccttaaatgttgagaataagacaacctcattttatgattctctacatgtggaatttatactgtaggtttttgttgtttgtgggggttgtgtgtgttctttctaagtaagccttcatgtggtatttttgcacacaaaatgttctagctttgctttctaaagctgttctcagctgtggtacatcatggaccactcaaatgaccttccatcgtttgctgtttttctcaacgttgattgaaatgtcttaagttagcctcaggaattcagttctgttctttgttctgtccctcttttccttctgaccttggagcagataatcagctggtcagtgattctgtacccctatagtcatgcaaatagacagaaacacactcatgtgttgtacaaagcctggcccaaaatactcatccttggcttgcttttgaaggtgcctctgagaggacatttctgcaggactctatctgaaacctaaaaatatcctgtttccctgaatgaaaaggagaaagctattgagtttagtaggaaactcaataaatggtattaagcacggccttatgaaggaagattaacaaatgattatttatcatgtttgtccttaagggtccagaaaagcaacactgagtatattgttggagatgtcacatgtaagcatattagcaagatacttatactaaccgaagtgctacttgagagactattgtattaataacaaaaagatactagaagttgcttcaaatcttttctcttctaccatttacacaatgccaaggaaatagagaagtgcagatgtacataattgtacccaacagatgtatatctgaaaaagatgtaaatcaagttacattttaaattcagcagagaaactcagaacattaaaggagtataaaatatcggtggtatagcaaaaaaaaaaaaacccctaatttatgttttaccagttggcattataaatcctgttttacatactttgtgggggttgagggagttagggaacctatcttatcatacctcagtatttctcctgcattccttctgtggaaattattcagagatttactttgaagttacattgtatagtagaatagttcattacccctcaaatgattgctcagcccact

SEQ ID NO: 366966 - DNA, 4815 bp, Homo sapiens
gcagggaaagggggcggggcggggcccgcaggcccggtcgggcggaggccgcgcgcgcccctcgccccctgcgccctctggcggccggctggacgcacttcgcagcccgacccagagagtcacgtgactttggaaagtcccgtggaaatccccgggcctacaacccgcatacaactgaaacggggcaaagcagactgcgcagtctgcagtcttcgtggcgggccaagcgagcttggagcccgcgggggcggagcggtgagagcggccgccaagagagatcacacccccagccgaccctgccagcgagcgagcccgaccccaggcgtccatggagcgtcgcctccgcccggtccctgccccgacccccgcctgcggcgcgctcctgccttgaccaggacttgggactttgcgaaaggatcgcggggcccggagaggtgttggagagcacaatggctgaacaagtccttcctcaggctttgtatttgagcaatatgcggaaagctgtgaagatacgggagagaactccagaagacatttttaaacctactaatgggatcattcatcattttaaaaccatgcaccgatacacactggaaatgttcagaacttgccagttttgtcctcagtttcgggagatcatccacaaagccctcatcgacagaaacatccaggccaccctggaaagccagaagaaactcaactggtgtcgagaagtccggaagcttgtggcgctgaaaacgaacggtgacggcaattgcctcatgcatgccacttctcagtacatgtggggcgttcaggacacagacttggtactgaggaaggcgctgttcagcacgctcaaggaaacagacacacgcaactttaaattccgctggcaactggagtctctcaaatctcaggaatttgttgaaacggggctttgctatgatactcggaactggaatgatgaatgggacaatcttatcaaaatggcttccacagacacacccatggcccgaagtggacttcagtacaactcactggaagaaatacacatatttgtcctttgcaacatcctcagaaggccaatcattgtcatttcagacaaaatgctaagaagtttggaatcaggttccaatttcgcccctttgaaagtgggtggaatttacttgcctctccactggcctgcccaggaatgctacagataccccattgttctcggctatgacagccatcattttgtacccttggtgaccctgaaggacagtgggcctgaaatccgagctgttccacttgttaacagagaccggggaagatttgaagacttaaaagttcactttttgacagatcctgaaaatgagatgaaggagaagctcttaaaagagtacttaatggtgatagaaatccccgtccaaggctgggaccatggcacaactcatctcatcaatgccgcaaagttggatgaagctaacttaccaaaagaaatcaatctggtagatgattactttgaacttgttcagcatgagtacaagaaatggcaggaaaacagcgagcaggggaggagagaggggcacgcccagaatcccatggaaccttccgtgccccagctttctctcatggatgtaaaatgtgaaacgcccaactgccccttcttcatgtctgtgaacacccagcctttatgccatgagtgctcagagaggcggcaaaagaatcaaaacaaactcccaaagctgaactccaagccgggccctgaggggctccctggcatggcgctcggggcctctcggggagaagcctatgagcccttggcgtggaaccctgaggagtccactggggggcctcattcggccccaccgacagcacccagcccttttctgttcagtgagaccactgccatgaagtgcaggagccccggctgccccttcacactgaatgtgcagcacaacggattttgtgaacgttgccacaacgcccggcaacttcacgccagccacgccccagaccacacaaggcacttggatcccgggaagtgccaagcctgcctccaggatgttaccaggacatttaatgggatctgcagtacttgcttcaaaaggactacagcagaggcctcctccagcctcagcaccagcctccctccttcctgtcaccagcgttccaagtcagatccctcgcggctcgtccggagcccctccccgcattcttgccacagagctggaaacgacgcccctgctggctgcctgtctcaagctgcacggactcctggggacaggacggggacgagcaagtgcagaaaagccggctgcgtgtattttgggactccagaaaacaagggcttttgcacactgtgtttcatcgagtacagagaaaacaaacattttgctgctgcctcagggaaagtcagtcccacagcgtccaggttccagaacaccattccgtgcctggggagggaatgcggcacccttggaagcaccatgtttgaaggatactgccagaagtgtttcattgaagctcagaatcagagatttcatgaggccaaaaggacagaagagcaactgagatcgagccagcgcagagatgtgcctcgaaccacacaaagcacctcaaggcccaagtgcgcccgggcctcctgcaagaacatcctggcctgccgcagcgaggagctctgcatggagtgtcagcatcccaaccagaggatgggccctggggcccaccggggtgagcctgcccccgaagacccccccaagcagcgttgccgggcccccgcctgtgatcattttggcaatgccaagtgcaacggctactgcaacgaatgctttcagttcaagcagatgtatggctaaccggaaacaggtgggtcacctcctgcaagaagtggggcctcgagctgtcagtcatcatggtgctatcctctgaacccctcagctgccactgcaacagtgggcttaagggtgtctgagcaggagaggaaagataagctcttcgtggtgcccacgatgctcaggtttggtaacccgggagtgttcccaggtggccttagaaagcaaagcttgtaactggcaagggatgatgtcagattcagcccaaggttcctcctctcctaccaagcaggaggccaggaacttctttggacttggaaggtgtgcggggactggccgaggcccctgcaccctgcgcatcaggactgcttcatcgtcttggctgagaaagggaaaagacacacaagtcgcgtgggttggagaagccagagccattccacctcccctcccccagcatctctcagagatgtgaagccagatcctcatggcagcgaggccctctgcaagaagctcaaggaagctcagggaaaatggacgtattcagagagtgtttgtagttcatggtttttccctacctgcccggttcctttcctgaggacccggcagaaatgcagaaccatccatggactgtgattctgaggctgctgagactgaacatgttcacattgacagaaaaacaagctgctctttataatatgcaccttttaaaaaattagaatattttactgggaagacgtgtaactctttgggttattactgtctttacttctaaagaagttagcttgaactgaggagtaaaagtgtgtacatatataatatacccttacattatgtatgagggatttttttaaattatattgaaatgctgccctagaagtacaataggaaggctaaataataataacctgttttctggttgttgttggggcatgagcttgtgtatacactgcttgcataaactcaaccagctgcctttttaaagggagctctagtcctttttgtgtaattcactttatttattttattacaaacttcaagattatttaagtgaagatatttcttcagctctggggaaaatgccacagtgttctcctgagagaacatccttgctttgagtcaggctgtgggcaagttcctgaccacagggagtaaattggcctctttgatacacttttgcttgcctccccaggaaagaaggaattgcatccaaggtatacatacatattcatcgatgtttcgtgcttctccttatgaaactccagctatgtaataaaaaactatactctgtgttctgttaatgcctctgagtgtcctacctccttggagatgagatagggaaggagcagggatgagactggcaatggtcacagggaaagatgtggccttttgtgatggttttattttctgttaacactgtgtcctgggggggctgggaagtcccctgcatcccatggtaccctggtattgggacagcaaaagccagtaaccatgagtatgaggaaatctctttctgttgctggcttacagtttctctgtgtgctttgtggttgctgtcatatttgctctagaagaaaaaaaaaaaaggaggggaaatgcattttccccagagataaaggctgccattttgggggtctgtacttatggcctgaaaatatttgtgatccataactctacacagcctttactcatactattaggcacactttccccttagagccccctaagtttttcccagacgaatctttataatttctttccaaagataccaaataaacttcagtgttttcatctaattctcttaaagttgatatcttaatattttgtgttgatcattatttccattcttaatgtgaaaaaaagtaattatttatacttattataaaaagtatttgaaatttgcacatttaattgtccctaatagaaagccacctattctttgttggatttcttcaagtttttctaaataaatgtaacttttcacaagagtcaacattaaaaaataaattatttaagaaca

SEQ ID NO: 366967 - DNA, 1075 bp, Homo sapiens
gcagggaaagggggcggggcggggcccgcaggcccggtcgggcggaggccgcgcgcgcccctcgccccctgcgccctctggcggccggctggacgcacttcgcagcccgacccagagagtcacgtgactttggaaagtcccgtggaaatccccgggcctacaacccgcatacaactgaaacggggcaaagcagactgcgcagtctgcagtcttcgtggcgggccaagcgagcttggagcccgcgggggcggagcggtgagagcggccgccaagagagatcacacccccagccgaccctgccagcgagcgagcccgaccccaggcgtccatggagcgtcgcctccgcccggtccctgccccgacccccgcctgcggcgcgctcctgccttgaccaggacttgggactttgcgaaaggatcgcggggcccggagaggtaaccgccgcgcctcccggagaggtgttggagagcacaatggctgaacaagtccttcctcaggctttgtatttgagcaatatgcggaaagctgtgaagatacgggagagaactccagaagacatttttaaacctactaatgggatcattcatcattttaaaaccatgcaccgatacacactggaaatgttcagaacttgccagttttgtcctcagtttcgggagatcatccacaaagccctcatcgacagaaacatccaggccaccctggaaagccagaagaaactcaactggtgtcgagaagtccggaagcttgtggcgctgaaaacgaacggtaagacttgttctgttgtgtttcttttgcctgggtgatagctcccgcctgctggatccccattcatgaagctttaataggacaagcccaaactcaaatcaatcttgagatttagtattgagacctttatatagaatctctattcggggtatgtgataatagcagacttgttttgtgaatctatttattaaggatattttctgattgtgtatattgcagagcacattgaggcttggagaatgcatttgtaaacaccatacctccattaggtgatttctttctaattcttgcaaatgtctaatcatct

SEQ ID NO: 366968 - DNA, 5219 bp, Homo sapiens
gcagggaaagggggcggggcggggcccgcaggcccggtcgggcggaggccgcgcgcgcccctcgccccctgcgccctctggcggccggctggacgcacttcgcagcccgacccagagagtcacgtgactttggaaagtcccgtggaaatccccgggcctacaacccgcatacaactgaaacggggcaaagcagactgcgcagtctgcagtcttcgtggcgggccaagcgagcttggagcccgcgggggcggagcggtgagagcggccgccaagagagatcacacccccagccgaccctgccagcgagcgagcccgaccccaggcgtccatggagcgtcgcctccgcccggtccctgccccgacccccgcctgcggcgcgctcctgccttgaccaggacttgggactttgcgaaaggatcgcggggcccggagaggtaaccgccgcgcctcccggagaggtaaccgccgcgcctcccggagaggtaaccgccgcgcctccccgtgccgtctgcctcgggctcaccgcagtcaagggctgcgggtgcatgttgggcagcgacccccgggctggcaccgtctacctggcgttggttttgcagcgctcctggactgggagtttgttggacgtttctgtctgggttttgaagtgctgggagttgaggtcactgctgcagaggtgttggagagcacaatggctgaacaagtccttcctcaggctttgtatttgagcaatatgcggaaagctgtgaagatacgggagagaactccagaagacatttttaaacctactaatgggatcattcatcattttaaaaccatgcaccgatacacactggaaatgttcagaacttgccagttttgtcctcagtttcgggagatcatccacaaagccctcatcgacagaaacatccaggccaccctggaaagccagaagaaactcaactggtgtcgagaagtccggaagcttgtggcgctgaaaacgaacggtgacggcaattgcctcatgcatgccacttctcagtacatgtggggcgttcaggacacagacttggtactgaggaaggcgctgttcagcacgctcaaggaaacagacacacgcaactttaaattccgctggcaactggagtctctcaaatctcaggaatttgttgaaacggggctttgctatgatactcggaactggaatgatgaatgggacaatcttatcaaaatggcttccacagacacacccatggcccgaagtggacttcagtacaactcactggaagaaatacacatatttgtcctttgcaacatcctcagaaggccaatcattgtcatttcagacaaaatgctaagaagtttggaatcaggttccaatttcgcccctttgaaagtgggtggaatttacttgcctctccactggcctgcccaggaatgctacagataccccattgttctcggctatgacagccatcattttgtacccttggtgaccctgaaggacagtgggcctgaaatccgagctgttccacttgttaacagagaccggggaagatttgaagacttaaaagttcactttttgacagatcctgaaaatgagatgaaggagaagctcttaaaagagtacttaatggtgatagaaatccccgtccaaggctgggaccatggcacaactcatctcatcaatgccgcaaagttggatgaagctaacttaccaaaagaaatcaatctggtagatgattactttgaacttgttcagcatgagtacaagaaatggcaggaaaacagcgagcaggggaggagagaggggcacgcccagaatcccatggaaccttccgtgccccagctttctctcatggatgtaaaatgtgaaacgcccaactgccccttcttcatgtctgtgaacacccagcctttatgccatgagtgctcagagaggcggcaaaagaatcaaaacaaactcccaaagctgaactccaagccgggccctgaggggctccctggcatggcgctcggggcctctcggggagaagcctatgagcccttggcgtggaaccctgaggagtccactggggggcctcattcggccccaccgacagcacccagcccttttctgttcagtgagaccactgccatgaagtgcaggagccccggctgccccttcacactgaatgtgcagcacaacggattttgtgaacgttgccacaacgcccggcaacttcacgccagccacgccccagaccacacaaggcacttggatcccgggaagtgccaagcctgcctccaggatgttaccaggacatttaatgggatctgcagtacttgcttcaaaaggactacagcagaggcctcctccagcctcagcaccagcctccctccttcctgtcaccagcgttccaagtcagatccctcgcggctcgtccggagcccctccccgcattcttgccacagagctggaaacgacgcccctgctggctgcctgtctcaagctgcacggactcctggggacaggacggggacgagcaagtgcagaaaagccggctgcgtgtattttgggactccagaaaacaagggcttttgcacactgtgtttcatcgagtacagagaaaacaaacattttgctgctgcctcagggaaagtcagtcccacagcgtccaggttccagaacaccattccgtgcctggggagggaatgcggcacccttggaagcaccatgtttgaaggatactgccagaagtgtttcattgaagctcagaatcagagatttcatgaggccaaaaggacagaagagcaactgagatcgagccagcgcagagatgtgcctcgaaccacacaaagcacctcaaggcccaagtgcgcccgggcctcctgcaagaacatcctggcctgccgcagcgaggagctctgcatggagtgtcagcatcccaaccagaggatgggccctggggcccaccggggtgagcctgcccccgaagacccccccaagcagcgttgccgggcccccgcctgtgatcattttggcaatgccaagtgcaacggctactgcaacgaatgctttcagttcaagcagatgtatggctaaccggaaacaggtgggtcacctcctgcaagaagtggggcctcgagctgtcagtcatcatggtgctatcctctgaacccctcagctgccactgcaacagtgggcttaagggtgtctgagcaggagaggaaagataagctcttcgtggtgcccacgatgctcaggtttggtaacccgggagtgttcccaggtggccttagaaagcaaagcttgtaactggcaagggatgatgtcagattcagcccaaggttcctcctctcctaccaagcaggaggccaggaacttctttggacttggaaggtgtgcggggactggccgaggcccctgcaccctgcgcatcaggactgcttcatcgtcttggctgagaaagggaaaagacacacaagtcgcgtgggttggagaagccagagccattccacctcccctcccccagcatctctcagagatgtgaagccagatcctcatggcagcgaggccctctgcaagaagctcaaggaagctcagggaaaatggacgtattcagagagtgtttgtagttcatggtttttccctacctgcccggttcctttcctgaggacccggcagaaatgcagaaccatccatggactgtgattctgaggctgctgagactgaacatgttcacattgacagaaaaacaagctgctctttataatatgcaccttttaaaaaattagaatattttactgggaagacgtgtaactctttgggttattactgtctttacttctaaagaagttagcttgaactgaggagtaaaagtgtgtacatatataatatacccttacattatgtatgagggatttttttaaattatattgaaatgctgccctagaagtacaataggaaggctaaataataataacctgttttctggttgttgttggggcatgagcttgtgtatacactgcttgcataaactcaaccagctgcctttttaaagggagctctagtcctttttgtgtaattcactttatttattttattacaaacttcaagattatttaagtgaagatatttcttcagctctggggaaaatgccacagtgttctcctgagagaacatccttgctttgagtcaggctgtgggcaagttcctgaccacagggagtaaattggcctctttgatacacttttgcttgcctccccaggaaagaaggaattgcatccaaggtatacatacatattcatcgatgtttcgtgcttctccttatgaaactccagctatgtaataaaaaactatactctgtgttctgttaatgcctctgagtgtcctacctccttggagatgagatagggaaggagcagggatgagactggcaatggtcacagggaaagatgtggccttttgtgatggttttattttctgttaacactgtgtcctgggggggctgggaagtcccctgcatcccatggtaccctggtattgggacagcaaaagccagtaaccatgagtatgaggaaatctctttctgttgctggcttacagtttctctgtgtgctttgtggttgctgtcatatttgctctagaagaaaaaaaaaaaaggaggggaaatgcattttccccagagataaaggctgccattttgggggtctgtacttatggcctgaaaatatttgtgatccataactctacacagcctttactcatactattaggcacactttccccttagagccccctaagtttttcccagacgaatctttataatttctttccaaagataccaaataaacttcagtgttttcatctaattctcttaaagttgatatcttaatattttgtgttgatcattatttccattcttaatgtgaaaaaaagtaattatttatacttattataaaaagtatttgaaatttgcacatttaattgtccctaatagaaagccacctattctttgttggatttcttcaagtttttctaaataaatgtaacttttcacaagagtcaacattaaaaaataaattatttaagaacaaaaaaagacaacacaaaaaaaaaaccatgtggcccgcttgggccaagcgaattttaacatcagccaagcttatcattccgcccgaattcagactaattgccccatttccccttatagggagccgtttacaattaacgggccggcgttttacccggtcgcggg

SEQ ID NO: 366969 - DNA, 5217 bp, Homo sapiens
gcagggaaagggggcggggcggggcccgcaggcccggtcgggcggaggccgcgcgcgcccctcgccccctgcgccctctggcggccggctggacgcacttcgcagcccgacccagagagtcacgtgactttggaaagtcccgtggaaatccccgggcctacaacccgcatacaactgaaacggggcaaagcagactgcgcagtctgcagtcttcgtggcgggccaagcgagcttggagcccgcgggggcggagcggtgagagcggccgccaagagagatcacacccccagccgaccctgccagcgagcgagcccgaccccaggcgtccatggagcgtcgcctccgcccggtccctgccccgacccccgcctgcggcgcgctcctgccttgaccaggacttgggactttgcgaaaggatcgcggggcccggagaggtaaccgccgcgcctcccggagaggtaaccgccgcgcctcccggagaggtaaccgccgcgcctccccgtgccgtctgcctcgggctcaccgcagtcaagggctgcgggtgcatgttgggcagcgacccccgggctggcaccgtctacctggcgttggttttgcagcgctcctggactgggagtttgttggacgtttctgtctgggttttgaagtgctgggagttgaggtcactgctgcagaggtgttggagagcacaatggctgaacaagtccttcctcaggctttgtatttgagcaatatgcggaaagctgtgaagatacgggagagaactccagaagacatttttaaacctactaatgggatcattcatcattttaaaaccatgcaccgatacacactggaaatgttcagaacttgccagttttgtcctcagtttcgggagatcatccacaaagccctcatcgacagaaacatccaggccaccctggaaagccagaagaaactcaactggtgtcgagaagtccggaagcttgtggcgctgaaaacgaacggtgacggcaattgcctcatgcatgccacttctcagtacatgtggggcgttcaggacacagacttggtactgaggaaggcgctgttcagcacgctcaaggaaacagacacacgcaactttaaattccgctggcaactggagtctctcaaatctcaggaatttgttgaaacggggctttgctatgatactcggaactggaatgatgaatgggacaatcttatcaaaatggcttccacagacacacccatggcccgaagtggacttcagtacaactcactggaagaaatacacatatttgtcctttgcaacatcctcagaaggccaatcattgtcatttcaggtgagatgcctgcagatcacggatctgtacttaaatgctttcagccttatgccttggctcctggagaaaaccacactgccaaagttcaggtaacagagttcaatggaatttgatgaaagtcacctaagggcctcattttcctttctctttctttgaacagacaaaatgctaagaagtttggaatcaggttccaatttcgcccctttgaaagtgggtggaatttacttgcctctccactggcctgcccaggaatgctacagataccccattgttctcggctatgacagccatcattttgtacccttggtgaccctgaaggacagtgggcctgaaatccgagctgttccacttgttaacagagaccggggaagatttgaagacttaaaagttcactttttgacagatcctgaaaatgagatgaaggagaagctcttaaaagagtacttaatggtgatagaaatccccgtccaaggctgggaccatggcacaactcatctcatcaatgccgcaaagttggatgaagctaacttaccaaaagaaatcaatctggtagatgattactttgaacttgttcagcatgagtacaagaaatggcaggaaaacagcgagcaggggaggagagaggggcacgcccagaatcccatggaaccttccgtgccccagctttctctcatggatgtaaaatgtgaaacgcccaactgccccttcttcatgtctgtgaacacccagcctttatgccatgagtgctcagagaggcggcaaaagaatcaaaacaaactcccaaagctgaactccaagccgggccctgaggggctccctggcatggcgctcggggcctctcggggagaagcctatgagcccttggcgtggaaccctgaggagtccactggggggcctcattcggccccaccgacagcacccagcccttttctgttcagtgagaccactgccatgaagtgcaggagccccggctgccccttcacactgaatgtgcagcacaacggattttgtgaacgttgccacaacgcccggcaacttcacgccagccacgccccagaccacacaaggcacttggatcccgggaagtgccaagcctgcctccaggatgttaccaggacatttaatgggatctgcagtacttgcttcaaaaggactacagcagaggcctcctccagcctcagcaccagcctccctccttcctgtcaccagcgttccaagtcagatccctcgcggctcgtccggagcccctccccgcattcttgccacagagctggaaacgacgcccctgctggctgcctgtctcaagctgcacggactcctggggacaggacggggacgagcaagtgcagaaaagccggctgcgtgtattttgggactccagaaaacaagggcttttgcacactgtgtttcatcgagtacagagaaaacaaacattttgctgctgcctcagggaaagtcagtcccacagcgtccaggttccagaacaccattccgtgcctggggagggaatgcggcacccttggaagcaccatgtttgaaggatactgccagaagtgtttcattgaagctcagaatcagagatttcatgaggccaaaaggacagaagagcaactgagatcgagccagcgcagagatgtgcctcgaaccacacaaagcacctcaaggcccaagtgcgcccgggcctcctgcaagaacatcctggcctgccgcagcgaggagctctgcatggagtgtcagcatcccaaccagaggatgggccctggggcccaccggggtgagcctgcccccgaagacccccccaagcagcgttgccgggcccccgcctgtgatcattttggcaatgccaagtgcaacggctactgcaacgaatgctttcagttcaagcagatgtatggctaaccggaaacaggtgggtcacctcctgcaagaagtggggcctcgagctgtcagtcatcatggtgctatcctctgaacccctcagctgccactgcaacagtgggcttaagggtgtctgagcaggagaggaaagataagctcttcgtggtgcccacgatgctcaggtttggtaacccgggagtgttcccaggtggccttagaaagcaaagcttgtaactggcaagggatgatgtcagattcagcccaaggttcctcctctcctaccaagcaggaggccaggaacttctttggacttggaaggtgtgcggggactggccgaggcccctgcaccctgcgcatcaggactgcttcatcgtcttggctgagaaagggaaaagacacacaagtcgcgtgggttggagaagccagagccattccacctcccctcccccagcatctctcagagatgtgaagccagatcctcatggcagcgaggccctctgcaagaagctcaaggaagctcagggaaaatggacgtattcagagagtgtttgtagttcatggtttttccctacctgcccggttcctttcctgaggacccggcagaaatgcagaaccatccatggactgtgattctgaggctgctgagactgaacatgttcacattgacagaaaaacaagctgctctttataatatgcaccttttaaaaaattagaatattttactgggaagacgtgtaactctttgggttattactgtctttacttctaaagaagttagcttgaactgaggagtaaaagtgtgtacatatataatatacccttacattatgtatgagggatttttttaaattatattgaaatgctgccctagaagtacaataggaaggctaaataataataacctgttttctggttgttgttggggcatgagcttgtgtatacactgcttgcataaactcaaccagctgcctttttaaagggagctctagtcctttttgtgtaattcactttatttattttattacaaacttcaagattatttaagtgaagatatttcttcagctctggggaaaatgccacagtgttctcctgagagaacatccttgctttgagtcaggctgtgggcaagttcctgaccacagggagtaaattggcctctttgatacacttttgcttgcctccccaggaaagaaggaattgcatccaaggtatacatacatattcatcgatgtttcgtgcttctccttatgaaactccagctatgtaataaaaaactatactctgtgttctgttaatgcctctgagtgtcctacctccttggagatgagatagggaaggagcagggatgagactggcaatggtcacagggaaagatgtggccttttgtgatggttttattttctgttaacactgtgtcctgggggggctgggaagtcccctgcatcccatggtaccctggtattgggacagcaaaagccagtaaccatgagtatgaggaaatctctttctgttgctggcttacagtttctctgtgtgctttgtggttgctgtcatatttgctctagaagaaaaaaaaaaaaggaggggaaatgcattttccccagagataaaggctgccattttgggggtctgtacttatggcctgaaaatatttgtgatccataactctacacagcctttactcatactattaggcacactttccccttagagccccctaagtttttcccagacgaatctttataatttctttccaaagataccaaataaacttcagtgttttcatctaattctcttaaagttgatatcttaatattttgtgttgatcattatttccattcttaatgtgaaaaaaagtaattatttatacttattataaaaagtatttgaaatttgcacatttaattgtccctaatagaaagccacctattctttgttggatttcttcaagtttttctaaataaatgtaacttttcacaagagtcaacattaaaaaataaattatttaagaaca

SEQ ID NO: 366970 - DNA, 4337 bp, Homo sapiens
gcagggaaagggggcggggcggggcccgcaggcccggtcgggcggaggccgcgcgcgcccctcgccccctgcgccctctggcggccggctggacgcacttcgcagcccgacccagagagtcacgtgactttggaaagtcccgtggaaatccccgggcctacaacccgcatacaactgaaacggggcaaagcagactgcgcagtctgcagtcttcgtggcgggccaagcgagcttggagcccgcgggggcggagcggtgagagcggccgccaagagagatcacacccccagccgaccctgccagcgagcgagcccgaccccaggcgtccatggagcgtcgcctccgcccggtccctgccccgacccccgcctgcggcgcgctcctgccttgaccaggacttgggactttgcgaaaggatcgcggggcccggagaggtaaccgccgcgcctcccggagaggtaaccgccgcgcctcccggagaggtaaccgccgcgcctccccgtgccgtctgcctcgggctcaccgcagtcaagggctgcgggtgcatgttgggcagcgacccccgggctggcaccgtctacctggcgttggttttgcagcgctcctggactgggagtttgttggacgtttctgtctgggttttgaagtgctgggagttgaggtcactgctgcagaggtgttggagagcacaatggctgaacaagtccttcctcaggctttgtatttgagcaatatgcggaaagctgtgaagatacgggagagaactccagaagacatttttaaacctactaatgggatcattcatcattttaaaaccatgcaccgatacacactggaaatgttcagaacttgccagttttgtcctcagtttcgggagatcatccacaaagccctcatcgacagaaacatccaggccaccctggaaagccagaagaaactcaactggtgtcgagaagtccggaagcttgtggcgctgaaaacgaacggtgacggcaattgcctcatgcatgccacttctcagtacatgtggggcgttcaggacacagacttggtactgaggaaggcgctgttcagcacgctcaaggaaacagacacacgcaactttaaattccgctggcaactggagtctctcaaatctcaggaatttgttgaaacggggctttgctatgatactcggaactggaatgatgaatgggacaatcttatcaaaatggcttccacagacacacccatggcccgaagtggacttcagtacaactcactggaagaaatacacatatttgtcctttgcaacatcctcagaaggccaatcattgtcatttcagacaaaatgctaagaagtttggaatcaggttccaatttcgcccctttgaaagtgggtggaatttacttgcctctccactggcctgcccaggaatgctacagataccccattgttctcggctatgacagccatcattttgtacccttggtgaccctgaaggacagtgggcctgaaatccgagctgttccacttgttaacagagaccggggaagatttgaagacttaaaagttcactttttgacagatcctgaaaatgagatgaaggagaagctcttaaaagagtacttaatggtgatagaaatccccgtccaaggctgggaccatggcacaactcatctcatcaatgccgcaaagttggatgaagctaacttaccaaaagaaatcaatctggtagatgattactttgaacttgttcagcatgagtacaagaaatggcaggaaaacagcgagcaggggaggagagaggggcacgcccagaatcccatggaaccttccgtgccccagctttctctcatggatgtaaaatgtgaaacgcccaactgccccttcttcatgtctgtgaacacccagcctttatgccatgagtgctcagagaggcggcaaaagaatcaaaacaaactcccaaagctgaactccaagccgggccctgaggggctccctggcatggcgctcggggcctctcggggagaagcctatgagcccttggcgtggaaccctgaggagtccactggggggcctcattcggccccaccgacagcacccagcccttttctgttcagtgagaccactgccatgaagtgcaggagccccggctgccccttcacactgaatgtgcagcacaacggattttgtgaacgttgccacaacgcccggcaacttcacgccagccacgccccagaccacacaaggcacttggatcccgggaagtgccaagcctgcctccaggatgttaccaggacatttaatgggatctgcagtacttgcttcaaaaggactacagcagaggcctcctccagcctcagcaccagcctccctccttcctgtcaccagcgttccaagtcagatccctcgcggctcgtccggagcccctccccgcattcttgccacagagctggaaacgacgcccctgctggctgcctgtctcaagctgcacggactcctggggacaggacggggacgagcaagtgcagaaaagccggctgcgtgtattttgggactccagaaaacaagggcttttgcacactgtgtttcatcgagtacagagaaaacaaacattttgctgctgcctcagggaaagtcagtcccacagcgtccaggttccagaacaccattccgtgcctggggagggaatgcggcacccttggaagcaccatgtttgaaggatactgccagaagtgtttcattgaagctcagaatcagagatttcatgaggccaaaaggacagaagagcaactgagatcgagccagcgcagagatgtgcctcgaaccacacaaagcacctcaaggcccaagtgcgcccgggcctcctgcaagaacatcctggcctgccgcagcgaggagctctgcatggagtgtcagcatcccaaccagaggatgggccctggggcccaccggggtgagcctgcccccgaagacccccccaagcagcgttgccgggcccccgcctgtgatcattttggcaatgccaagtgcaacggctactgcaacgaatgctttcagttcaagcagatgtatggctaaccggaaacaggtgggtcacctcctgcaagaagtggggcctcgagctgtcagtcatcatggtgctatcctctgaacccctcagctgccactgcaacagtgggcttaagggtgtctgagcaggagaggaaagataagctcttcgtggtgcccacgatgctcaggtttggtaacccgggagtgttcccaggtggccttagaaagcaaagcttgtaactggcaagggatgatgtcagattcagcccaaggttcctcctctcctaccaagcaggaggccaggaacttctttggacttggaaggtgtgcggggactggccgaggcccctgcaccctgcgcatcaggactgcttcatcgtcttggctgagaaagggaaaagacacacaagtcgcgtgggttggagaagccagagccattccacctcccctcccccagcatctctcagagatgtgaagccagatcctcatggcagcgaggccctctgcaagaagctcaaggaagctcagggaaaatggacgtattcagagagtgtttgtagttcatggtttttccctacctgcccggttcctttcctgaggacccggcagaaatgcagaaccatccatggactgtgattctgaggctgctgagactgaacatgttcacattgacagaaaaacaagctgctctttataatatgcaccttttaaaaaattagaatattttactgggaagacgtgtaactctttgggttattactgtctttacttctaaagaagttagcttgaactgaggagtaaaagtgtgtacatatataatatacccttacattatgtatgagggatttttttaaattatattgaaatgctgccctagaagtacaataggaaggctaaataataataacctgttttctggttgttgttggggcatgagcttgtgtatacactgcttgcataaactcaaccagctgcctttttaaagggagctctagtcctttttgtgtaattcactttatttattttattacaaacttcaagattatttaagtgaagatatttcttcagctctggggaaaatgccacagtgttctcctgagagaacatccttgctttgagtcaggctgtgggcaagttcctgaccacagggagtaaattggcctctttgatacacttttgcttgcctccccaggaaagaaggaattgcatccaaggtatacatacatattcatcgatgtttcgtgcttctccttatgaaactccagctatgtaataaaaaactatactctgtgttctgtta

SEQ ID NO: 366971 - DNA, 1079 bp, Homo sapiens
gcagggaaagggggcggggcggggcccgcaggcccggtcgggcggaggccgcgcgcgcccctcgccccctgcgccctctggcggccggctggacgcacttcgcagcccgacccagagagtcacgtgactttggaaagtcccgtggaaatccccgggcctacaacccgcatacaactgaaacggggcaaagcagactgcgcagtctgcagtcttcgtggcgggccaagcgagcttggagcccgcgggggcggagcggtgagagcggccgccaagagagatcacacccccagccgaccctgccagcgagcgagcccgaccccaggcgtccatggagcgtcgcctccgcccggtccctgccccgacccccgcctgcggcgcgctcctgccttgaccaggacttgggactttgcgaaaggatcgcggggcccggagaggtaaccgccgcgcctcccggagaggtaaccgccgcgcctcccggagaggtaaccgccgcgcctccccgtgccgtctgcctcgggctcaccgcagtcaagggctgcgggtgcatgttgggcagcgacccccgggctggcaccgtctacctggcgttggttttgcagcgctcctggactgggagtttgttggacgtttctgtctgggttttgaagtgctgggagttgaggtcactgctgcagaggttggagtgacagccctggatacctccagccagctgttcctttcagataatgcacggaacttaagctgcagctgactggtgaagaggcgcccctcgggccctccgatcgggtggtcgttggcgctttgctcctttcgtgtcttttttggagccaagcgttgcatgctcatggccacgtagaccttgcagaagcgctgcggctttttcccaaattgtgcaggaccagcccgacggggcgtagggtaccgcagtggccgccagcccggcggaggtggggggcttcagtcccagagacagcttcccagacgctcacgggtccttgcagggggctggggtcctggcgcggggttcagcttttccagtagcagcagtgtaagagaagtatgcatgtagacgtgggtcg

SEQ ID NO: 366972 - DNA, 5057 bp, Homo sapiens
gcagggaaagggggcggggcggggcccgcaggcccggtcgggcggaggccgcgcgcgcccctcgccccctgcgccctctggcggccggctggacgcacttcgcagcccgacccagagagtcacgtgactttggaaagtcccgtggaaatccccgggcctacaacccgcatacaactgaaacggggcaaagcagactgcgcagtctgcagtcttcgtggcgggccaagcgagcttggagcccgcgggggcggagcggtgagagcggccgccaagagagatcacacccccagccgaccctgccagcgagcgagcccgaccccaggcgtccatggagcgtcgcctccgcccggtccctgccccgacccccgcctgcggcgcgctcctgccttgaccaggacttgggactttgcgaaaggatcgcggggcccggagaggtaaccgccgcgcctcccggagaggtaaccgccgcgcctcccggagaggtaaccgccgcgcctccccgtgccgtctgcctcgggctcaccgcagtcaagggctgcgggtgcatgttgggcagcgacccccgggctggcaccgtctacctggcgttggttttgcagcgctcctggactgggagtttgttggacgtttctgtctgggttttgaagtgctgggagttgaggtcactgctgcagaggtgttggagagcacaatggctgaacaagtccttcctcaggctttgtatttgagcaatatgcggaaagctgtgaagatacgggagagaactccagaagacatttttaaacctactaatgggatcattcatcattttaaaaccatgcaccgatacacactggaaatgttcagaacttgccagttttgtcctcagtttcgggagatcatccacaaagccctcatcgacagaaacatccaggccaccctggaaagccagaagaaactcaactggtgtcgagaagtccggaagcttgtggcgctgaaaacgaacggtgacggcaattgcctcatgcatgccacttctcagtacatgtggggcgttcaggacacagacttggtactgaggaaggcgctgttcagcacgctcaaggaaacagacacacgcaactttaaattccgctggcaactggagtctctcaaatctcaggaatttgttgaaacggggctttgctatgatactcggaactggaatgatgaatgggacaatcttatcaaaatggcttccacagacacacccatggcccgaagtggacttcagtacaactcactggaagaaatacacatatttgtcctttgcaacatcctcagaaggccaatcattgtcatttcagacaaaatgctaagaagtttggaatcaggttccaatttcgcccctttgaaagtgggtggaatttacttgcctctccactggcctgcccaggaatgctacagataccccattgttctcggctatgacagccatcattttgtacccttggtgaccctgaaggacagtgggcctgaaatccgagctgttccacttgttaacagagaccggggaagatttgaagacttaaaagttcactttttgacagatcctgaaaatgagatgaaggagaagctcttaaaagagtacttaatggtgatagaaatccccgtccaaggctgggaccatggcacaactcatctcatcaatgccgcaaagttggatgaagctaacttaccaaaagaaatcaatctggtagatgattactttgaacttgttcagcatgagtacaagaaatggcaggaaaacagcgagcaggggaggagagaggggcacgcccagaatcccatggaaccttccgtgccccagctttctctcatggatgtaaaatgtgaaacgcccaactgccccttcttcatgtctgtgaacacccagcctttatgccatgagtgctcagagaggcggcaaaagaatcaaaacaaactcccaaagctgaactccaagccgggccctgaggggctccctggcatggcgctcggggcctctcggggagaagcctatgagcccttggcgtggaaccctgaggagtccactggggggcctcattcggccccaccgacagcacccagcccttttctgttcagtgagaccactgccatgaagtgcaggagccccggctgccccttcacactgaatgtgcagcacaacggattttgtgaacgttgccacaacgcccggcaacttcacgccagccacgccccagaccacacaaggcacttggatcccgggaagtgccaagcctgcctccaggatgttaccaggacatttaatgggatctgcagtacttgcttcaaaaggactacagcagaggcctcctccagcctcagcaccagcctccctccttcctgtcaccagcgttccaagtcagatccctcgcggctcgtccggagcccctccccgcattcttgccacagagctggaaacgacgcccctgctggctgcctgtctcaagctgcacggactcctggggacaggacggggacgagcaagtgcagaaaagccggctgcgtgtattttgggactccagaaaacaagggcttttgcacactgtgtttcatcgagtacagagaaaacaaacattttgctgctgcctcagggaaagtcagtcccacagcgtccaggttccagaacaccattccgtgcctggggagggaatgcggcacccttggaagcaccatgtttgaaggatactgccagaagtgtttcattgaagctcagaatcagagatttcatgaggccaaaaggacagaagagcaactgagatcgagccagcgcagagatgtgcctcgaaccacacaaagcacctcaaggcccaagtgcgcccgggcctcctgcaagaacatcctggcctgccgcagcgaggagctctgcatggagtgtcagcatcccaaccagaggatgggccctggggcccaccggggtgagcctgcccccgaagacccccccaagcagcgttgccgggcccccgcctgtgatcattttggcaatgccaagtgcaacggctactgcaacgaatgctttcagttcaagcagatgtatggctaaccggaaacaggtgggtcacctcctgcaagaagtggggcctcgagctgtcagtcatcatggtgctatcctctgaacccctcagctgccactgcaacagtgggcttaagggtgtctgagcaggagaggaaagataagctcttcgtggtgcccacgatgctcaggtttggtaacccgggagtgttcccaggtggccttagaaagcaaagcttgtaactggcaagggatgatgtcagattcagcccaaggttcctcctctcctaccaagcaggaggccaggaacttctttggacttggaaggtgtgcggggactggccgaggcccctgcaccctgcgcatcaggactgcttcatcgtcttggctgagaaagggaaaagacacacaagtcgcgtgggttggagaagccagagccattccacctcccctcccccagcatctctcagagatgtgaagccagatcctcatggcagcgaggccctctgcaagaagctcaaggaagctcagggaaaatggacgtattcagagagtgtttgtagttcatggtttttccctacctgcccggttcctttcctgaggacccggcagaaatgcagaaccatccatggactgtgattctgaggctgctgagactgaacatgttcacattgacagaaaaacaagctgctctttataatatgcaccttttaaaaaattagaatattttactgggaagacgtgtaactctttgggttattactgtctttacttctaaagaagttagcttgaactgaggagtaaaagtgtgtacatatataatatacccttacattatgtatgagggatttttttaaattatattgaaatgctgccctagaagtacaataggaaggctaaataataataacctgttttctggttgttgttggggcatgagcttgtgtatacactgcttgcataaactcaaccagctgcctttttaaagggagctctagtcctttttgtgtaattcactttatttattttattacaaacttcaagattatttaagtgaagatatttcttcagctctggggaaaatgccacagtgttctcctgagagaacatccttgctttgagtcaggctgtgggcaagttcctgaccacagggagtaaattggcctctttgatacacttttgcttgcctccccaggaaagaaggaattgcatccaaggtatacatacatattcatcgatgtttcgtgcttctccttatgaaactccagctatgtaataaaaaactatactctgtgttctgttaatgcctctgagtgtcctacctccttggagatgagatagggaaggagcagggatgagactggcaatggtcacagggaaagatgtggccttttgtgatggttttattttctgttaacactgtgtcctgggggggctgggaagtcccctgcatcccatggtaccctggtattgggacagcaaaagccagtaaccatgagtatgaggaaatctctttctgttgctggcttacagtttctctgtgtgctttgtggttgctgtcatatttgctctagaagaaaaaaaaaaaaggaggggaaatgcattttccccagagataaaggctgccattttgggggtctgtacttatggcctgaaaatatttgtgatccataactctacacagcctttactcatactattaggcacactttccccttagagccccctaagtttttcccagacgaatctttataatttctttccaaagataccaaataaacttcagtgttttcatctaattctcttaaagttgatatcttaatattttgtgttgatcattatttccattcttaatgtgaaaaaaagtaattatttatacttattataaaaagtatttgaaatttgcacatttaattgtccctaatagaaagccacctattctttgttggatttcttcaagtttttctaaataaatgtaacttttcacaagagtcaacattaaaaaataaattatttaagaaca

SEQ ID NO: 366973 - DNA, 5003 bp, Homo sapiens
gcagggaaagggggcggggcggggcccgcaggcccggtcgggcggaggccgcgcgcgcccctcgccccctgcgccctctggcggccggctggacgcacttcgcagcccgacccagagagtcacgtgactttggaaagtcccgtggaaatccccgggcctacaacccgcatacaactgaaacggggcaaagcagactgcgcagtctgcagtcttcgtggcgggccaagcgagcttggagcccgcgggggcggagcggtgagagcggccgccaagagagatcacacccccagccgaccctgccagcgagcgagcccgaccccaggcgtccatggagcgtcgcctccgcccggtccctgccccgacccccgcctgcggcgcgctcctgccttgaccaggacttgggactttgcgaaaggatcgcggggcccggagaggtaaccgccgcgcctcccggagaggtaaccgccgcgcctcccggagaggtaaccgccgcgcctccccgtgccgtctgcctcgggctcaccgcagtcaagggctgcgggtgcatgttgggcagcgacccccgggctggcaccgtctacctggcgttggttttgcagcgctcctggactgggagtttgttggacgtttctgtctgggttttgaagtgctgggagttgaggtcactgctgcagaggtgttggagagcacaatggctgaacaagtccttcctcaggctttgtatttgagcaatatgcggaaagctgtgaagatacgggagagaactccagaagacatttttaaacctactaatgggatcattcatcattttaaaaccatgcaccgatacacactggaaatgttcagaacttgccagttttgtcctcagtttcgggagatcatccacaaagccctcatcgacagaaacatccaggccaccctggaaagccagaagaaactcaactggtgtcgagaagtccggaagcttgtggcgctgaaaacgaacggtgacggcaattgcctcatgcatgccacttctcagtacatgtggggcgttcaggacacagacttggtactgaggaaggcgctgttcagcacgctcaaggaaacagacacacgcaactttaaattccgctggcaactggagtctctcaaatctcaggaatttgttgaaacggggctttgctatgatactcggaactggaatgatgaatgggacaatcttatcaaaatggcttccacagacacacccatggcccgaagtggacttcagtacaactcactggaagaaatacacatatttgtcctttgcaacatcctcagaaggccaatcattgtcatttcagacaaaatgctaagaagtttggaatcaggttccaatttcgcccctttgaaagtgggtggaatttacttgcctctccactggcctgcccaggaatgctacagataccccattgttctcggctatgacagccatcattttgtacccttggtgaccctgaaggacagtgggcctgaaatccgagctgttccacttgttaacagagaccggggaagatttgaagacttaaaagttcactttttgacagatcctgaaaatgagatgaaggagaagctcttaaaagagtacttaatggtgatagaaatccccgtccaaggctgggaccatggcacaactcatctcatcaatgccgcaaagttggatgaagctaacttaccaaaagaaatcaatctggtagatgattactttgaacttgttcagcatgagtacaagaaatggcaggaaaacagcgagcaggggaggagagaggggcacgcccagaatcccatggaaccttccgtgccccagctttctctcatggatgtaaaatgtgaaacgcccaactgccccttcttcatgtctgtgaacacccagcctttatgccatgagtgctcagagaggcggcaaaagaatcaaaacaaactcccaaagctgaactccaagccgggccctgaggggctccctggcatggcgctcggggcctctcggggagaagcctatgagcccttggcgtggaaccctgaggagtccactggggggcctcattcggccccaccgacagcacccagcccttttctgttcagtgagaccactgccatgaagtgcaggagccccggctgccccttcacactgaatgtgcagcacaacggattttgtgaacgttgccacaacgcccggcaacttcacgccagccacgccccagaccacacaaggcacttggatcccgggaagtgccaagcctgcctccaggatgttaccaggacatttaatgggatctgcagtacttgcttcaaaaggactacagcagaggcctcctccagcctcagcaccagcctccctccttcctgtcaccagcgttccaagtcagatccctcgcggctcgtccggagcccctccccgcattcttgccacagagctggaaacgacgcccctgctggctgcctgtctcaagctgcacggactcctggggacaggacggggacgagcaagtgcagaaaagccggctgcgtgtattttgggactccagaaaacaagggcttttgcacactgtgtttcatcgagtacagagaaaacaaacattttgctgctgcctcagggaaagtcagtcccacagcgtccaggttccagaacaccattccgtgcctggggagggaatgcggcacccttggaagcaccatgtttgaaggatactgccagaagtgtttcattgaagctcagaatcagagatttcatgaggccaaaaggacagaagagcaactgagatcgagccagcgcagagatgtgcctcgaaccacacaaagcacctcaaggcccaagtgcgcccgggcctcctgcaagaacatcctggcctgccgcagcgaggagctctgcatggagtgtcagcatcccaaccagaggatgggccctggggcccaccggggtgagcctgcccccgaagacccccccaagcagcgttgccgggcccccgcctgtgatcattttggcaatgccaagtgcaacggctactgcaacgaatgctttcagttcaagcagatgtatggctaaccggaaacaggtgggtcacctcctgcaagaagtggggcctcgagctgtcagtcatcatggtgctatcctctgaacccctcagctgccactgcaacagtgggcttaagggtgtctgagcaggagaggaaagataagctcttcgtggtgcccacgatgctcaggtttggtaacccgggagtgttcccaggtggccttagaaagcaaagcttgtaactggcaagggatgatgtcagattcagcccaaggttcctcctctcctaccaagcaggaggccaggaacttctttggacttggaaggtgtgcggggactggccgaggcccctgcaccctgcgcatcaggactgcttcatcgtcttggctgagaaagggaaaagacacacaagtcgcgtgggttggagaagccagagccattccacctcccctcccccagcatctctcagagatgtgaagccagatcctcatggcagcgaggccctctgcaagaagctcaaggaagctcagggaaaatggacgtattcagagagtgtttgtagttcatggtttttccctacctgcccggttcctttcctgaggacccggcagaaatgcagaaccatccatggactgtgattctgaggctgctgagactgaacatgttcacattgacagaaaaacaagctgctctttataatatgcaccttttaaaaaattagaatattttactgggaagacgtgtaactctttgggttattactgtctttacttctaaagaagttagcttgaactgaggagtaattatattgaaatgctgccctagaagtacaataggaaggctaaataataataacctgttttctggttgttgttggggcatgagcttgtgtatacactgcttgcataaactcaaccagctgcctttttaaagggagctctagtcctttttgtgtaattcactttatttattttattacaaacttcaagattatttaagtgaagatatttcttcagctctggggaaaatgccacagtgttctcctgagagaacatccttgctttgagtcaggctgtgggcaagttcctgaccacagggagtaaattggcctctttgatacacttttgcttgcctccccaggaaagaaggaattgcatccaaggtatacatacatattcatcgatgtttcgtgcttctccttatgaaactccagctatgtaataaaaaactatactctgtgttctgttaatgcctctgagtgtcctacctccttggagatgagatagggaaggagcagggatgagactggcaatggtcacagggaaagatgtggccttttgtgatggttttattttctgttaacactgtgtcctgggggggctgggaagtcccctgcatcccatggtaccctggtattgggacagcaaaagccagtaaccatgagtatgaggaaatctctttctgttgctggcttacagtttctctgtgtgctttgtggttgctgtcatatttgctctagaagaaaaaaaaaaaaggaggggaaatgcattttccccagagataaaggctgccattttgggggtctgtacttatggcctgaaaatatttgtgatccataactctacacagcctttactcatactattaggcacactttccccttagagccccctaagtttttcccagacgaatctttataatttctttccaaagataccaaataaacttcagtgttttcatctaattctcttaaagttgatatcttaatattttgtgttgatcattatttccattcttaatgtgaaaaaaagtaattatttatacttattataaaaagtatttgaaatttgcacatttaattgtccctaatagaaagccacctattctttgttggatttcttcaagtttttctaaataaatgtaacttttcacaagagtcaacattaaaaaataaattatttaagaaca

SEQ ID NO: 366974 - DNA, 4530 bp, Homo sapiens
  misc_feature (4455)..(4455): n is a, c, g, or t
  misc_feature (4516)..(4516): n is a, c, g, or t
gcagggaaagggggcggggcggggcccgcaggcccggtcgggcggaggccgcgcgcgcccctcgccccctgcgccctctggcggccggctggacgcacttcgcagcccgacccagagagtcacgtgactttggaaagtcccgtggaaatccccgggcctacaacccgcatacaactgaaacggggcaaagcagactgcgcagtctgcagtcttcgtggcgggccaagcgagcttggagcccgcgggggcggagcggtgagagcggccgccaagagagatcacacccccagccgaccctgccagcgagcgagcccgaccccaggcgtccatggagcgtcgcctccgcccggtccctgccccgacccccgcctgcggcgcgctcctgccttgaccaggacttgggactttgcgaaaggatcgcggggcccggagaggtaaccgccgcgcctcccggagaggtaaccgccgcgcctcccggagaggtaaccgccgcgcctccccgtgccgtctgcctcgggctcaccgcagtcaagggctgcgggtgcatgttgggcagcgacccccgggctggcaccgtctacctggcgttggttttgcagcgctcctggactgggagtttgttggacgtttctgtctgggttttgaagtgctgggagttgaggtcactgctgcagaggtgttggagagcacaatggctgaacaagtccttcctcaggctttgtatttgagcaatatgcggaaagctgtgaagatacgggagagaactccagaagacatttttaaacctactaatgggatcattcatcattttaaaaccatgcaccgatacacactggaaatgttcagaacttgccagttttgtcctcagtttcgggagatcatccacaaagccctcatcgacagaaacatccaggccaccctggaaagccagaagaaactcaactggtgtcgagaagtccggaagcttgtggcgctgaaaacgaacggtgacggcaattgcctcatgcatgccacttctcagtacatgtggggcgttcaggacacagacttggtactgaggaaggcgctgttcagcacgctcaaggaaacagacacacgcaactttaaattccgctggcaactggagtctctcaaatctcaggaatttgttgaaacggggctttgctatgatactcggaactggaatgatgaatgggacaatcttatcaaaatggcttccacagacacacccatggcccgaagtggacttcagtacaactcactggaagaaatacacatatttgtcctttgcaacatcctcagaaggccaatcattgtcatttcagacaaaatgctaagaagtttggaatcaggttccaatttcgcccctttgaaagtgggtggaatttacttgcctctccactggcctgcccaggaatgctacagataccccattgttctcggctatgacagccatcattttgtacccttggtgaccctgaaggacagtgggcctgaaatccgagctgttccacttgttaacagagaccggggaagatttgaagacttaaaagttcactttttgacagatcctgaaaatgagatgaaggagaagctcttaaaagagtacttaatggtgatagaaatccccgtccaaggctgggaccatggcacaactcatctcatcaatgccgcaaagttggatgaagctaacttaccaaaagaaatcaatctggtagatgattactttgaacttgttcagcatgagtacaagaaatggcaggaaaacagcgagcaggggaggagagaggggcacgcccagaatcccatggaaccttccgtgccccagctttctctcatggatgtaaaatgtgaaacgcccaactgccccttcttcatgtctgtgaacacccagcctttatgccatgagtgctcagagaggcggcaaaagaatcaaaacaaactcccaaagctgaactccaagccgggccctgaggggctccctggcatggcgctcggggcctctcggggagaagcctatgagcccttggcgtggaaccctgaggagtccactggggggcctcattcggccccaccgacagcacccagcccttttctgttcagtgagaccactgccatgaagtgcaggagccccggctgccccttcacactgaatgtgcagcacaacggattttgtgaacgttgccacaacgcccggcaacttcacgccagccacgccccagaccacacaaggcacttggatcccgggaagtgccaagcctgcctccaggatgttaccaggacatttaatgggatctgcagtacttgcttcaaaaggactacagcagaggcctcctccagcctcagcaccagcctccctccttcctgtcaccagcgttccaagtcagatccctcgcggctcgtccggagcccctccccgcattcttgccacagagctggaaacgacgcccctgctggctgcctgtctcaagctgcacggactcctggggacaggacggggacgagcaagtgcagaaaagccggctgcgtgtattttgggactccagaaaacaagggcttttgcacactgtgtttcatcgagtacagagaaaacaaacattttgctgctgcctcagggaaagtcagtcccacagcgtccaggttccagaacaccattccgtgcctggggagggaatgcggcacccttggaagcaccatgtttgaaggatactgccagaagtgtttcattgaagctcagaatcagagatttcatgaggccaaaaggacagaagagcaactgagatcgagccagcgcagagatgtgcctcgaaccacacaaagcacctcaaggcccaagtgcgcccgggcctcctgcaagaacatcctggcctgccgcagcgaggagctctgcatggagtgtcagcatcccaaccagaggatgggccctggggcccaccggggtgagcctgcccccgaagacccccccaagcagcgttgccgggcccccgcctgtgatcattttggcaatgccaagtgcaacggctactgcaacgaatgctttcagttcaagcagatgtatggctaaccggaaacaggtgggtcacctcctgcaagaagtggggcctcgagctgtcagtcatcatggtgctatcctctgaacccctcagctgccactgcaacagtgggcttaagggtgtctgagcaggagaggaaagataagctcttcgtggtgcccacgatgctcaggtttggtaacccgggagtgttcccaggtggccttagaaagcaaagcttgtaactggcaagggatgatgtcagattcagcccaaggttcctcctctcctaccaagcaggaggccaggaacttctttggacttggaaggtgtgcggggactggccgaggcccctgcaccctgcgcatcaggactgcttcatcgtcttggctgagaaagggaaaagacacacaagtcgcgtgggttggagaagccagagccattccacctcccctcccccagcatctctcagagatgtgaagccagatcctcatggcagcgaggccctctgcaagaagctcaaggaagctcagggaaaatggacgtattcagagagtgtttgtagttcatggtttttccctacctgcccggttcctttcctgaggacccggcagaaatgcagaaccatccatggactgtgattctgaggctgctgagactgaacatgttcacattgacagaaaaacaagctgctctttataatatgcaccttttaaaaaattagaatattttactgggaagacgtgtaactctttgggttattactgtctttacttctaaagaagttagcttgaactgaggagtaaaagtgtgtacatatataatatacccttacattatgtatgagggatttttttaaattatattgaaatgctgccctagaagtacaataggaaggctaaataataataacctgttttctggttgttgttggggcatgagcttgtgtatacactgcttgcataaactcaaccagctgcctttttaaagggagctctagtcctttttgtgtaattcactttatttattttattacaaacttcaagattatttaagtgaagatatttcttcagctctggggaaaatgccacagtgttctcctgagagaacatccttgctttgagtcaggctgtgggcaagttcctgaccacagggagtaaattggcctctttgatacacttttgcttgcctccccaggaaagaaggaattgcatccaaggtatacatacatattcatcgatgtttcgtgcttctccttatgaaactccagctatgtaataaaaaactatactctgtgttctgttaatgcctctgagtgtcctacctccttggagatgagatagggaaggagcagggatgagactggcaatggtcacagggaaagatgtggccttttgtgatggttttattttacatagctggnagtttcataaggaggaagcacgaaacatcgatggaatatgtatgtataccttggatgcaantccttctttcctgg

SEQ ID NO: 366975 - DNA, 1239 bp, Homo sapiens
ccatgttggccaagctggtctcaaactcctgacctgaggtgatccacccgcctcggcctcccaaagtgctgggaatacaggcatgagtcaccgtatccagccacttcttgacattctttctagcagtttttataccactgcttcccttctggaagccttactgatgtttaagttacatgttgatactcactttgtttttgtgcttccctttctctttcctggacagaaaccaaagcccaaaccccggccatccatcacaaaggcaacctgggagagtaactattttggggtgcccttaacaactgtcgtgactccagagaagccgatccccatttttattgaaagatgtattgagtacattgaagccacaggtaagagtattacctcatagcagtttataactttcactgtctacaggatgcttactggagggtcaagccatctggagattctggaatcagttgttgttgattgtgagatgctcttggagaaggagctgagcagtcccaacagttgtcagatgtgtagattctccatttgtgtgcagttttgaggctgtcgttgggcatttattaggccttggcctacgaaggagctgttctgtgctcaaggtggcagctatggctgcttgggcgctttctctgtgctacctcacccaccagagcatcagcactctgtcagttgcctgcccgcctgtgttccctgcagatctgtgaactccttgagggttgtgctatcattgtgtcctcagtactatagtggatacataatacattttggtttagtaaaattaatacagccctcagcattgttcggatgcctgagacccatgtattgataggatttttttctgaggtaagaaaatgattaggatgtttgggatatcttctggttatgccgctcctctgacaacttgatgctatcacaaaggtagactgtcttgggaaatttttttgcattgttcttgaaataattaagttttacttgtgttgaaaccatttgctttattcatttgagctctcatgtgtccctttggccttccagtttcactaaggtgggttcttgagcattcggagttgggctcaggaacacaggcttaaactaatttgaaactaaggtagggattacagccttccaatctgttctttctaactctgatattatctacagtggtattaagtattgtgtggtgtggacagcctactaggctctgctgataatttcagcagcatcgtgtga

SEQ ID NO: 366976 - DNA, 7329 bp, Homo sapiens
ctggactaggagcaggggaacatggcgccggggcccccgtcgttgctgccgggattttggaggccggggccgcgctgagggcgccagctggaagaaatgttggctatttggcgatgagaggtggtgaacagtgaccatactggtatacaacactatgggacctggcatttttgctgcatgtccagcccacccccactaataatgtaggaagctgtctggtccattggaaacactaatctgatctcagaagtggctgatcgtggcaggatgtgtcgacgatgatgatggcaagaaagcaagatgtccgaattcccacctacaacatcagtgtggtgggattatctgggaccgagaaggaaaagggccagtgtgggattggaaagtcttgtttgtgcaaccgcttcgtgcgcccgagtgctgacgagtttcacttggaccatacctccgtcctcagcaccagtgactttggagggcgagtggtcaataatgaccactttctctactggggagaagttagccgctccctggaggattgtgtggaatgtaagatgcacattgtggagcagactgaatttattgatgatcagacttttcaacctcatcgaagcacggccctgcagccctatatcaagagagctgctgcgaccaagcttgcatcagctgaaaaactcatgtacttttgcactgaccagctggggctggagcaggactttgagcagaaacaaatgccagacggaaagctgctggttgatggttttcttcttggtattgatgttagcaggggcatgaataggaactttgatgaccagctcaagtttgtctccaatctctacaatcagcttgcaaaaacaaaaaagcccatagtggtggtcctgactaagtgtgacgaaggtgttgagcggtacattagagatgcacatacttttgccttaagcaaaaagaacctccaggttgtggagacctcagcgagatccaatgtaaacgtggacttggctttcagcaccttagtgcaactcattgataaaagtcggggaaagacaaaaatcattccttattttgaagctctcaagcagcagagtcagcagatagctacagcaaaagacaagtatgagtggctggtgagtcgcattgtgaaaaaccacaatgagaactggctgagtgtcagccgaaagatgcaggcctctccagaataccaggactatgtctacctggaagggactcagaaagccaagaagctgtttctacagcacatccaccgcctcaagcatgagcatatcgagcgtaggagaaagctgtacctggcagccctgccattagcttttgaagctcttatacctaatctagatgaaatagaccacctaagctgcataaaagccaaaaagctcttagaaaccaagccagaattcttgaagtggtttgttgtgcttgaagagaccccatgggatgccaccagtcacattgacaacatggaaaacgaacggattccctttgatttaatggataccgtccctgcagagcagctatacgaggcccacttagagaagctgaggaacgaaaggaaaagagttgagatgcgaagggcgtttaaagaaaacctggagacttctcctttcataactcccggaaagccttgggaagaggcccgtagttttattatgaatgaggatttctaccagtggctggaggaatctgtatacatggatatttatggcaaacaccaaaagcaaattatagataaagcaaaggaagaatttcaggagttgcttttggaatattcagaattgttttatgaactggagctggatgctaagcccagcaaggagaagatgggtgttattcaggatgttctgggagaggaacagcgatttaaagccatttacaaaagctccaagcagagcgttgatgcccttattctgaaacacattcattttgtgtaccacccaacaaaggagacatgccccagctgcccagcttgtgtggacgctaagattgagcacttgattagttctcggtttatccggccgtctgaccggaatcagaaaaattcactctctgaccctaacattgatagaatcaacttggttatattgggcaaagacggccttgcccgagagttggccaatggagattcgagctctttgtacaaatgatgacaagtatgtgatagatggtaaaatgtatgagctttccctgaggccaatagaggggaatgtcaggcttcctgtgaactctttccagacgccaacatttcagccccacggctgtctctgcctttacaattcaaaggaatcgctatcctatgtagtggaaagtatagagaagagtagagagtccacgctgggccggcgggataatcatttagtccatctcccccttacattaattttggttaacaagagaggagacaccagtggagagactctgcatagcttaatacagcaaggtcaacaaattgctagcaaacttcagtgtgtctttctcgaccctgcttctgctggcattggttacggacgcaacattaatgaaaagcaaatcagtcaagttttgaagggactcctggactctaagcgtaacttaaacctggtcagttctactgctagcatcaaagatttggctgatgttgatctgcgaattgttatgtgtctgatgtgtggagatccttttagtgcagatgacatactttttcctgtccttcagtcccaaacctgtaaatcttcccattgtggaagcaacaactctgttttacttgaactaccaatcggactgcacaagaagcggattgaactgtctgttctttcataccattcctcctttagcatcagaaagagccggttggttcatgggtacattgttttttattcagccaaacgtaaggcctctttggctatgttacgtgcctttctttgtgaagtgcaggatattatccctattcagcttgtagcactcactgatggcgctgtagatgtcctggacaatgacttaagtagggaacagctaactgagggggaggagattgctcaagaaattgacggaaggttcacaagcatcccctgtagccaaccccagcataaacttgagatctttcacccattttttaaagatgtggtggaaaaaaagaacataatcgaggctactcatatgtacgataatgctgccgaggcctgtagcaccaccgaagaggtgtttaactccccccgggcaggatcaccgctctgcaactcaaacctgcaggattcagaagaagatatcgagccatcttacagcctgtttcgagaagacacatcactgccttctctgtccaaagaccattctaagctctctatggaactggagggaaatgatgggctgtctttcattatgagcaattttgagagtaaactgaacaacaaagtacctccgccagtcaaaccaaagcctcctgtccattttgaaattacaaagggggatctatcttatttagaccaaggccatagggatggacagaggaagtctgtgtcttctagcccctggctgcctcaggatgggtttgatccttctgactatgctgaacccatggatgctgtggtgaagccaaggaatgaagaagaaaacatatactccgtgccccatgacagcacccaaggcaaaatcatcaccattcggaatatcaacaaagcccagtccaacggcagcgggaatggttctgacagtgaaatggacaccagctctctagagcgagggcgcaaggtttccatcgtgagcaagccagtgctgtacaggacgagatgcacccggctggggcggtttgctagttaccggaccagcttcagcgtggggagtgatgatgagctggggcccatccggaagaaagaggaggatcaggcatcccagggttataaaggggacaatgctgtcattccatacgaaacagacgaagacccgcggaggaggaatattcttcgcagcctaaggaggaacactaagaaaccaaagcccaaaccccggccatccatcacaaaggcaacctgggagagtaactattttggggtgcccttaacaactgtcgtgactccagagaagccgatccccatttttattgaaagatgtattgagtacattgaagccacaggactgagcacggaaggcatctaccgggtcagcgggaacaagtctgagatggagagtctgcagagacagtttgatcaagaccacaacctggacctggcagagaaagactttacggtgaataccgtggctggtgccatgaagagctttttctcagaactgcctgaccccctggtcccgtataacatgcagatcgacttggtggaagcacacaaaatcaacgaccgggagcagaagttgcatgcccttaaggaggtattaaagaaatttccaaaggaaaaccacgaagtcttcaagtatgtcatctctcacctaaacaaggtcagccacaacaacaaggtgaatctcatgaccagcgagaacctctccatctgcttctggcccaccttgatgagacctgatttcagcactatggacgccctcacagccacgcgcacctaccagacaatcattgaactctttatccagcagtgccccttcttcttctacaatcggcccatcaccgagccccccggcgccaggcccagctccccctctgccgtggcttccaccgtccccttcctcacttccacgcctgtcacaagtcagccgtcgcccccacagtcgcctccacccaccccccagtccccaatgcagccactgctccccgcttcatccccaccgtcccactccacagccttcccgaaacattccctggcaaacaaaggaacactaggagaaaaaatggaaaaacccttccagtaattaaaaaggaagaaaccacagaaagaaaactacagacctcaagattccactctgtgcccgcctctgccgggagggagggaggcacacaggtggagctgaccctcgtctttgtggcagcaaaaccaggatgcctggagctgtggcctgagggcctgctggggtcccactcacccacttaggtctagtcgctagatcccccgttttcccaagaagagggttcgagcccttggtggggacagctggggagatggcagtgcaggctggaacctgggctgccccagaacacagtccattacgatagaaacaactaggcaccccccaggcgagagctagtggggtgcagagggccccatgccagacagcccttggggctcgttgcactttaagaaataggatctgtggtgtattccagggggcctgatggacacctttcccgggcgtctgcagctgccctgcccgtgcccgcctgcagtggttggagacgggagtggcccttcggctcccgagctccctctggggacggctggctcactgtctccagttctcaatggccaacgaaggtgcttggaaacacctaaccttgcaagttttaccgccttttgaggaacacaaatcggagaacaaacccagggttcaggcgtgttttctgtgaatgttggatgatgaatttttgtctcttctggtggagctgtgcctggccctgtaggcccagggttggctggaaggtgacatctgtgtttcgttttagctgaggttggcagaaacgttcccaaactcccccagccctggaccccagcagatgaggaaacggccccatttactgaccccgcccccttttcgaggttatgctcacctggtcagctcctcacgtaattgggggtggagggaaagcatggtggtgccctgggccgtccctgtgtgaacgcaggcaaaagcagcccagtccccctcactgcttgagctaacactgccacctcttttgtgtgagcacaaaagccacgtcccaagccacctggcccgattccacagatgtatgtgcggccagtgacttccccaggagtgtggagggggtggtgaggaggagcacctgggctctctacccctctcctcacagaagtacctgaaactaggtctggggcactcccaatgcagcgccttgtcagccaaggtgggcaggcagggactgtggcagcttatgtccaaagggagcccccatgcacaggaagccacagggttcctcttgtttcccccgctaacttcagcctctcatctgctgctccgggctgagggactagaggacatctcggtcgtttgaggggcatggccagtcgtggcaggccggccttcagcgtccggtcagggaagcgtgcagcccaaatgggcacttgcatgggagccacagaggagcgtccctggggattgttgggaccatgctgcccccactcccgcttttgttggggctctaagttctggaaggtgtgtgcacagagggtgctcatgggactcgcatgcagctctcagcactgggtgggagggcgttggcttgtccagaatggggacgtggggcagccacccctgcccagcgagagcgcagacaccgtgtgaggggacagcagcccttggtgcaaagccagagactgatcctggctctgacggctgaagagggaagacccaaggctgggtggcgtggctcgtgaatccacttagaattcttggcttgtgtcgcatactgggtgtcacggcacacatttactctgcattgtccccgtctttcccatcgcctagcgtttggggaggaacagggagagagcttcggggcgtctgtctccgtgctctcctgcctccaccgccttggttttgcttcctgctggaggcagggcacctgctgcgacccagattcttctgcaggatgtgtctgtctttgtcacggtggacagagggtgacatcataggagcagctcgctggccagaaggggatgggggcatccctgtgcctcactcagctcctgctgctcttagggaaaggaggcctgggtcaagccagcatccccttggtaaagacccccgcaggccaccaggcattctggacacacacacacacacacacacacacacacacacaaaacttcacagcaggccagctgcagtgacttgtcatcaagagtcacctcagctgcgcccccctcccatcctttcctatgagaagccactgctttgggggcgccggctagaaaaagtagggtgcggtggccaggagggcccctgccgcgcggggggctgggtctggttgagtcgctgctttcccgagggcagcgcagggatccggggaagctgcggcagggagcgggcgccggcttcgtggctctgaggtgtaacgggggtgggctccctccctcggaggacatcgtctgtgtccaggtcagaaagtggcccaggaagggggcagtttctgtcgcgggtccggtgggggcgcggccgcaa

SEQ ID NO: 366977 - DNA, 5519 bp, Homo sapiens
ctggactaggagcaggggaacatggcgccggggcccccgtcgttgctgccgggattttggaggccggggccgcgctgagggcgccagctggaagaaatgttggctatttggcgatgagaggtggtgaacagtgaccatactggtatacaacactatgggacctggcatttttgctgcatgtccagcccacccccactaataatgtaggaagctgtctggtccattggaaacactaatctgatctcagaagtggctgatcgtggcaggatgtgtcgacgatgatgatggcaagaaagcaagatgtccgaattcccacctacaacatcagtgtggtgggattatctgggaccgagaaggaaaagggccagtgtgggattggaaagtcttgtttgtgcaaccgcttcgtgcgcccgagtgctgacgagtttcacttggaccatacctccgtcctcagcaccagtgactttggagggcgagtggtcaataatgaccactttctctactggggagaagttagccgctccctggaggattgtgtggaatgtaagatgcacattgtggagcagactgaatttattgatgatcagacttttcaacctcatcgaagcacggccctgcagccctatatcaagagagctgctgcgaccaagcttgcatcagctgaaaaactcatgtacttttgcactgaccagctggggctggagcaggactttgagcagaaacaaatgccagacggaaagctgctggttgatggttttcttcttggtattgatgttagcaggggcatgaataggaactttgatgaccagctcaagtttgtctccaatctctacaatcagcttgcaaaaacaaaaaagcccatagtggtggtcctgactaagtgtgacgaaggtgttgagcggtacattagagatgcacatacttttgccttaagcaaaaagaacctccaggttgtggagacctcagcgagatccaatgtaaacgtggacttggctttcagcaccttagtgcaactcattgataaaagtcggggaaagacaaaaatcattccttattttgaagctctcaagcagcagagtcagcagatagctacagcaaaagacaagtatgagtggctggtgagtcgcattgtgaaaaaccacaatgagaactggctgagtgtcagccgaaagatgcaggcctctccagaataccaggactatgtctacctggaagggactcagaaagccaagaagctgtttctacagcacatccaccgcctcaagcatgagcatatcgagcgtaggagaaagctgtacctggcagccctgccattagcttttgaagctcttatacctaatctagatgaaatagaccacctaagctgcataaaagccaaaaagctcttagaaaccaagccagaattcttgaagtggtttgttgtgcttgaagagaccccatgggatgccaccagtcacattgacaacatggaaaacgaacggattccctttgatttaatggataccgtccctgcagagcagctatacgaggcccacttagagaagctgaggaacgaaaggaaaagagttgagatgcgaagggcgtttaaagaaaacctggagacttctcctttcataactcccggaaagccttgggaagaggcccgtagttttattatgaatgaggatttctaccagtggctggaggaatctgtatacatggatatttatggcaaacaccaaaagcaaattatagataaagcaaaggaagaatttcaggagttgcttttggaatattcagaattgttttatgaactggagctggatgctaagcccagcaaggagaagatgggtgttattcaggatgttctgggagaggaacagcgatttaaagccatttacaaaagctccaagcagagcgttgatgcccttattctgaaacacattcattttgtgtaccacccaacaaaggagacatgccccagctgcccagcttgtgtggacgctaagattgagcacttgattagttctcggtttatccggccgtctgaccggaatcagaaaaattcactctctgaccctaacattgatagaatcaacttggttatattgggcaaagacggccttgcccgagagttggccaatggagattcgagctctttgtacaaatgatgacaagtatgtgatagatggtaaaatgtatgagctttccctgaggccaatagaggggaatgtcaggcttcctgtgaactctttccagacgccaacatttcagccccacggctgtctctgcctttacaattcaaaggaatcgctatcctatgtagtggaaagtatagagaagagtagagagtccacgctgggccggcgggataatcatttagtccatctcccccttacattaattttggttaacaagagaggagacaccagtggagagactctgcatagcttaatacagcaaggtcaacaaattgctagcaaacttcagtgtgtctttctcgaccctgcttctgctggcattggttacggacgcaacattaatgaaaagcaaatcagtcaagttttgaagggactcctggactctaagcgtaacttaaacctggtcagttctactgctagcatcaaagatttggctgatgttgatctgcgaattgttatgtgtctgatgtgtggagatccttttagtgcagatgacatactttttcctgtccttcagtcccaaacctgtaaatcttcccattgtggaagcaacaactctgttttacttgaactaccaatcggactgcacaagaagcggattgaactgtctgttctttcataccattcctcctttagcatcagaaagagccggttggttcatgggtacattgttttttattcagccaaacgtaaggcctctttggctatgttacgtgcctttctttgtgaagtgcaggatattatccctattcagcttgtagcactcactgatggcgctgtagatgtcctggacaatgacttaagtagggaacagctaactgagggggaggagattgctcaagaaattgacggaaggttcacaagcatcccctgtagccaaccccagcataaacttgagatctttcacccattttttaaagatgtggtggaaaaaaagaacataatcgaggctactcatatgtacgataatgctgccgaggcctgtagcaccaccgaagaggtgtttaactccccccgggcaggatcaccgctctgcaactcaaacctgcaggattcagaagaagatatcgagccatcttacagcctgtttcgagaagacacatcactgccttctctgtccaaagaccattctaagctctctatggaactggagggaaatgatgggctgtctttcattatgagcaattttgagagtaaactgaacaacaaagtacctccgccagtcaaaccaaagcctcctgtccattttgaaattacaaagggggatctatcttatttagaccaaggccatagggatggacagaggaagtctgtgtcttctagcccctggctgcctcaggatgggtttgatccttctgactatgctgaacccatggatgctgtggtgaagccaaggaatgaagaagaaaacatatactccgtgccccatgacagcacccaaggcaaaatcatcaccattcggaatatcaacaaagcccagtccaacggcagcgggaatggttctgacagtgaaatggacaccagctctctagagcgagggcgcaaggtttccatcgtgagcaagccagtgctgtacaggacgagatgcacccggctggggcggtttgctagttaccggaccagcttcagcgtggggagtgatgatgagctggggcccatccggaagaaagaggaggatcaggcatcccagggttataaaggggacaatgctgtcattccatacgaaacagacgaagacccgcggaggaggaatattcttcgcagcctaaggaggaacactaagaaaccaaagcccaaaccccggccatccatcacaaaggcaacctgggagagtaactattttggggtgcccttaacaactgtcgtgactccagagaagccgatccccatttttattgaaagatgtattgagtacattgaagccacaggactgagcacggaaggcatctaccgggtcagcgggaacaagtctgagatggagagtctgcagagacagtttgatcaagaccacaacctggacctggcagagaaagactttacggtgaataccgtggctggtgccatgaagagctttttctcagaactgcctgaccccctggtcccgtataacatgcagatcgacttggtggaagcacacaaaatcaacgaccgggagcagaagttgcatgcccttaaggaggtattaaagaaatttccaaaggaaaaccacgaagtcttcaagtatgtcatctctcacctaaacaaggtcagccacaacaacaaggtgaatctcatgaccagcgagaacctctccatctgcttctggcccaccttgatgagacctgatttcagcactatggacgccctcacagccacgcgcacctaccagacaatcattgaactctttatccagcagtgccccttcttcttctacaatcggcccatcaccgagccccccggcgccaggcccagctccccctctgccgtggcttccaccgtccccttcctcacttccacgcctgtcacaagtcagccgtcgcccccacagtcgcctccacccaccccccagtccccaatgcagccactgctccccgcttcatccccaccgtcccactccacagccttcccgaaacattccctggcaaacaaaggaacactaggagaaaaaatggaaaaacccttccagtaattaaaaaggaagaaaccacagaaagaaaactacagacctcaagattccactctgtgcccgcctctgccgggagggagggaggcacacaggtggagctgaccctcgtctttgtggcagcaaaaccaggatgcctggagctgtggcctgagggcctgctggggtcccactcacccacttaggtctagtcgctagatcccccgttttcccaagaagagggttcgagcccttggtggggacagctggggagatggcagtgcaggctggaacctgggctgccccagaacacagtccattacgatagaaacactaattgagcatgtgcgtggggtgggggtgtgtgtgcacatgtgagtgtgagtgtgtgtgggcgcttggtggggggttggggacagctggaaggtgccaggtgcacttggggttggggttggtgtgttgggtgttgaagtggaatcgtttcatcccagccatggaggccaccagcaggagtgttcatggggatgtgggcgaggtggggcactttgaaggaatggcggtctgctggtgccctcgaaggggcatccttcctggtcttcgctgacccagaggcgctgtgcctgcatatcatccaccaccaccctagcccagccttcccactgccccaggaaaagctcttctcctggccacctctgccc

SEQ ID NO: 366978 - DNA, 6169 bp, Homo sapiens
ctggactaggagcaggggaacatggcgccggggcccccgtcgttgctgccgggattttggaggccggggccgcgctgagggcgccagctggaagaaatgttggctatttggcgatgagaggtggtgaacagtgaccatactggtatacaacactatgggacctggcatttttgctgcatgtccagcccacccccactaataatgtaggaagctgtctggtccattggaaacactaatctgatctcagaagtggctgatcgtggcaggatgtgtcgacgatgatgatggcaagaaagcaagatgtccgaattcccacctacaacatcagtgtggtgggattatctgggaccgagaaggaaaagggccagtgtgggattggaaagtcttgtttgtgcaaccgcttcgtgcgcccgagtgctgacgagtttcacttggaccatacctccgtcctcagcaccagtgactttggagggcgagtggtcaataatgaccactttctctactggggagaagttagccgctccctggaggattgtgtggaatgtaagatgcacattgtggagcagactgaatttattgatgatcagacttttcaacctcatcgaagcacggccctgcagccctatatcaagagagctgctgcgaccaagcttgcatcagctgaaaaactcatgtacttttgcactgaccagctggggctggagcaggactttgagcagaaacaaatgccagacggaaagctgctggttgatggttttcttcttggtattgatgttagcaggggcatgaataggaactttgatgaccagctcaagtttgtctccaatctctacaatcagcttgcaaaaacaaaaaagcccatagtggtggtcctgactaagtgtgacgaaggtgttgagcggtacattagagatgcacatacttttgccttaagcaaaaagaacctccaggttgtggagacctcagcgagatccaatgtaaacgtggacttggctttcagcaccttagtgcaactcattgataaaagtcggggaaagacaaaaatcattccttattttgaagctctcaagcagcagagtcagcagatagctacagcaaaagacaagtatgagtggctggtgagtcgcattgtgaaaaaccacaatgagaactggctgagtgtcagccgaaagatgcaggcctctccagaataccaggactatgtctacctggaagggactcagaaagccaagaagctgtttctacagcacatccaccgcctcaagcatgagcatatcgagcgtaggagaaagctgtacctggcagccctgccattagcttttgaagctcttatacctaatctagatgaaatagaccacctaagctgcataaaagccaaaaagctcttagaaaccaagccagaattcttgaagtggtttgttgtgcttgaagagaccccatgggatgccaccagtcacattgacaacatggaaaacgaacggattccctttgatttaatggataccgtccctgcagagcagctatacgaggcccacttagagaagctgaggaacgaaaggaaaagagttgagatgcgaagggcgtttaaagaaaacctggagacttctcctttcataactcccggaaagccttgggaagaggcccgtagttttattatgaatgaggatttctaccagtggctggaggaatctgtatacatggatatttatggcaaacaccaaaagcaaattatagataaagcaaaggaagaatttcaggagttgcttttggaatattcagaattgttttatgaactggagctggatgctaagcccagcaaggagaagatgggtgttattcaggatgttctgggagaggaacagcgatttaaagccatttacaaaagctccaagcagagcgttgatgcccttattctgaaacacattcattttgtgtaccacccaacaaaggagacatgccccagctgcccagcttgtgtggacgctaagattgagcacttgattagttctcggtttatccggccgtctgaccggaatcagaaaaattcactctctgaccctaacattgatagaatcaacttggttatattgggcaaagacggccttgcccgagagttggccaatggagattcgagctctttgtacaaatgatgacaagtatgtgatagatggtaaaatgtatgagctttccctgaggccaatagaggggaatgtcaggcttcctgtgaactctttccagacgccaacatttcagccccacggctgtctctgcctttacaattcaaaggaatcgctatcctatgtagtggaaagtatagagaagagtagagagtccacgctgggccggcgggataatcatttagtccatctcccccttacattaattttggttaacaagagaggagacaccagtggagagactctgcatagcttaatacagcaaggtcaacaaattgctagcaaacttcagtgtgtctttctcgaccctgcttctgctggcattggttacggacgcaacattaatgaaaagcaaatcagtcaagttttgaagggactcctggactctaagcgtaacttaaacctggtcagttctactgctagcatcaaagatttggctgatgttgatctgcgaattgttatgtgtctgatgtgtggagatccttttagtgcagatgacatactttttcctgtccttcagtcccaaacctgtaaatcttcccattgtggaagcaacaactctgttttacttgaactaccaatcggactgcacaagaagcggattgaactgtctgttctttcataccattcctcctttagcatcagaaagagccggttggttcatgggtacattgttttttattcagccaaacgtaaggcctctttggctatgttacgtgcctttctttgtgaagtgcaggatattatccctattcagcttgtagcactcactgatggcgctgtagatgtcctggacaatgacttaagtagggaacagctaactgagggggaggagattgctcaagaaattgacggaaggttcacaagcatcccctgtagccaaccccagcataaacttgagatctttcacccattttttaaagatgtggtggaaaaaaagaacataatcgaggctactcatatgtacgataatgctgccgaggcctgtagcaccaccgaagaggtgtttaactccccccgggcaggatcaccgctctgcaactcaaacctgcaggattcagaagaagatatcgagccatcttacagcctgtttcgagaagacacatcactgccttctctgtccaaagaccattctaagctctctatggaactggagggaaatgatgggctgtctttcattatgagcaattttgagagtaaactgaacaacaaagtacctccgccagtcaaaccaaagcctcctgtccattttgaaattacaaagggggatctatcttatttagaccaaggccatagggatggacagaggaagtctgtgtcttctagcccctggctgcctcaggatgggtttgatccttctgactatgctgaacccatggatgctgtggtgaagccaaggaatgaagaagaaaacatatactccgtgccccatgacagcacccaaggcaaaatcatcaccattcggaatatcaacaaagcccagtccaacggcagcgggaatggttctgacagtgaaatggacaccagctctctagagcgagggcgcaaggtttccatcgtgagcaagccagtgctgtacaggacgagatgcacccggctggggcggtttgctagttaccggaccagcttcagcgtggggagtgatgatgagctggggcccatccggaagaaagaggaggatcaggcatcccagggttataaaggggacaatgctgtcattccatacgaaacagacgaagacccgcggaggaggaatattcttcgcagcctaaggaggaacactaagaaaccaaagcccaaaccccggccatccatcacaaaggcaacctgggagagtaactattttggggtgcccttaacaactgtcgtgactccagagaagccgatccccatttttattgaaagatgtattgagtacattgaagccacaggactgagcacggaaggcatctaccgggtcagcgggaacaagtctgagatggagagtctgcagagacagtttgatcaagaccacaacctggacctggcagagaaagactttacggtgaataccgtggctggtgccatgaagagctttttctcagaactgcctgaccccctggtcccgtataacatgcagatcgacttggtggaagcacacaaaatcaacgaccgggagcagaagttgcatgcccttaaggaggtattaaagaaatttccaaaggaaaaccacgaagtcttcaagtatgtcatctctcacctaaacaaggtcagccacaacaacaaggtgaatctcatgaccagcgagaacctctccatctgcttctggcccaccttgatgagacctgatttcagcactatggacgccctcacagccacgcgcacctaccagacaatcattgaactctttatccagcagtgccccttcttcttctacaatcggcccatcaccgagccccccggcgccaggcccagctccccctctgccgtggcttccaccgtccccttcctcacttccacgcctgtcacaagtcagccgtcgcccccacagtcgcctccacccaccccccagtccccaatgcagccactgcttccctcccagcttcaagccgaacacacgctgtgagccaccaagacctggggcgacaggagaaccggtcctctctctgacggggtggcatttggccttgaacaaaaccaagtccactggggacagaggcaggggcaagtggctctccccattaccttctcaagacctcagtgggagcaccagccaatggtaccatcggctgggctgccaggtaccctgggcctggcgctgcagacctgagctggcttggacccatttgaggactgaactaggcaggcaatggctccagtgccctccctctgttccctggaccaccaccccacgtagctgctcacaccagcctccgggtgcctccctctgcttgtacagagcccatggtcgggacagtgccctggcctttgccggggaggaggatgctctgagattcagggtggggctggcaacccctgaagagaacacttcctgttggtctgtctcttcccaccttccatctgcacacacccccaaggtaagggtacagcccggctggcggcctccttgggaacgtgtaggccacggctctgccaccactaggtacctgctgagggcgctggctctgcagatcagaacaacggaggatagctttgtgcctggacccagagagtgtgggactccccgcttcatccccaccgtcccactccacagccttcccgaaacattccctggcaaacaaaggaacactaggagaaaaaatggaaaaacccttccagtaattaaaaaggaagaaaccacagaaagaaaactacagacctcaagattccactctgtgcccgcctctgccgggagggagggaggcacacaggtggagctgaccctcgtctttgtggcagcaaaaccaggatgcctggagctgtggcctgagggcctgctggggtcccactcacccacttaggtctagtcgctagatcccccgttttcccaagaagagggttcgagcccttggtggggacagctggggagatggcagtgcaggctggaacctgggctgccccagaacacagtccattacgatagaaacactaattgagcatgtgcgtggggtgggggtgtgtgtgcacatgtgagtgtgagtgtgtgtgggcgcttggtggggggttggggacagctggaaggtgccaggtgcacttggggttggggttggtgtgttgggtgttgaagtggaatcgtttcatcccagccatggaggccaccagcaggagtgttcatggggatgtgggcgaggtggggcactttgaaggaatggcggtctgctggtgccctcgaaggggcatccttcctggtcttcgctgacccagaggcgctgtgcctgcatatcatccaccaccaccctagcccagccttcccactgccccaggaaaagctcttctcctggccacctctgccc

SEQ ID NO: 366979 - DNA, 5522 bp, Homo sapiens
ctggactaggagcaggggaacatggcgccggggcccccgtcgttgctgccgggattttggaggccggggccgcgctgagggcgccagctggaagaaatgttggctatttggcgatgagaggtggtgaacagtgaccatactggtatacaacactatgggacctggcatttttgctgcatgtccagcccacccccactaataatgtaggaagctgtctggtccattggaaacactaatctgatctcagaagtggctgatcgtggcaggatgtgtcgacgatgatgatggcaagaaagcaagatgtccgaattcccacctacaacatcagtgtggtgggattatctgggaccgagaaggaaaagggccagtgtgggattggaaagtcttgtttgtgcaaccgcttcgtgcgcccgagtgctgacgagtttcacttggaccatacctccgtcctcagcaccagtgactttggagggcgagtggtcaataatgaccactttctctactggggagaagttagccgctccctggaggattgtgtggaatgtaagatgcacattgtggagcagactgaatttattgatgatcagacttttcaacctcatcgaagcacggccctgcagccctatatcaagagagctgctgcgaccaagcttgcatcagctgaaaaactcatgtacttttgcactgaccagctggggctggagcaggactttgagcagaaacaaatgccagacggaaagctgctggttgatggttttcttcttggtattgatgttagcaggggcatgaataggaactttgatgaccagctcaagtttgtctccaatctctacaatcagcttgcaaaaacaaaaaagcccatagtggtggtcctgactaagtgtgacgaaggtgttgagcggtacattagagatgcacatacttttgccttaagcaaaaagaacctccaggttgtggagacctcagcgagatccaatgtaaacgtggacttggctttcagcaccttagtgcaactcattgataaaagtcggggaaagacaaaaatcattccttattttgaagctctcaagcagcagagtcagcagatagctacagcaaaagacaagtatgagtggctggtgagtcgcattgtgaaaaaccacaatgagaactggctgagtgtcagccgaaagatgcaggcctctccagaataccaggactatgtctacctggaagggactcagaaagccaagaagctgtttctacagcacatccaccgcctcaagcatgagcatatcgagcgtaggagaaagctgtacctggcagccctgccattagcttttgaagctcttatacctaatctagatgaaatagaccacctaagctgcataaaagccaaaaagctcttagaaaccaagccagaattcttgaagtggtttgttgtgcttgaagagaccccatgggatgccaccagtcacattgacaacatggaaaacgaacggattccctttgatttaatggataccgtccctgcagagcagctatacgaggcccacttagagaagctgaggaacgaaaggaaaagagttgagatgcgaagggcgtttaaagaaaacctggagacttctcctttcataactcccggaaagccttgggaagaggcccgtagttttattatgaatgaggatttctaccagtggctggaggaatctgtatacatggatatttatggcaaacaccaaaagcaaattatagataaagcaaaggaagaatttcaggagttgcttttggaatattcagaattgttttatgaactggagctggatgctaagcccagcaaggagaagatgggtgttattcaggatgttctgggagaggaacagcgatttaaagccatttacaaaagctccaagcagagcgttgatgcccttattctgaaacacattcattttgtgtaccacccaacaaaggagacatgccccagctgcccagcttgtgtggacgctaagattgagcacttgattagttctcggtttatccggccgtctgaccggaatcagaaaaattcactctctgaccctaacattgatagaatcaacttggttatattgggcaaagacggccttgcccgagagttggccaatggagattcgagctctttgtacaaatgatgacaagtatgtgatagatggtaaaatgtatgagctttccctgaggccaatagaggggaatgtcaggcttcctgtgaactctttccagacgccaacatttcagccccacggctgtctctgcctttacaattcaaaggaatcgctatcctatgtagtggaaagtatagagaagagtagagagtccacgctgggccggcgggataatcatttagtccatctcccccttacattaattttggttaacaagagaggagacaccagtggagagactctgcatagcttaatacagcaaggtcaacaaattgctagcaaacttcagtgtgtctttctcgaccctgcttctgctggcattggttacggacgcaacattaatgaaaagcaaatcagtcaagttttgaagggactcctggactctaagcgtaacttaaacctggtcagttctactgctagcatcaaagatttggctgatgttgatctgcgaattgttatgtgtctgatgtgtggagatccttttagtgcagatgacatactttttcctgtccttcagtcccaaacctgtaaatcttcccattgtggaagcaacaactctgttttacttgaactaccaatcggactgcacaagaagcggattgaactgtctgttctttcataccattcctcctttagcatcagaaagagccggttggttcatgggtacattgttttttattcagccaaacgtaaggcctctttggctatgttacgtgcctttctttgtgaagtgcaggatattatccctattcagcttgtagcactcactgatggcgctgtagatgtcctggacaatgacttaagtagggaacagctaactgagggggaggagattgctcaagaaattgacggaaggttcacaagcatcccctgtagccaaccccagcataaacttgagatctttcacccattttttaaagatgtggtggaaaaaaagaacataatcgaggctactcatatgtacgataatgctgccgaggcctgtagcaccaccgaagaggtgtttaactccccccgggcaggatcaccgctctgcaactcaaacctgcaggattcagaagaagatatcgagccatcttacagcctgtttcgagaagacacatcactgccttctctgtccaaagaccattctaagctctctatggaactggagggaaatgatgggctgtctttcattatgagcaattttgagagtaaactgaacaacaaagtacctccgccagtcaaaccaaagcctcctgtccattttgaaattacaaagggggatctatcttatttagaccaaggccatagggatggacagaggaagtctgtgtcttctagcccctggctgcctcaggatgggtttgatccttctgactatgctgaacccatggatgctgtggtgaagccaaggaatgaagaagaaaacatatactccgtgccccatgacagcacccaaggcaaaatcatcaccattcggaatatcaacaaagcccagtccaacggcagcgggaatggttctgacagtgaaatggacaccagctctctagagcgagggcgcaaggtttccatcgtgagcaagccagtgctgtacaggacgagatgcacccggctggggcggtttgctagttaccggaccagcttcagcgtggggagtgatgatgagctggggcccatccggaagaaagaggaggatcaggcatcccagggttataaaggggacaatgctgtcattccatacgaaacagacgaagacccgcggaggaggaatattcttcgcagcctaaggaggaacactaagaaaccaaagcccaaaccccggccatccatcacaaaggcaacctgggagagtaactattttggggtgcccttaacaactgtcgtgactccagagaagccgatccccatttttattgaaagatgtattgagtacattgaagccacaggactgagcacggaaggcatctaccgggtcagcgggaacaagtctgagatggagagtctgcagagacagtttgatcaagaccacaacctggacctggcagagaaagactttacggtgaataccgtggctggtgccatgaagagctttttctcagaactgcctgaccccctggtcccgtataacatgcagatcgacttggtggaagcacacaaaatcaacgaccgggagcagaagttgcatgcccttaaggaggtattaaagaaatttccaaaggaaaaccacgaagtcttcaagtatgtcatctctcacctaaacaaggtcagccacaacaacaaggtgaatctcatgaccagcgagaacctctccatctgcttctggcccaccttgatgagacctgatttcagcactatggacgccctcacagccacgcgcacctaccagacaatcattgaactctttatccagcagtgccccttcttcttctacaatcggcccatcaccgagccccccggcgccaggcccagctccccctctgccgtggcttccaccgtccccttcctcacttccacgcctgtcacaagtcagccgtcgcccccacagtcgcctccacccaccccccagtccccaatgcagccactgcttccctcccagcttcaagccgaacacacgctgtgagccaccaagacctggggcgacaggagaaccggtcctctctctgacggggtggcatttggccttgaacaaaaccaagtccactggggacagaggcaggggcaagtggctctccccattaccttctcaagacctcagtgggagcaccagccaatggtaccatcggctgggctgccaggtaccctgggcctggcgctgcagacctgagctggcttggacccatttgaggactgaactaggcaggcaatggctccagtgccctccctctgttccctggaccaccaccccacgtagctgctcacaccagcctccgggtgcctccctctgcttgtacagagcccatggtcgggacagtgccctggcctttgccggggaggaggatgctctgagattcagggtggggctggcaacccctgaagagaacacttcctgttggtctgtctcttcccaccttccatctgcacacacccccaaggtaagggtacagcccggctggcggcctccttgggaacgtgtaggccacggctctgccaccactaggtacctgctgagggcgctggctctgcagatcagaacaacggaggatagctttgtgcctggacccagagagtgtgggactccccgcttcatccccaccgtcccactccacagccttcccgaaacattccctggcaaacaaaggaacatgagccaagatcatgccactgcactccagcctgggcaacacagtgagactccatctc

SEQ ID NO: 366980 - DNA, 4928 bp, Homo sapiens
ctggactaggagcaggggaacatggcgccggggcccccgtcgttgctgccgggattttggaggccggggccgcgctgagggcgccagctggaagaaatgttggctatttggcgatgagaggtggtgaacagtgaccatactggtatacaacactatgggacctggcatttttgctgcatgtccagcccacccccactaataatgtaggaagctgtctggtccattggaaacactaatctgatctcagaagtggctgatcgtggcaggatgtgtcgacgatgatgatggcaagaaagcaagatgtccgaattcccacctacaacatcagtgtggtgggattatctgggaccgagaaggaaaagggccagtgtgggattggaaagtcttgtttgtgcaaccgcttcgtgcgcccgagtgctgacgagtttcacttggaccatacctccgtcctcagcaccagtgactttggagggcgagtggtcaataatgaccactttctctactggggagaagttagccgctccctggaggattgtgtggaatgtaagatgcacattgtggagcagactgaatttattgatgatcagacttttcaacctcatcgaagcacggccctgcagccctatatcaagagagctgctgcgaccaagcttgcatcagctgaaaaactcatgtacttttgcactgaccagctggggctggagcaggactttgagcagaaacaaatgccagacggaaagctgctggttgatggttttcttcttggtattgatgttagcaggggcatgaataggaactttgatgaccagctcaagtttgtctccaatctctacaatcagcttgcaaaaacaaaaaagcccatagtggtggtcctgactaagtgtgacgaaggtgttgagcggtacattagagatgcacatacttttgccttaagcaaaaagaacctccaggttgtggagacctcagcgagatccaatgtaaacgtggacttggctttcagcaccttagtgcaactcattgataaaagtcggggaaagacaaaaatcattccttattttgaagctctcaagcagcagagtcagcagatagctacagcaaaagacaagtatgagtggctggtgagtcgcattgtgaaaaaccacaatgagaactggctgagtgtcagccgaaagatgcaggcctctccagaataccaggactatgtctacctggaagggactcagaaagccaagaagctgtttctacagcacatccaccgcctcaagcatgagcatatcgagcgtaggagaaagctgtacctggcagccctgccattagcttttgaagctcttatacctaatctagatgaaatagaccacctaagctgcataaaagccaaaaagctcttagaaaccaagccagaattcttgaagtggtttgttgtgcttgaagagaccccatgggatgccaccagtcacattgacaacatggaaaacgaacggattccctttgatttaatggataccgtccctgcagagcagctatacgaggcccacttagagaagctgaggaacgaaaggaaaagagttgagatgcgaagggcgtttaaagaaaacctggagacttctcctttcataactcccggaaagccttgggaagaggcccgtagttttattatgaatgaggatttctaccagtggctggaggaatctgtatacatggatatttatggcaaacaccaaaagcaaattatagataaagcaaaggaagaatttcaggagttgcttttggaatattcagaattgttttatgaactggagctggatgctaagcccagcaaggagaagatgggtgttattcaggatgttctgggagaggaacagcgatttaaagccatttacaaaagctccaagcagagcgttgatgcccttattctgaaacacattcattttgtgtaccacccaacaaaggagacatgccccagctgcccagcttgtgtggacgctaagattgagcacttgattagttctcggtttatccggccgtctgaccggaatcagaaaaattcactctctgaccctaacattgatagaatcaacttggttatattgggcaaagacggccttgcccgagagttggccaatggagattcgagctctttgtacaaatgatgacaagtatgtgatagatggtaaaatgtatgagctttccctgaggccaatagaggggaatgtcaggcttcctgtgaactctttccagacgccaacatttcagccccacggctgtctctgcctttacaattcaaaggaatcgctatcctatgtagtggaaagtatagagaagagtagagagtccacgctgggccggcgggataatcatttagtccatctcccccttacattaattttggttaacaagagaggagacaccagtggagagactctgcatagcttaatacagcaaggtcaacaaattgctagcaaacttcagtgtgtctttctcgaccctgcttctgctggcattggttacggacgcaacattaatgaaaagcaaatcagtcaagttttgaagggactcctggactctaagcgtaacttaaacctggtcagttctactgctagcatcaaagatttggctgatgttgatctgcgaattgttatgtgtctgatgtgtggagatccttttagtgcagatgacatactttttcctgtccttcagtcccaaacctgtaaatcttcccattgtggaagcaacaactctgttttacttgaactaccaatcggactgcacaagaagcggattgaactgtctgttctttcataccattcctcctttagcatcagaaagagccggttggttcatgggtacattgttttttattcagccaaacgtaaggcctctttggctatgttacgtgcctttctttgtgaagtgcaggatattatccctattcagcttgtagcactcactgatggcgctgtagatgtcctggacaatgacttaagtagggaacagctaactgagggggaggagattgctcaagaaattgacggaaggttcacaagcatcccctgtagccaaccccagcataaacttgagatctttcacccattttttaaagatgtggtggaaaaaaagaacataatcgaggctactcatatgtacgataatgctgccgaggcctgtagcaccaccgaagaggtgtttaactccccccgggcaggatcaccgctctgcaactcaaacctgcaggattcagaagaagatatcgagccatcttacagcctgtttcgagaagacacatcactgccttctctgtccaaagaccattctaagctctctatggaactggagggaaatgatgggctgtctttcattatgagcaattttgagagtaaactgaacaacaaagtacctccgccagtcaaaccaaagcctcctgtccattttgaaattacaaagggggatctatcttatttagaccaaggccatagggatggacagaggaagtctgtgtcttctagcccctggctgcctcaggatgggtttgatccttctgactatgctgaacccatggatgctgtggtgaagccaaggaatgaagaagaaaacatatactccgtgccccatgacagcacccaaggcaaaatcatcaccattcggaatatcaacaaagcccagtccaacggcagcgggaatggttctgacagtgaaatggacaccagctctctagagcgagggcgcaaggtttccatcgtgagcaagccagtgctgtacaggacgagatgcacccggctggggcggtttgctagttaccggaccagcttcagcgtggggagtgatgatgagctggggcccatccggaagaaagaggaggatcaggcatcccagggttataaaggggacaatgctgtcattccatacgaaacagacgaagacccgcggaggaggaatattcttcgcagcctaaggaggaacactaagaaaccaaagcccaaaccccggccatccatcacaaaggcaacctgggagagtaactattttggggtgcccttaacaactgtcgtgactccagagaagccgatccccatttttattgaaagatgtattgagtacattgaagccacaggactgagcacggaaggcatctaccgggtcagcgggaacaagtctgagatggagagtctgcagagacagtttgatcaagaccacaacctggacctggcagagaaagactttacggtgaataccgtggctggtgccatgaagagctttttctcagaactgcctgaccccctggtcccgtataacatgcagatcgacttggtggaagcacacaaaatcaacgaccgggagcagaagttgcatgcccttaaggaggtattaaagaaatttccaaaggaaaaccacgaagtcttcaagtatgtcatctctcacctaaacaaggtcagccacaacaacaaggtgaatctcatgaccagcgagaacctctccatctgcttctggcccaccttgatgagacctgatttcagcactatggacgccctcacagccacgcgcacctaccagacaatcattgaactctttatccagcagtgccccttcttcttctacaatcggcccatcaccgagccccccggcgccaggcccagctccccctctgccgtggcttccaccgtccccttcctcacttccacgcctgtcacaagtcagccgtcgcccccacagtcgcctccacccaccccccagtccccaatgcagccactgcctgctgacctgggctggcctcccccagccctcccgtggcggagccggcagcgatgctacaggcctaagttattgtttgcataaaaagaatcatgttccctgtgtacatttaagaaaaaaacaaaaaaacggaaatgtcagaattgtatggaaataaaacttgtttgaaaatttggaatagt

SEQ ID NO: 366981 - DNA, 3919 bp, Homo sapiens
agcgggggggccaggaagccccaggcacacagtgccgcccttcagcgggggcctgggacacagaggtgggccagacccctgggccagtgccactgccaggtgtgccagccttgggcacaggctttgggggaaagagtggggttagtgtcatccaaaagccctgggctgtcctcagagaaggcccatcacagagcacgccctggggtggccaccagcctcggccatgaaaggcaaggctttggttttctctctcctcagaaatcaacgaccgggagcagaagttgcatgcccttaaggaggtattaaagaaatttccaaaggaaaaccacgaagtcttcaagtatgtcatctctcacctaaacaaggtcagccacaacaacaaggtgaatctcatgaccagcgagaacctctccatctgcttctggcccaccttgatgagacctgatttcagcactatggacgccctcacagccacgcgcacctaccagacaatcattgaactctttatccagcagtgccccttcttcttctacaatcggcccatcaccgagccccccggcgccaggcccagctccccctctgccgtggcttccaccgtccccttcctcacttccacgcctgtcacaagtcagccgtcgcccccacagtcgcctccacccaccccccagtccccaatgcagccactgcttccctcccagcttcaagccgaacacacgctgtgagccaccaagacctggggcgacaggagaaccggtcctctctctgacggggtggcatttggccttgaacaaaaccaagtccactggggacagaggcaggggcaagtggctctccccattaccttctcaagacctcagtgggagcaccagccaatggtaccatcggctgggctgccaggtaccctgggcctggcgctgcagacctgagctggcttggacccatttgaggactgaactaggcaggcaatggctccagtgccctccctctgttccctggaccaccaccccacgtagctgctcacaccagcctccgggtgcctccctctgcttgtacagagcccatggtcgggacagtgccctggcctttgccggggaggaggatgctctgagattcagggtggggctggcaacccctgaagagaacacttcctgttggtctgtctcttcccaccttccatctgcacacacccccaaggtaagggtacagcccggctggcggcctccttgggaacgtgtaggccacggctctgccaccactaggtacctgctgagggcgctggctctgcagatcagaacaacggaggatagctttgtgcctggacccagagagtgtgggactccccgcttcatccccaccgtcccactccacagccttcccgaaacattccctggcaaacaaaggaacactaggagaaaaaatggaaaaacccttccagtaattaaaaaggaagaaaccacagaaagaaaactacagacctcaagattccactctgtgcccgcctctgccgggagggagggaggcacacaggtggagctgaccctcgtctttgtggcagcaaaaccaggatgcctggagctgtggcctgagggcctgctggggtcccactcacccacttaggtctagtcgctagatcccccgttttcccaagaagagggttcgagcccttggtggggacagctggggagatggcagtgcaggctggaacctgggctgccccagaacacagtccattacgatagaaacaactaggcaccccccaggcgagagctagtggggtgcagagggccccatgccagacagcccttggggctcgttgcactttaagaaataggatctgtggtgtattccagggggcctgatggacacctttcccgggcgtctgcagctgccctgcccgtgcccgcctgcagtggttggagacgggagtggcccttcggctcccgagctccctctggggacggctggctcactgtctccagttctcaatggccaacgaaggtgcttggaaacacctaaccttgcaagttttaccgccttttgaggaacacaaatcggagaacaaacccagggttcaggcgtgttttctgtgaatgttggatgatgaatttttgtctcttctggtggagctgtgcctggccctgtaggcccagggttggctggaaggtgacatctgtgtttcgttttagctgaggttggcagaaacgttcccaaactcccccagccctggaccccagcagatgaggaaacggccccatttactgaccccgcccccttttcgaggttatgctcacctggtcagctcctcacgtaattgggggtggagggaaagcatggtggtgccctgggccgtccctgtgtgaacgcaggcaaaagcagcccagtccccctcactgcttgagctaacactgccacctcttttgtgtgagcacaaaagccacgtcccaagccacctggcccgattccacagatgtatgtgcggccagtgacttccccaggagtgtggagggggtggtgaggaggagcacctgggctctctacccctctcctcacagaagtacctgaaactaggtctggggcactcccaatgcagcgccttgtcagccaaggtgggcaggcagggactgtggcagcttatgtccaaagggagcccccatgcacaggaagccacagggttcctcttgtttcccccgctaacttcagcctctcatctgctgctccgggctgagggactagaggacatctcggtcgtttgaggggcatggccagtcgtggcaggccggccttcagcgtccggtcagggaagcgtgcagcccaaatgggcacttgcatgggagccacagaggagcgtccctggggattgttgggaccatgctgcccccactcccgcttttgttggggctctaagttctggaaggtgtgtgcacagagggtgctcatgggactcgcatgcagctctcagcactgggtgggagggcgttggcttgtccagaatggggacgtggggcagccacccctgcccagcgagagcgcagacaccgtgtgaggggacagcagcccttggtgcaaagccagagactgatcctggctctgacggctgaagagggaagacccaaggctgggtggcgtggctcgtgaatccacttagaattcttggcttgtgtcgcatactgggtgtcacggcacacatttactctgcattgtccccgtctttcccatcgcctagcgtttggggaggaacagggagagagcttcggggcgtctgtctccgtgctctcctgcctccaccgccttggttttgcttcctgctggaggcagggcacctgctgcgacccagattcttctgcaggatgtgtctgtctttgtcacggtggacagagggtgacatcataggagcagctcgctggccagaaggggatgggggcatccctgtgcctcactcagctcctgctgctcttagggaaaggaggcctgggtcaagccagcatccccttggtaaagacccccgcaggccaccaggcattctggacacacacacacacacacacacacacacacacacaaaacttcacagcaggccagctgcagtgacttgtcatcaagagtcacctcagctgcgcccccctcccatcctttcctatgagaagccactgctttgggggcgccggctagaaaaagtagggtgcggtggccaggagggcccctgccgcgcggggggctgggtctggttgagtcgctgctttcccgagggcagcgcagggatccggggaagctgcggcagggagcgggcgccggcttcgtggctctgaggtgtaacgggggtgggctccctccctcggaggacatcgtctgtgtccaggtcagaaagtggcccaggaagggggcagtttctgtcgcgggtccggtgggggcgcggccgcaa

SEQ ID NO: 366982 - DNA, 3726 bp, Homo sapiens
agcgggggggccaggaagccccaggcacacagtgccgcccttcagcgggggcctgggacacagagaaatcaacgaccgggagcagaagttgcatgcccttaaggaggtattaaagaaatttccaaaggaaaaccacgaagtcttcaagtatgtcatctctcacctaaacaaggtcagccacaacaacaaggtgaatctcatgaccagcgagaacctctccatctgcttctggcccaccttgatgagacctgatttcagcactatggacgccctcacagccacgcgcacctaccagacaatcattgaactctttatccagcagtgccccttcttcttctacaatcggcccatcaccgagccccccggcgccaggcccagctccccctctgccgtggcttccaccgtccccttcctcacttccacgcctgtcacaagtcagccgtcgcccccacagtcgcctccacccaccccccagtccccaatgcagccactgcttccctcccagcttcaagccgaacacacgctgtgagccaccaagacctggggcgacaggagaaccggtcctctctctgacggggtggcatttggccttgaacaaaaccaagtccactggggacagaggcaggggcaagtggctctccccattaccttctcaagacctcagtgggagcaccagccaatggtaccatcggctgggctgccaggtaccctgggcctggcgctgcagacctgagctggcttggacccatttgaggactgaactaggcaggcaatggctccagtgccctccctctgttccctggaccaccaccccacgtagctgctcacaccagcctccgggtgcctccctctgcttgtacagagcccatggtcgggacagtgccctggcctttgccggggaggaggatgctctgagattcagggtggggctggcaacccctgaagagaacacttcctgttggtctgtctcttcccaccttccatctgcacacacccccaaggtaagggtacagcccggctggcggcctccttgggaacgtgtaggccacggctctgccaccactaggtacctgctgagggcgctggctctgcagatcagaacaacggaggatagctttgtgcctggacccagagagtgtgggactccccgcttcatccccaccgtcccactccacagccttcccgaaacattccctggcaaacaaaggaacactaggagaaaaaatggaaaaacccttccagtaattaaaaaggaagaaaccacagaaagaaaactacagacctcaagattccactctgtgcccgcctctgccgggagggagggaggcacacaggtggagctgaccctcgtctttgtggcagcaaaaccaggatgcctggagctgtggcctgagggcctgctggggtcccactcacccacttaggtctagtcgctagatcccccgttttcccaagaagagggttcgagcccttggtggggacagctggggagatggcagtgcaggctggaacctgggctgccccagaacacagtccattacgatagaaacaactaggcaccccccaggcgagagctagtggggtgcagagggccccatgccagacagcccttggggctcgttgcactttaagaaataggatctgtggtgtattccagggggcctgatggacacctttcccgggcgtctgcagctgccctgcccgtgcccgcctgcagtggttggagacgggagtggcccttcggctcccgagctccctctggggacggctggctcactgtctccagttctcaatggccaacgaaggtgcttggaaacacctaaccttgcaagttttaccgccttttgaggaacacaaatcggagaacaaacccagggttcaggcgtgttttctgtgaatgttggatgatgaatttttgtctcttctggtggagctgtgcctggccctgtaggcccagggttggctggaaggtgacatctgtgtttcgttttagctgaggttggcagaaacgttcccaaactcccccagccctggaccccagcagatgaggaaacggccccatttactgaccccgcccccttttcgaggttatgctcacctggtcagctcctcacgtaattgggggtggagggaaagcatggtggtgccctgggccgtccctgtgtgaacgcaggcaaaagcagcccagtccccctcactgcttgagctaacactgccacctcttttgtgtgagcacaaaagccacgtcccaagccacctggcccgattccacagatgtatgtgcggccagtgacttccccaggagtgtggagggggtggtgaggaggagcacctgggctctctacccctctcctcacagaagtacctgaaactaggtctggggcactcccaatgcagcgccttgtcagccaaggtgggcaggcagggactgtggcagcttatgtccaaagggagcccccatgcacaggaagccacagggttcctcttgtttcccccgctaacttcagcctctcatctgctgctccgggctgagggactagaggacatctcggtcgtttgaggggcatggccagtcgtggcaggccggccttcagcgtccggtcagggaagcgtgcagcccaaatgggcacttgcatgggagccacagaggagcgtccctggggattgttgggaccatgctgcccccactcccgcttttgttggggctctaagttctggaaggtgtgtgcacagagggtgctcatgggactcgcatgcagctctcagcactgggtgggagggcgttggcttgtccagaatggggacgtggggcagccacccctgcccagcgagagcgcagacaccgtgtgaggggacagcagcccttggtgcaaagccagagactgatcctggctctgacggctgaagagggaagacccaaggctgggtggcgtggctcgtgaatccacttagaattcttggcttgtgtcgcatactgggtgtcacggcacacatttactctgcattgtccccgtctttcccatcgcctagcgtttggggaggaacagggagagagcttcggggcgtctgtctccgtgctctcctgcctccaccgccttggttttgcttcctgctggaggcagggcacctgctgcgacccagattcttctgcaggatgtgtctgtctttgtcacggtggacagagggtgacatcataggagcagctcgctggccagaaggggatgggggcatccctgtgcctcactcagctcctgctgctcttagggaaaggaggcctgggtcaagccagcatccccttggtaaagacccccgcaggccaccaggcattctggacacacacacacacacacacacacacacacacacaaaacttcacagcaggccagctgcagtgacttgtcatcaagagtcacctcagctgcgcccccctcccatcctttcctatgagaagccactgctttgggggcgccggctagaaaaagtagggtgcggtggccaggagggcccctgccgcgcggggggctgggtctggttgagtcgctgctttcccgagggcagcgcagggatccggggaagctgcggcagggagcgggcgccggcttcgtggctctgaggtgtaacgggggtgggctccctccctcggaggacatcgtctgtgtccaggtcagaaagtggcccaggaagggggcagtttctgtcgcgggtccggtgggggcgcggccgcaa

SEQ ID NO: 366983 - DNA, 4402 bp, Homo sapiens
  misc_feature (4358)..(4358): n is a, c, g, or t
ctggactaggagcaggggaacatggcgccggggcccccgtcgttgctgccgggattttggaggccggggccgcgctgagggcgccagctggaagaaatgttggctatttggcgatgagaggtggtgaacagtgaccatactggtatacaacactatgggacctggcatttttgctgcatgtccagcccacccccactaataatgtaggaagctgtctggtccattggaaacactaatctgatctcagaagtggctgatcgtggcaggatgtgtcgacgatgatgatggcaagaaagcaagatgtccgaattcccacctacaacatcagtgtggtgggattatctgggaccgagaaggaaaagggccagtgtgggattggaaagtcttgtttgtgcaaccgcttcgtgcgcccgagtgctgacgagtttcacttggaccatacctccgtcctcagcaccagtgactttggagggcgagtggtcaataatgaccactttctctactggggagaagttagccgctccctggaggattgtgtggaatgtaagatgcacattgtggagcagactgaatttattgatgatcagacttttcaacctcatcgaagcacggccctgcagccctatatcaagagagctgctgcgaccaagcttgcatcagctgaaaaactcatgtacttttgcactgaccagctggggctggagcaggactttgagcagaaacaaatgccagacggaaagctgctggttgatggttttcttcttggtattgatgttagcaggggcatgaataggaactttgatgaccagctcaagtttgtctccaatctctacaatcagcttgcaaaaacaaaaaagcccatagtggtggtcctgactaagtgtgacgaaggtgttgagcggtacattagagatgcacatacttttgccttaagcaaaaagaacctccaggttgtggagacctcagcgagatccaatgtaaacgtggacttggctttcagcaccttagtgcaactcattgataaaagtcggggaaagacaaaaatcattccttattttgaagctctcaagcagcagagtcagcagatagctacagcaaaagacaagtatgagtggctggtgagtcgcattgtgaaaaaccacaatgagaactggctgagtgtcagccgaaagatgcaggcctctccagaataccaggactatgtctacctggaagggactcagaaagccaagaagctgtttctacagcacatccaccgcctcaagcatgagcatatcgagcgtaggagaaagctgtacctggcagccctgccattagcttttgaagctcttatacctaatctagatgaaatagaccacctaagctgcataaaagccaaaaagctcttagaaaccaagccagaattcttgaagtggtttgttgtgcttgaagagaccccatgggatgccaccagtcacattgacaacatggaaaacgaacggattccctttgatttaatggataccgtccctgcagagcagctatacgaggcccacttagagaagctgaggaacgaaaggaaaagagttgagatgcgaagggcgtttaaagaaaacctggagacttctcctttcataactcccggaaagccttgggaagaggcccgtagttttattatgaatgaggatttctaccagtggctggaggaatctgtatacatggatatttatggcaaacaccaaaagcaaattatagataaagcaaaggaagaatttcaggagttgcttttggaatattcagaattgttttatgaactggagctggatgctaagcccagcaaggagaagatgggtgttattcaggatgttctgggagaggaacagcgatttaaagccatttacaaaagctccaagcagagcgttgatgcccttattctgaaacacattcattttgtgtaccacccaacaaaggagacatgccccagctgcccagcttgtgtggacgctaagattgagcacttgattagttctcggtttatccggccgtctgaccggaatcagaaaaattcactctctgaccctaacattgatagaatcaacttggttatattgggcaaagacggccttgcccgagagttggccaatggagattcgagctctttgtacaaatgatgacaagtatgtgatagatggtaaaatgtatgagctttccctgaggccaatagaggggaatgtcaggcttcctgtgaactctttccagacgccaacatttcagccccacggctgtctctgcctttacaattcaaaggaatcgctatcctatgtagtggaaagtatagagaagagtagagagtccacgctgggccggcgggataatcatttagtccatctcccccttacattaattttggttaacaagagaggagacaccagtggagagactctgcatagcttaatacagcaaggtcaacaaattgctagcaaacttcagtgtgtctttctcgaccctgcttctgctggcattggttacggacgcaacattaatgaaaagcaaatcagtcaagttttgaagggactcctggactctaagcgtaacttaaacctggtcagttctactgctagcatcaaagatttggctgatgttgatctgcgaattgttatgtgtctgatgtgtggagatccttttagtgcagatgacatactttttcctgtccttcagtcccaaacctgtaaatcttcccattgtggaagcaacaactctgttttacttgaactaccaatcggactgcacaagaagcggattgaactgtctgttctttcataccattcctcctttagcatcagaaagagccggttggttcatgggtacattgttttttattcagccaaacgtaaggcctctttggctatgttacgtgcctttctttgtgaagtgcaggatattatccctattcagcttgtagcactcactgatggcgctgtagatgtcctggacaatgacttaagtagggaacagctaactgagggggaggagattgctcaagaaattgacggaaggttcacaagcatcccctgtagccaaccccagcataaacttgagatctttcacccattttttaaagatgtggtggaaaaaaagaacataatcgaggctactcatatgtacgataatgctgccgaggcctgtagcaccaccgaagaggtgtttaactccccccgggcaggatcaccgctctgcaactcaaacctgcaggattcagaagaagatatcgagccatcttacagcctgtttcgagaagacacatcactgccttctctgtccaaagaccattctaagctctctatggaactggagggaaatgatgggctgtctttcattatgagcaattttgagagtaaactgaacaacaaagtacctccgccagtcaaaccaaagcctcctgtccattttgaaattacaaagggggatctatcttatttagaccaaggccatagggatggacagaggaagtctgtgtcttctagcccctggctgcctcaggatgggtttgatccttctgactatgctgaacccatggatgctgtggtgaagccaaggaatgaagaagaaaacatatactccgtgccccatgacagcacccaaggcaaaatcatcaccattcggaatatcaacaaagcccagtccaacggcagcgggaatggttctgacagtgaaatggacaccagctctctagagcgagggcgcaaggtttccatcgtgagcaagccagtgctgtacaggacgagatgcacccggctggggcggtttgctagttaccggaccagcttcagcgtggggagtgatgatgagctggggcccatccggaagaaagaggaggatcaggcatcccagggttataaaggggacaatgctgtcattccatacgaaacagacgaagacccgcggaggaggaatattcttcgcagcctaaggaggaacactaagaaaccaaagcccaaaccccggccatccatcacaaaggcaacctgggagagtaactattttggggtgcccttaacaactgtcgtgactccagagaagccgatccccatttttattgaaagatgtattgagtacattgaagccacaggactgagcacggaaggcatctaccgggtcagcgggaacaagtctgagatggagagtctgcagagacagtttgatcaagaccacaacctggacctggcagagaaagactttacggtgaataccgtggctggtgccatgaagagctttttctcagaactgcctgaccccctggtcccgtataacatgcagatcgacttggtggaagcacacaaaatcaacgaccgggagcagaagttgcatgcccgccatgngtggattgccagctggcaatccacgcatggctggctggaggagt

SEQ ID NO: 366984 - DNA, 4976 bp, Homo sapiens
ctggactaggagcaggggaacatggcgccggggcccccgtcgttgctgccgggattttggaggccggggccgcgctgagggcgccagctggaagaaatgttggctatttggcgatgagaggtggtgaacagtgaccatactggtatacaacactatgggacctggcatttttgctgcatgtccagcccacccccactaataatgtaggaagctgtctggtccattggaaacactaatctgatctcagaagtggctgatcgtggcaggatgtgtcgacgatgatgatggcaagaaagcaagatgtccgaattcccacctacaacatcagtgtggtgggattatctgggaccgagaaggaaaagggccagtgtgggattggaaagtcttgtttgtgcaaccgcttcgtgcgcccgagtgctgacgagtttcacttggaccatacctccgtcctcagcaccagtgactttggagggcgagtggtcaataatgaccactttctctactggggagaagttagccgctccctggaggattgtgtggaatgtaagatgcacattgtggagcagactgaatttattgatgatcagacttttcaacctcatcgaagcacggccctgcagccctatatcaagagagctgctgcgaccaagcttgcatcagctgaaaaactcatgtacttttgcactgaccagctggggctggagcaggactttgagcagaaacaaatgccagacggaaagctgctggttgatggttttcttcttggtattgatgttagcaggggcatgaataggaactttgatgaccagctcaagtttgtctccaatctctacaatcagcttgcaaaaacaaaaaagcccatagtggtggtcctgactaagtgtgacgaaggtgttgagcggtacattagagatgcacatacttttgccttaagcaaaaagaacctccaggttgtggagacctcagcgagatccaatgtaaacgtggacttggctttcagcaccttagtgcaactcattgataaaagtcggggaaagacaaaaatcattccttattttgaagctctcaagcagcagagtcagcagatagctacagcaaaagacaagtatgagtggctggtgagtcgcattgtgaaaaaccacaatgagaactggctgagtgtcagccgaaagatgcaggcctctccagaataccaggactatgtctacctggaagggactcagaaagccaagaagctgtttctacagcacatccaccgcctcaagcatgagcatatcgagcgtaggagaaagctgtacctggcagccctgccattagcttttgaagctcttatacctaatctagatgaaatagaccacctaagctgcataaaagccaaaaagctcttagaaaccaagccagaattcttgaagtggtttgttgtgcttgaagagaccccatgggatgccaccagtcacattgacaacatggaaaacgaacggattccctttgatttaatggataccgtccctgcagagcagctatacgaggcccacttagagaagctgaggaacgaaaggaaaagagttgagatgcgaagggcgtttaaagaaaacctggagacttctcctttcataactcccggaaagccttgggaagaggcccgtagttttattatgaatgaggatttctaccagtggctggaggaatctgtatacatggatatttatggcaaacaccaaaagcaaattatagataaagcaaaggaagaatttcaggagttgcttttggaatattcagaattgttttatgaactggagctggatgctaagcccagcaaggagaagatgggtgttattcaggatgttctgggagaggaacagcgatttaaagccatttacaaaagctccaagcagagcgttgatgcccttattctgaaacacattcattttgtgtaccacccaacaaaggagacatgccccagctgcccagcttgtgtggacgctaagattgagcacttgattagttctcggtttatccggccgtctgaccggaatcagaaaaattcactctctgaccctaacattgatagaatcaacttggttatattgggcaaagacggccttgcccgagagttggccaatggagattcgagctctttgtacaaatgatgacaagtatgtgatagatggtaaaatgtatgagctttccctgaggccaatagaggggaatgtcaggcttcctgtgaactctttccagacgccaacatttcagccccacggctgtctctgcctttacaattcaaaggaatcgctatcctatgtagtggaaagtatagagaagagtagagagtccacgctgggccggcgggataatcatttagtccatctcccccttacattaattttggttaacaagagaggagacaccagtggagagactctgcatagcttaatacagcaaggtcaacaaattgctagcaaacttcagtgtgtctttctcgaccctgcttctgctggcattggttacggacgcaacattaatgaaaagcaaatcagtcaagttttgaagggactcctggactctaagcgtaacttaaacctggtcagttctactgctagcatcaaagatttggctgatgttgatctgcgaattgttatgtgtctgatgtgtggagatccttttagtgcagatgacatactttttcctgtccttcagtcccaaacctgtaaatcttcccattgtggaagcaacaactctgttttacttgaactaccaatcggactgcacaagaagcggattgaactgtctgttctttcataccattcctcctttagcatcagaaagagccggttggttcatgggtacattgttttttattcagccaaacgtaaggcctctttggctatgttacgtgcctttctttgtgaagtgcaggatattatccctattcagcttgtagcactcactgatggcgctgtagatgtcctggacaatgacttaagtagggaacagctaactgagggggaggagattgctcaagaaattgacggaaggttcacaagcatcccctgtagccaaccccagcataaacttgagatctttcacccattttttaaagatgtggtggaaaaaaagaacataatcgaggctactcatatgtacgataatgctgccgaggcctgtagcaccaccgaagaggtgtttaactccccccgggcaggatcaccgctctgcaactcaaacctgcaggattcagaagaagatatcgagccatcttacagcctgtttcgagaagacacatcactgccttctctgtccaaagaccattctaagctctctatggaactggagggaaatgatgggctgtctttcattatgagcaattttgagagtaaactgaacaacaaagtacctccgccagtcaaaccaaagcctcctgtccattttgaaattacaaagggggatctatcttatttagaccaaggccatagggatggacagaggaagtctgtgtcttctagcccctggctgcctcaggatgggtttgatccttctgactatgctgaacccatggatgctgtggtgaagccaaggaatgaagaagaaaacatatactccgtgccccatgacagcacccaaggcaaaatcatcaccattcggaatatcaacaaagcccagtccaacggcagcgggaatggttctgacagtgaaatggacaccagctctctagagcgagggcgcaaggtttccatcgtgagcaagccagtgctgtacaggacgagatgcacccggctggggcggtttgctagttaccggaccagcttcagcgtggggagtgatgatgagctggggcccatccggaagaaagaggaggatcaggcatcccagggttataaaggggacaatgctgtcattccatacgaaacagacgaagacccgcggaggaggaatattcttcgcagcctaaggaggaacactaagaaaccaaagcccaaaccccggccatccatcacaaaggcaacctgggagagtaactattttggggtgcccttaacaactgtcgtgactccagagaagccgatccccatttttattgaaagatgtattgagtacattgaagccacaggtaagagtattacctcatagcagtttataactttcactgtctacaggatgcttactggagggtcaagccatctggagattctggaatcagttgttgttgattgtgagatgctcttggagaaggagctgagcagtcccaacagttgtcagatgtgtagattctccatttgtgtgcagttttgaggctgtcgttgggcatttattaggccttggcctacgaaggagctgttctgtgctcaaggtggcagctatggctgcttgggcgctttctctgtgctacctcacccaccagagcatcagcactctgtcagttgcctgcccgcctgtgttccctgcagatctgtgaactccttgagggttgtgctatcattgtgtcctcagtactatagtggatacataatacattttggtttagtaaaattaatacagccctcagcattgttcggatgcctgagacccatgtattgataggatttttttctgaggtaagaaaatgattaggatgtttgggatatcttctggttatgccgctcctctgacaacttgatgctatcacaaaggtagactgtcttgggaaatttttttgcattgttcttgaaataattaagttttacttgtgttgaaaccatttgctttattcatttgagctctcatgtgtccctttggccttccagtttcactaaggtgggttcttgagcattcggagttgggctcaggaacacaggcttaaactaatttgaaactaaggtagggattacagccttccaatctgttctttctaactctgatattatctacagtggtattaagtattgtgtggtgtggacagcctactaggctctgctgataatttcagcagcatcgtgtga

SEQ ID NO: 366985 - DNA, 675 bp, Homo sapiens
agcgggggggccaggaagccccaggcacacagtgccgcccttcagcgggggcctgggacacagagaaatcaacgaccgggagcagaagttgcatgcccttaaggaggtattaaagaaatttccaaaggaaaaccacgaagtcttcaagtatgtcatctctcacctaaacaaggtcagccacaacaacaaggtgaatctcatgaccagcgagaacctctccatctgcttctggcccaccttgatgagacctgatttcagcactatggacgccctcacagccacgcgcacctaccagacaatcattgaactctttatccagcagtgccccttcttcttctacaatcggcccatcaccgagccccccggcgccaggcccagctccccctctgccgtggcttccaccgtccccttcctcacttccacgcctgtcacaagtcagccgtcgcccccacagtcgcctccacccaccccccagtccccaatgcagccactgcctgctgacctgggctggcctcccccagccctcccgtggcggagccggcagcgatgctacaggcctaagttattgtttgcataaaaagaatcatgttccctgtgtacatttaagaaaaaaacaaaaaaacggaaatgtcagaattgtatggaaataaaacttgtttgaaaatttggaatagt

SEQ ID NO: 366986 - DNA, 7979 bp, Homo sapiens
ctggactaggagcaggggaacatggcgccggggcccccgtcgttgctgccgggattttggaggccggggccgcgctgagggcgccagctggaagaaatgttggctatttggcgatgagaggtggtgaacagtgaccatactggtatacaacactatgggacctggcatttttgctgcatgtccagcccacccccactaataatgtaggaagctgtctggtccattggaaacactaatctgatctcagaagtggctgatcgtggcaggatgtgtcgacgatgatgatggcaagaaagcaagatgtccgaattcccacctacaacatcagtgtggtgggattatctgggaccgagaaggaaaagggccagtgtgggattggaaagtcttgtttgtgcaaccgcttcgtgcgcccgagtgctgacgagtttcacttggaccatacctccgtcctcagcaccagtgactttggagggcgagtggtcaataatgaccactttctctactggggagaagttagccgctccctggaggattgtgtggaatgtaagatgcacattgtggagcagactgaatttattgatgatcagacttttcaacctcatcgaagcacggccctgcagccctatatcaagagagctgctgcgaccaagcttgcatcagctgaaaaactcatgtacttttgcactgaccagctggggctggagcaggactttgagcagaaacaaatgccagacggaaagctgctggttgatggttttcttcttggtattgatgttagcaggggcatgaataggaactttgatgaccagctcaagtttgtctccaatctctacaatcagcttgcaaaaacaaaaaagcccatagtggtggtcctgactaagtgtgacgaaggtgttgagcggtacattagagatgcacatacttttgccttaagcaaaaagaacctccaggttgtggagacctcagcgagatccaatgtaaacgtggacttggctttcagcaccttagtgcaactcattgataaaagtcggggaaagacaaaaatcattccttattttgaagctctcaagcagcagagtcagcagatagctacagcaaaagacaagtatgagtggctggtgagtcgcattgtgaaaaaccacaatgagaactggctgagtgtcagccgaaagatgcaggcctctccagaataccaggactatgtctacctggaagggactcagaaagccaagaagctgtttctacagcacatccaccgcctcaagcatgagcatatcgagcgtaggagaaagctgtacctggcagccctgccattagcttttgaagctcttatacctaatctagatgaaatagaccacctaagctgcataaaagccaaaaagctcttagaaaccaagccagaattcttgaagtggtttgttgtgcttgaagagaccccatgggatgccaccagtcacattgacaacatggaaaacgaacggattccctttgatttaatggataccgtccctgcagagcagctatacgaggcccacttagagaagctgaggaacgaaaggaaaagagttgagatgcgaagggcgtttaaagaaaacctggagacttctcctttcataactcccggaaagccttgggaagaggcccgtagttttattatgaatgaggatttctaccagtggctggaggaatctgtatacatggatatttatggcaaacaccaaaagcaaattatagataaagcaaaggaagaatttcaggagttgcttttggaatattcagaattgttttatgaactggagctggatgctaagcccagcaaggagaagatgggtgttattcaggatgttctgggagaggaacagcgatttaaagccatttacaaaagctccaagcagagcgttgatgcccttattctgaaacacattcattttgtgtaccacccaacaaaggagacatgccccagctgcccagcttgtgtggacgctaagattgagcacttgattagttctcggtttatccggccgtctgaccggaatcagaaaaattcactctctgaccctaacattgatagaatcaacttggttatattgggcaaagacggccttgcccgagagttggccaatggagattcgagctctttgtacaaatgatgacaagtatgtgatagatggtaaaatgtatgagctttccctgaggccaatagaggggaatgtcaggcttcctgtgaactctttccagacgccaacatttcagccccacggctgtctctgcctttacaattcaaaggaatcgctatcctatgtagtggaaagtatagagaagagtagagagtccacgctgggccggcgggataatcatttagtccatctcccccttacattaattttggttaacaagagaggagacaccagtggagagactctgcatagcttaatacagcaaggtcaacaaattgctagcaaacttcagtgtgtctttctcgaccctgcttctgctggcattggttacggacgcaacattaatgaaaagcaaatcagtcaagttttgaagggactcctggactctaagcgtaacttaaacctggtcagttctactgctagcatcaaagatttggctgatgttgatctgcgaattgttatgtgtctgatgtgtggagatccttttagtgcagatgacatactttttcctgtccttcagtcccaaacctgtaaatcttcccattgtggaagcaacaactctgttttacttgaactaccaatcggactgcacaagaagcggattgaactgtctgttctttcataccattcctcctttagcatcagaaagagccggttggttcatgggtacattgttttttattcagccaaacgtaaggcctctttggctatgttacgtgcctttctttgtgaagtgcaggatattatccctattcagcttgtagcactcactgatggcgctgtagatgtcctggacaatgacttaagtagggaacagctaactgagggggaggagattgctcaagaaattgacggaaggttcacaagcatcccctgtagccaaccccagcataaacttgagatctttcacccattttttaaagatgtggtggaaaaaaagaacataatcgaggctactcatatgtacgataatgctgccgaggcctgtagcaccaccgaagaggtgtttaactccccccgggcaggatcaccgctctgcaactcaaacctgcaggattcagaagaagatatcgagccatcttacagcctgtttcgagaagacacatcactgccttctctgtccaaagaccattctaagctctctatggaactggagggaaatgatgggctgtctttcattatgagcaattttgagagtaaactgaacaacaaagtacctccgccagtcaaaccaaagcctcctgtccattttgaaattacaaagggggatctatcttatttagaccaaggccatagggatggacagaggaagtctgtgtcttctagcccctggctgcctcaggatgggtttgatccttctgactatgctgaacccatggatgctgtggtgaagccaaggaatgaagaagaaaacatatactccgtgccccatgacagcacccaaggcaaaatcatcaccattcggaatatcaacaaagcccagtccaacggcagcgggaatggttctgacagtgaaatggacaccagctctctagagcgagggcgcaaggtttccatcgtgagcaagccagtgctgtacaggacgagatgcacccggctggggcggtttgctagttaccggaccagcttcagcgtggggagtgatgatgagctggggcccatccggaagaaagaggaggatcaggcatcccagggttataaaggggacaatgctgtcattccatacgaaacagacgaagacccgcggaggaggaatattcttcgcagcctaaggaggaacactaagaaaccaaagcccaaaccccggccatccatcacaaaggcaacctgggagagtaactattttggggtgcccttaacaactgtcgtgactccagagaagccgatccccatttttattgaaagatgtattgagtacattgaagccacaggactgagcacggaaggcatctaccgggtcagcgggaacaagtctgagatggagagtctgcagagacagtttgatcaagaccacaacctggacctggcagagaaagactttacggtgaataccgtggctggtgccatgaagagctttttctcagaactgcctgaccccctggtcccgtataacatgcagatcgacttggtggaagcacacaaaatcaacgaccgggagcagaagttgcatgcccttaaggaggtattaaagaaatttccaaaggaaaaccacgaagtcttcaagtatgtcatctctcacctaaacaaggtcagccacaacaacaaggtgaatctcatgaccagcgagaacctctccatctgcttctggcccaccttgatgagacctgatttcagcactatggacgccctcacagccacgcgcacctaccagacaatcattgaactctttatccagcagtgccccttcttcttctacaatcggcccatcaccgagccccccggcgccaggcccagctccccctctgccgtggcttccaccgtccccttcctcacttccacgcctgtcacaagtcagccgtcgcccccacagtcgcctccacccaccccccagtccccaatgcagccactgcttccctcccagcttcaagccgaacacacgctgtgagccaccaagacctggggcgacaggagaaccggtcctctctctgacggggtggcatttggccttgaacaaaaccaagtccactggggacagaggcaggggcaagtggctctccccattaccttctcaagacctcagtgggagcaccagccaatggtaccatcggctgggctgccaggtaccctgggcctggcgctgcagacctgagctggcttggacccatttgaggactgaactaggcaggcaatggctccagtgccctccctctgttccctggaccaccaccccacgtagctgctcacaccagcctccgggtgcctccctctgcttgtacagagcccatggtcgggacagtgccctggcctttgccggggaggaggatgctctgagattcagggtggggctggcaacccctgaagagaacacttcctgttggtctgtctcttcccaccttccatctgcacacacccccaaggtaagggtacagcccggctggcggcctccttgggaacgtgtaggccacggctctgccaccactaggtacctgctgagggcgctggctctgcagatcagaacaacggaggatagctttgtgcctggacccagagagtgtgggactccccgcttcatccccaccgtcccactccacagccttcccgaaacattccctggcaaacaaaggaacactaggagaaaaaatggaaaaacccttccagtaattaaaaaggaagaaaccacagaaagaaaactacagacctcaagattccactctgtgcccgcctctgccgggagggagggaggcacacaggtggagctgaccctcgtctttgtggcagcaaaaccaggatgcctggagctgtggcctgagggcctgctggggtcccactcacccacttaggtctagtcgctagatcccccgttttcccaagaagagggttcgagcccttggtggggacagctggggagatggcagtgcaggctggaacctgggctgccccagaacacagtccattacgatagaaacaactaggcaccccccaggcgagagctagtggggtgcagagggccccatgccagacagcccttggggctcgttgcactttaagaaataggatctgtggtgtattccagggggcctgatggacacctttcccgggcgtctgcagctgccctgcccgtgcccgcctgcagtggttggagacgggagtggcccttcggctcccgagctccctctggggacggctggctcactgtctccagttctcaatggccaacgaaggtgcttggaaacacctaaccttgcaagttttaccgccttttgaggaacacaaatcggagaacaaacccagggttcaggcgtgttttctgtgaatgttggatgatgaatttttgtctcttctggtggagctgtgcctggccctgtaggcccagggttggctggaaggtgacatctgtgtttcgttttagctgaggttggcagaaacgttcccaaactcccccagccctggaccccagcagatgaggaaacggccccatttactgaccccgcccccttttcgaggttatgctcacctggtcagctcctcacgtaattgggggtggagggaaagcatggtggtgccctgggccgtccctgtgtgaacgcaggcaaaagcagcccagtccccctcactgcttgagctaacactgccacctcttttgtgtgagcacaaaagccacgtcccaagccacctggcccgattccacagatgtatgtgcggccagtgacttccccaggagtgtggagggggtggtgaggaggagcacctgggctctctacccctctcctcacagaagtacctgaaactaggtctggggcactcccaatgcagcgccttgtcagccaaggtgggcaggcagggactgtggcagcttatgtccaaagggagcccccatgcacaggaagccacagggttcctcttgtttcccccgctaacttcagcctctcatctgctgctccgggctgagggactagaggacatctcggtcgtttgaggggcatggccagtcgtggcaggccggccttcagcgtccggtcagggaagcgtgcagcccaaatgggcacttgcatgggagccacagaggagcgtccctggggattgttgggaccatgctgcccccactcccgcttttgttggggctctaagttctggaaggtgtgtgcacagagggtgctcatgggactcgcatgcagctctcagcactgggtgggagggcgttggcttgtccagaatggggacgtggggcagccacccctgcccagcgagagcgcagacaccgtgtgaggggacagcagcccttggtgcaaagccagagactgatcctggctctgacggctgaagagggaagacccaaggctgggtggcgtggctcgtgaatccacttagaattcttggcttgtgtcgcatactgggtgtcacggcacacatttactctgcattgtccccgtctttcccatcgcctagcgtttggggaggaacagggagagagcttcggggcgtctgtctccgtgctctcctgcctccaccgccttggttttgcttcctgctggaggcagggcacctgctgcgacccagattcttctgcaggatgtgtctgtctttgtcacggtggacagagggtgacatcataggagcagctcgctggccagaaggggatgggggcatccctgtgcctcactcagctcctgctgctcttagggaaaggaggcctgggtcaagccagcatccccttggtaaagacccccgcaggccaccaggcattctggacacacacacacacacacacacacacacacacacaaaacttcacagcaggccagctgcagtgacttgtcatcaagagtcacctcagctgcgcccccctcccatcctttcctatgagaagccactgctttgggggcgccggctagaaaaagtagggtgcggtggccaggagggcccctgccgcgcggggggctgggtctggttgagtcgctgctttcccgagggcagcgcagggatccggggaagctgcggcagggagcgggcgccggcttcgtggctctgaggtgtaacgggggtgggctccctccctcggaggacatcgtctgtgtccaggtcagaaagtggcccaggaagggggcagtttctgtcgcgggtccggtgggggcgcggccgcaa

SEQ ID NO: 366987 - DNA, 8050 bp, Homo sapiens
  misc_feature (34)..(34): n is a, c, g, or t
  misc_feature (53)..(53): n is a, c, g, or t
caaaattgcttatttacatgtttactgttcctcnttttccattagaaacatcntgaatagtaaccagtatataataatcttttataacttttttttttgagacaaagtctcactctatcacccaggttggagtgcagtggtgctcactgcaacctctactggaagaaatgttggctatttggcgatgagaggtggtgaacagtgaccatactggtatacaacactatgggacctggcatttttgctgcatgtccagcccacccccactaataatgtaggaagctgtctggtccattggaaacactaatctgatctcagaagtggctgatcgtggcaggatgtgtcgacgatgatgatggcaagaaagcaagatgtccgaattcccacctacaacatcagtgtggtgggattatctgggaccgagaaggaaaagggccagtgtgggattggaaagtcttgtttgtgcaaccgcttcgtgcgcccgagtgctgacgagtttcacttggaccatacctccgtcctcagcaccagtgactttggagggcgagtggtcaataatgaccactttctctactggggagaagttagccgctccctggaggattgtgtggaatgtaagatgcacattgtggagcagactgaatttattgatgatcagacttttcaacctcatcgaagcacggccctgcagccctatatcaagagagctgctgcgaccaagcttgcatcagctgaaaaactcatgtacttttgcactgaccagctggggctggagcaggactttgagcagaaacaaatgccagacggaaagctgctggttgatggttttcttcttggtattgatgttagcaggggcatgaataggaactttgatgaccagctcaagtttgtctccaatctctacaatcagcttgcaaaaacaaaaaagcccatagtggtggtcctgactaagtgtgacgaaggtgttgagcggtacattagagatgcacatacttttgccttaagcaaaaagaacctccaggttgtggagacctcagcgagatccaatgtaaacgtggacttggctttcagcaccttagtgcaactcattgataaaagtcggggaaagacaaaaatcattccttattttgaagctctcaagcagcagagtcagcagatagctacagcaaaagacaagtatgagtggctggtgagtcgcattgtgaaaaaccacaatgagaactggctgagtgtcagccgaaagatgcaggcctctccagaataccaggactatgtctacctggaagggactcagaaagccaagaagctgtttctacagcacatccaccgcctcaagcatgagcatatcgagcgtaggagaaagctgtacctggcagccctgccattagcttttgaagctcttatacctaatctagatgaaatagaccacctaagctgcataaaagccaaaaagctcttagaaaccaagccagaattcttgaagtggtttgttgtgcttgaagagaccccatgggatgccaccagtcacattgacaacatggaaaacgaacggattccctttgatttaatggataccgtccctgcagagcagctatacgaggcccacttagagaagctgaggaacgaaaggaaaagagttgagatgcgaagggcgtttaaagaaaacctggagacttctcctttcataactcccggaaagccttgggaagaggcccgtagttttattatgaatgaggatttctaccagtggctggaggaatctgtatacatggatatttatggcaaacaccaaaagcaaattatagataaagcaaaggaagaatttcaggagttgcttttggaatattcagaattgttttatgaactggagctggatgctaagcccagcaaggagaagatgggtgttattcaggatgttctgggagaggaacagcgatttaaagccatttacaaaagctccaagcagagcgttgatgcccttattctgaaacacattcattttgtgtaccacccaacaaaggagacatgccccagctgcccagcttgtgtggacgctaagattgagcacttgattagttctcggtttatccggccgtctgaccggaatcagaaaaattcactctctgaccctaacattgatagaatcaacttggttatattgggcaaagacggccttgcccgagagttggccaatggagattcgagctctttgtacaaatgatgacaagtatgtgatagatggtaaaatgtatgagctttccctgaggccaatagaggggaatgtcaggcttcctgtgaactctttccagacgccaacatttcagccccacggctgtctctgcctttacaattcaaaggaatcgctatcctatgtagtggaaagtatagagaagagtagagagtccacgctgggccggcgggataatcatttagtccatctcccccttacattaattttggttaacaagagaggagacaccagtggagagactctgcatagcttaatacagcaaggtcaacaaattgctagcaaacttcagtgtgtctttctcgaccctgcttctgctggcattggttacggacgcaacattaatgaaaagcaaatcagtcaagttttgaagggactcctggactctaagcgtaacttaaacctggtcagttctactgctagcatcaaagatttggctgatgttgatctgcgaattgttatgtgtctgatgtgtggagatccttttagtgcagatgacatactttttcctgtccttcagtcccaaacctgtaaatcttcccattgtggaagcaacaactctgttttacttgaactaccaatcggactgcacaagaagcggattgaactgtctgttctttcataccattcctcctttagcatcagaaagagccggttggttcatgggtacattgttttttattcagccaaacgtaaggcctctttggctatgttacgtgcctttctttgtgaagtgcaggatattatccctattcagcttgtagcactcactgatggcgctgtagatgtcctggacaatgacttaagtagggaacagctaactgagggggaggagattgctcaagaaattgacggaaggttcacaagcatcccctgtagccaaccccagcataaacttgagatctttcacccattttttaaagatgtggtggaaaaaaagaacataatcgaggctactcatatgtacgataatgctgccgaggcctgtagcaccaccgaagaggtgtttaactccccccgggcaggatcaccgctctgcaactcaaacctgcaggattcagaagaagatatcgagccatcttacagcctgtttcgagaagacacatcactgccttctctgtccaaagaccattctaagctctctatggaactggagggaaatgatgggctgtctttcattatgagcaattttgagagtaaactgaacaacaaagtacctccgccagtcaaaccaaagcctcctgtccattttgaaattacaaagggggatctatcttatttagaccaaggccatagggatggacagaggaagtctgtgtcttctagcccctggctgcctcaggatgggtttgatccttctgactatgctgaacccatggatgctgtggtgaagccaaggaatgaagaagaaaacatatactccgtgccccatgacagcacccaaggcaaaatcatcaccattcggaatatcaacaaagcccagtccaacggcagcgggaatggttctgacagtgaaatggacaccagctctctagagcgagggcgcaaggtttccatcgtgagcaagccagtgctgtacaggacgagatgcacccggctggggcggtttgctagttaccggaccagcttcagcgtggggagtgatgatgagctggggcccatccggaagaaagaggaggatcaggcatcccagggttataaaggggacaatgctgtcattccatacgaaacagacgaagacccgcggaggaggaatattcttcgcagcctaaggaggaacactaagaaaccaaagcccaaaccccggccatccatcacaaaggcaacctgggagagtaactattttggggtgcccttaacaactgtcgtgactccagagaagccgatccccatttttattgaaagatgtattgagtacattgaagccacaggactgagcacggaaggcatctaccgggtcagcgggaacaagtctgagatggagagtctgcagagacagtttgatcaagaccacaacctggacctggcagagaaagactttacggtgaataccgtggctggtgccatgaagagctttttctcagaactgcctgaccccctggtcccgtataacatgcagatcgacttggtggaagcacacaaaatcaacgaccgggagcagaagttgcatgcccttaaggaggtattaaagaaatttccaaaggaaaaccacgaagtcttcaagtatgtcatctctcacctaaacaaggtcagccacaacaacaaggtgaatctcatgaccagcgagaacctctccatctgcttctggcccaccttgatgagacctgatttcagcactatggacgccctcacagccacgcgcacctaccagacaatcattgaactctttatccagcagtgccccttcttcttctacaatcggcccatcaccgagccccccggcgccaggcccagctccccctctgccgtggcttccaccgtccccttcctcacttccacgcctgtcacaagtcagccgtcgcccccacagtcgcctccacccaccccccagtccccaatgcagccactgcttccctcccagcttcaagccgaacacacgctgtgagccaccaagacctggggcgacaggagaaccggtcctctctctgacggggtggcatttggccttgaacaaaaccaagtccactggggacagaggcaggggcaagtggctctccccattaccttctcaagacctcagtgggagcaccagccaatggtaccatcggctgggctgccaggtaccctgggcctggcgctgcagacctgagctggcttggacccatttgaggactgaactaggcaggcaatggctccagtgccctccctctgttccctggaccaccaccccacgtagctgctcacaccagcctccgggtgcctccctctgcttgtacagagcccatggtcgggacagtgccctggcctttgccggggaggaggatgctctgagattcagggtggggctggcaacccctgaagagaacacttcctgttggtctgtctcttcccaccttccatctgcacacacccccaaggtaagggtacagcccggctggcggcctccttgggaacgtgtaggccacggctctgccaccactaggtacctgctgagggcgctggctctgcagatcagaacaacggaggatagctttgtgcctggacccagagagtgtgggactccccgcttcatccccaccgtcccactccacagccttcccgaaacattccctggcaaacaaaggaacactaggagaaaaaatggaaaaacccttccagtaattaaaaaggaagaaaccacagaaagaaaactacagacctcaagattccactctgtgcccgcctctgccgggagggagggaggcacacaggtggagctgaccctcgtctttgtggcagcaaaaccaggatgcctggagctgtggcctgagggcctgctggggtcccactcacccacttaggtctagtcgctagatcccccgttttcccaagaagagggttcgagcccttggtggggacagctggggagatggcagtgcaggctggaacctgggctgccccagaacacagtccattacgatagaaacaactaggcaccccccaggcgagagctagtggggtgcagagggccccatgccagacagcccttggggctcgttgcactttaagaaataggatctgtggtgtattccagggggcctgatggacacctttcccgggcgtctgcagctgccctgcccgtgcccgcctgcagtggttggagacgggagtggcccttcggctcccgagctccctctggggacggctggctcactgtctccagttctcaatggccaacgaaggtgcttggaaacacctaaccttgcaagttttaccgccttttgaggaacacaaatcggagaacaaacccagggttcaggcgtgttttctgtgaatgttggatgatgaatttttgtctcttctggtggagctgtgcctggccctgtaggcccagggttggctggaaggtgacatctgtgtttcgttttagctgaggttggcagaaacgttcccaaactcccccagccctggaccccagcagatgaggaaacggccccatttactgaccccgcccccttttcgaggttatgctcacctggtcagctcctcacgtaattgggggtggagggaaagcatggtggtgccctgggccgtccctgtgtgaacgcaggcaaaagcagcccagtccccctcactgcttgagctaacactgccacctcttttgtgtgagcacaaaagccacgtcccaagccacctggcccgattccacagatgtatgtgcggccagtgacttccccaggagtgtggagggggtggtgaggaggagcacctgggctctctacccctctcctcacagaagtacctgaaactaggtctggggcactcccaatgcagcgccttgtcagccaaggtgggcaggcagggactgtggcagcttatgtccaaagggagcccccatgcacaggaagccacagggttcctcttgtttcccccgctaacttcagcctctcatctgctgctccgggctgagggactagaggacatctcggtcgtttgaggggcatggccagtcgtggcaggccggccttcagcgtccggtcagggaagcgtgcagcccaaatgggcacttgcatgggagccacagaggagcgtccctggggattgttgggaccatgctgcccccactcccgcttttgttggggctctaagttctggaaggtgtgtgcacagagggtgctcatgggactcgcatgcagctctcagcactgggtgggagggcgttggcttgtccagaatggggacgtggggcagccacccctgcccagcgagagcgcagacaccgtgtgaggggacagcagcccttggtgcaaagccagagactgatcctggctctgacggctgaagagggaagacccaaggctgggtggcgtggctcgtgaatccacttagaattcttggcttgtgtcgcatactgggtgtcacggcacacatttactctgcattgtccccgtctttcccatcgcctagcgtttggggaggaacagggagagagcttcggggcgtctgtctccgtgctctcctgcctccaccgccttggttttgcttcctgctggaggcagggcacctgctgcgacccagattcttctgcaggatgtgtctgtctttgtcacggtggacagagggtgacatcataggagcagctcgctggccagaaggggatgggggcatccctgtgcctcactcagctcctgctgctcttagggaaaggaggcctgggtcaagccagcatccccttggtaaagacccccgcaggccaccaggcattctggacacacacacacacacacacacacacacacacacaaaacttcacagcaggccagctgcagtgacttgtcatcaagagtcacctcagctgcgcccccctcccatcctttcctatgagaagccactgctttgggggcgccggctagaaaaagtagggtgcggtggccaggagggcccctgccgcgcggggggctgggtctggttgagtcgctgctttcccgagggcagcgcagggatccggggaagctgcggcagggagcgggcgccggcttcgtggctctgaggtgtaacgggggtgggctccctccctcggaggacatcgtctgtgtccaggtcagaaagtggcccaggaagggggcagtttctgtcgcgggtccggtgggggcgcggccgcaa

SEQ ID NO: 366988 - DNA, 6765 bp, Homo sapiens
ctggactaggagcaggggaacatggcgccggggcccccgtcgttgctgccgggattttggaggccggggccgcgctgagggcgccagctggaagaaatgttggctatttggcgatgagaggtggtgaacagtgaccatactggtatacaacactatgggacctggcatttttgctgcatgtccagcccacccccactaataatgtaggaagctgtctggtccattggaaacactaatctgatctcagaagtggctgatcgtggcaggatgtgtcgacgatgatgatggcaagaaagcaagatgtccgaattcccacctacaacatcagtgtggtgggattatctgggaccgagaaggaaaagggccagtgtgggattggaaagtcttgtttgtgcaaccgcttcgtgcgcccgagtgctgacgagtttcacttggaccatacctccgtcctcagcaccagtgactttggagggcgagtggtcaataatgaccactttctctactggggagaagttagccgctccctggaggattgtgtggaatgtaagatgcacattgtggagcagactgaatttattgatgatcagacttttcaacctcatcgaagcacggccctgcagccctatatcaagagagctgctgcgaccaagcttgcatcagctgaaaaactcatgtacttttgcactgaccagctggggctggagcaggactttgagcagaaacaaatgccagacggaaagctgctggttgatggttttcttcttggtattgatgttagcaggggcatgaataggaactttgatgaccagctcaagtttgtctccaatctctacaatcagcttgcaaaaacaaaaaagcccatagtggtggtcctgactaagtgtgacgaaggtgttgagcggtacattagagatgcacatacttttgccttaagcaaaaagaacctccaggttgtggagacctcagcgagatccaatgtaaacgtggacttggctttcagcaccttagtgcaactcattgataaaagtcggggaaagacaaaaatcattccttattttgaagctctcaagcagcagagtcagcagatagctacagcaaaagacaagtatgagtggctggtgagtcgcattgtgaaaaaccacaatgagaactggctgagtgtcagccgaaagatgcaggcctctccagaataccaggactatgtctacctggaagggactcagaaagccaagaagctgtttctacagcacatccaccgcctcaagcatgagcatatcgagcgtaggagaaagctgtacctggcagccctgccattagcttttgaagctcttatacctaatctagatgaaatagaccacctaagctgcataaaagccaaaaagctcttagaaaccaagccagaattcttgaagtggtttgttgtgcttgaagagaccccatgggatgccaccagtcacattgacaacatggaaaacgaacggattccctttgatttaatggataccgtccctgcagagcagctatacgaggcccacttagagaagctgaggaacgaaaggaaaagagttgagatgcgaagggcgtttaaagaaaacctggagacttctcctttcataactcccggaaagccttgggaagaggcccgtagttttattatgaatgaggatttctaccagtggctggaggaatctgtatacatggatatttatggcaaacaccaaaagcaaattatagataaagcaaaggaagaatttcaggagttgcttttggaatattcagaattgttttatgaactggagctggatgctaagcccagcaaggagaagatgggtgttattcaggatgttctgggagaggaacagcgatttaaagccatttacaaaagctccaagcagagcgttgatgcccttattctgaaacacattcattttgtgtaccacccaacaaaggagacatgccccagctgcccagcttgtgtggacgctaagattgagcacttgattagttctcggtttatccggccgtctgaccggaatcagaaaaattcactctctgaccctaacattgatagaatcaacttggttatattgggcaaagacggccttgcccgagagttggccaatggagattcgagctctttgtacaaatgatgacaagtatgtgatagatggtaaaatgtatgagctttccctgaggccaatagaggggaatgtcaggcttcctgtgaactctttccagacgccaacatttcagccccacggctgtctctgcctttacaattcaaaggaatcgctatcctatgtagtggaaagtatagagaagagtagagagtccacgctgggccggcgggataatcatttagtccatctcccccttacattaattttggttaacaagagaggagacaccagtggagagactctgcatagcttaatacagcaaggtcaacaaattgctagcaaacttcagtgtgtctttctcgaccctgcttctgctggcattggttacggacgcaacattaatgaaaagcaaatcagtcaagttttgaagggactcctggactctaagcgtaacttaaacctggtcagttctactgctagcatcaaagatttggctgatgttgatctgcgaattgttatgtgtctgatgtgtggagatccttttagtgcagatgacatactttttcctgtccttcagtcccaaacctgtaaatcttcccattgtggaagcaacaactctgttttacttgaactaccaatcggactgcacaagaagcggattgaactgtctgttctttcataccattcctcctttagcatcagaaagagccggttggttcatgggtacattgttttttattcagccaaacgtaaggcctctttggctatgttacgtgcctttctttgtgaagtgcaggatattatccctattcagcttgtagcactcactgatggcgctgtagatgtcctggacaatgacttaagtagggaacagctaactgagggggaggagattgctcaagaaattgacggaaggttcacaagcatcccctgtagccaaccccagcataaacttgagatctttcacccattttttaaagatgtggtggaaaaaaagaacataatcgaggctactcatatgtacgataatgctgccgaggcctgtagcaccaccgaagaggtgtttaactccccccgggcaggatcaccgctctgcaactcaaacctgcaggattcagaagaagatatcgagccatcttacagcctgtttcgagaagacacatcactgccttctctgtccaaagaccattctaagctctctatggaactggagggaaatgatgggctgtctttcattatgagcaattttgagagtaaactgaacaacaaagtacctccgccagtcaaaccaaagcctcctgtccattttgaaattacaaagggggatctatcttatttagaccaaggccatagggatggacagaggaagtctgtgtcttctagcccctggctgcctcaggatgggtttgatccttctgactatgctgaacccatggatgctgtggtgaagccaaggaatgaagaagaaaacatatactccgtgccccatgacagcacccaaggcaaaatcatcaccattcggaatatcaacaaagcccagtccaacggcagcgggaatggttctgacagtgaaatggacaccagctctctagagcgagggcgcaaggtttccatcgtgagcaagccagtgctgtacaggacgagatgcacccggctggggcggtttgctagttaccggaccagcttcagcgtggggagtgatgatgagctggggcccatccggaagaaagaggaggatcaggcatcccagggttataaaggggacaatgctgtcattccatacgaaacagacgaagacccgcggaggaggaatattcttcgcagcctaaggaggaacactaagaaaccaaagcccaaaccccggccatccatcacaaaggcaacctgggagagtaactattttggggtgcccttaacaactgtcgtgactccagagaagccgatccccatttttattgaaagatgtattgagtacattgaagccacaggactgagcacggaaggcatctaccgggtcagcgggaacaagtctgagatggagagtctgcagagacagtttgatcaagaccacaacctggacctggcagagaaagactttacggtgaataccgtggctggtgccatgaagagctttttctcagaactgcctgaccccctggtcccgtataacatgcagatcgacttggtggaagcacacaaaatcaacgaccgggagcagaagttgcatgcccttaaggaggtattaaagaaatttccaaaggaaaaccacgaagtcttcaagtatgtcatctctcacctaaacaaggtcagccacaacaacaaggtgaatctcatgaccagcgagaacctctccatctgcttctggcccaccttgatgagacctgatttcagcactatggacgccctcacagccacgcgcacctaccagacaatcattgaactctttatccagcagtgccccttcttcttctacaatcggcccatcaccgagccccccggcgccaggcccagctccccctctgccgtggcttccaccgtccccttcctcacttccacgcctgtcacaagtcagccgtcgcccccacagtcgcctccacccaccccccagtccccaatgcagccactgctccccgcttcatccccaccgtcccactccacagccttcccgaaacattccctggcaaacaaaggaacactaggagaaaaaatggaaaaacccttccagtaattaaaaaggaagaaaccacagaaagaaaactacagacctcaagattccactctgtgcccgcctctgccgggagggagggaggcacacaggtggagctgaccctcgtctttgtggcagcaaaaccaggatgcctggagctgtggcctgagggcctgctggggtcccactcacccacttaggtctagtcgctagatcccccgttttcccaagaagagggttcgagcccttggtggggacagctggggagatggcagtgcaggctggaacctgggctgccccagaacacagtccattacgatagaaacaactaggcaccccccaggcgagagctagtggggtgcagagggccccatgccagacagcccttggggctcgttgcactttaagaaataggatctgtggtgtattccagggggcctgatggacacctttcccgggcgtctgcagctgccctgcccgtgcccgcctgcagtggttggagacgggagtggcccttcggctcccgagctccctctggggacggctggctcactgtctccagttctcaatggccaacgaaggtgcttggaaacacctaaccttgcaagttttaccgccttttgaggaacacaaatcggagaacaaacccagggttcaggcgtgttttctgtgaatgttggatgatgaatttttgtctcttctggtggagctgtgcctggccctgtaggcccagggttggctggaaggtgacatctgtgtttcgttttagctgaggttggcagaaacgttcccaaactcccccagccctggaccccagcagatgaggaaacggccccatttactgaccccgcccccttttcgaggttatgctcacctggtcagctcctcacgtaattgggggtggagggaaagcatggtggtgccctgggccgtccctgtgtgaacgcaggcaaaagcagcccagtccccctcactgcttgagctaacactgccacctcttttgtgtgagcacaaaagccacgtcccaagccacctggcccgattccacagatgtatgtgcggccagtgacttccccaggagtgtggagggggtggtgaggaggagcacctgggctctctacccctctcctcacagaagtacctgaaactaggtctggggcactcccaatgcagcgccttgtcagccaaggtgggcaggcagggactgtggcagcttatgtccaaagggagcccccatgcacaggaagccacagggttcctcttgtttcccccgctaacttcagcctctcatctgctgctccgggctgagggactagaggacatctcggtcgtttgaggggcatggccagtcgtggcaggccggccttcagcgtccggtcagggaagcgtgcagcccaaatgggcacttgcatgggagccacagaggagcgtccctggggattgttgggaccatgctgcccccactcccgcttttgttggggctctaagttctggaaggtgtgtgcacagagggtgctcatgggactcgcatgcagctctcagcactgggtgggagggcgttggcttgtccagaatggggacgtggggcagccacccctgcccagcgagagcgcagacaccgtgtgaggggacagcagcccttggtgcaaagccagagactgatcctggctctgacggctgaagagggaagacccaaggctgggtggcgtggctcgtgaatccacttagaattcttggcttgtgtcgcactttaagaaataggatctgtggtgtattccaggggggcctgatggacacctttcccggggcgtcttgcagttgccctgcccgtgcccgcctgcagtggttggagacgggagtggccttcggtcccgagctccctctggggacggtgggtcactgtctccagttctcaatgggcaacgaagggtgttggga

SEQ ID NO: 366989 - DNA, 7955 bp, Homo sapiens
ctggactaggagcaggggaacatggcgccggggcccccgtcgttgctgccgggattttggaggccggggccgcgctgagggcgccagctggaagaaatgttggctatttggcgatgagaggtggtgaacagtgaccatactggtatacaacactatgggacctggcatttttgctgcatgtccagcccacccccactaataatgtaggaagctgtctggtccattggaaacactaatctgatctcagaagtggctgatcgtggcaggatgtgtcgacgatgatgatggcaagaaagcaagatgtccgaattcccacctacaacatcagtgtggtgggattatctgggaccgagaaggaaaagggccagtgtgggattggaaagtcttgtttgtgcaaccgcttcgtgcgcccgagtgctgacgagtttcacttggaccatacctccgtcctcagcaccagtgactttggagggcgagtggtcaataatgaccactttctctactggggagaagttagccgctccctggaggattgtgtggaatgtaagatgcacattgtggagcagactgaatttattgatgatcagacttttcaacctcatcgaagcacggccctgcagccctatatcaagagagctgctgcgaccaagcttgcatcagctgaaaaactcatgtacttttgcactgaccagctggggctggagcaggactttgagcagaaacaaatgccagacggaaagctgctggttgatggttttcttcttggtattgatgttagcaggggcatgaataggaactttgatgaccagctcaagtttgtctccaatctctacaatcagcttgcaaaaacaaaaaagcccatagtggtggtcctgactaagtgtgacgaaggtgttgagcggtacattagagatgcacatacttttgccttaagcaaaaagaacctccaggttgtggagacctcagcgagatccaatgtaaacgtggacttggctttcagcaccttagtgcaactcattgataaaagtcggggaaagacaaaaatcattccttattttgaagctctcaagcagcagagtcagcagatagctacagcaaaagacaagtatgagtggctggtgagtcgcattgtgaaaaaccacaatgagaactggctgagtgtcagccgaaagatgcaggcctctccagaataccaggactatgtctacctggaagggactcagaaagccaagaagctgtttctacagcacatccaccgcctcaagcatgagcatatcgagcgtaggagaaagctgtacctggcagccctgccattagcttttgaagctcttatacctaatctagatgaaatagaccacctaagctgcataaaagccaaaaagctcttagaaaccaagccagaattcttgaagtggtttgttgtgcttgaagagaccccatgggatgccaccagtcacattgacaacatggaaaacgaacggattccctttgatttaatggataccgtccctgcagagcagctatacgaggcccacttagagaagctgaggaacgaaaggaaaagagttgagatgcgaagggcgtttaaagaaaacctggagacttctcctttcataactcccggaaagccttgggaagaggcccgtagttttattatgaatgaggatttctaccagtggctggaggaatctgtatacatggatatttatggcaaacaccaaaagcaaattatagataaagcaaaggaagaatttcaggagttgcttttggaatattcagaattgttttatgaactggagctggatgctaagcccagcaaggagaagatgggtgttattcaggatgttctgggagaggaacagcgatttaaagccatttacaaaagctccaagcagagcgttgatgcccttattctgaaacacattcattttgtgtaccacccaacaaaggagacatgccccagctgcccagcttgtgtggacgctaagattgagcacttgattagttctcggtttatccggccgtctgaccggaatcagaaaaattcactctctgaccctaacattgatagaatcaacttggttatattgggcaaagacggccttgcccgagagttggccaatggagattcgagctctttgtacaaatgatgacaagtatgtgatagatggtaaaatgtatgagctttccctgaggccaatagaggggaatgtcaggcttcctgtgaactctttccagacgccaacatttcagccccacggctgtctctgcctttacaattcaaaggaatcgctatcctatgtagtggaaagtatagagaagagtagagagtccacgctgggccggcgggataatcatttagtccatctcccccttacattaattttggttaacaagagaggagacaccagtggagagactctgcatagcttaatacagcaaggtcaacaaattgctagcaaacttcagtgtgtctttctcgaccctgcttctgctggcattggttacggacgcaacattaatgaaaagcaaatcagtcaagttttgaagggactcctggactctaagcgtaacttaaacctggtcagttctactgctagcatcaaagatttggctgatgttgatctgcgaattgttatgtgtctgatgtgtggagatccttttagtgcagatgacatactttttcctgtccttcagtcccaaacctgtaaatcttcccattgtggaagcaacaactctgttttacttgaactaccaatcggactgcacaagaagcggattgaactgtctgttctttcataccattcctcctttagcatcagaaagagccggttggttcatgggtacattgcctctttggctatgttacgtgcctttctttgtgaagtgcaggatattatccctattcagcttgtagcactcactgatggcgctgtagatgtcctggacaatgacttaagtagggaacagctaactgagggggaggagattgctcaagaaattgacggaaggttcacaagcatcccctgtagccaaccccagcataaacttgagatctttcacccattttttaaagatgtggtggaaaaaaagaacataatcgaggctactcatatgtacgataatgctgccgaggcctgtagcaccaccgaagaggtgtttaactccccccgggcaggatcaccgctctgcaactcaaacctgcaggattcagaagaagatatcgagccatcttacagcctgtttcgagaagacacatcactgccttctctgtccaaagaccattctaagctctctatggaactggagggaaatgatgggctgtctttcattatgagcaattttgagagtaaactgaacaacaaagtacctccgccagtcaaaccaaagcctcctgtccattttgaaattacaaagggggatctatcttatttagaccaaggccatagggatggacagaggaagtctgtgtcttctagcccctggctgcctcaggatgggtttgatccttctgactatgctgaacccatggatgctgtggtgaagccaaggaatgaagaagaaaacatatactccgtgccccatgacagcacccaaggcaaaatcatcaccattcggaatatcaacaaagcccagtccaacggcagcgggaatggttctgacagtgaaatggacaccagctctctagagcgagggcgcaaggtttccatcgtgagcaagccagtgctgtacaggacgagatgcacccggctggggcggtttgctagttaccggaccagcttcagcgtggggagtgatgatgagctggggcccatccggaagaaagaggaggatcaggcatcccagggttataaaggggacaatgctgtcattccatacgaaacagacgaagacccgcggaggaggaatattcttcgcagcctaaggaggaacactaagaaaccaaagcccaaaccccggccatccatcacaaaggcaacctgggagagtaactattttggggtgcccttaacaactgtcgtgactccagagaagccgatccccatttttattgaaagatgtattgagtacattgaagccacaggactgagcacggaaggcatctaccgggtcagcgggaacaagtctgagatggagagtctgcagagacagtttgatcaagaccacaacctggacctggcagagaaagactttacggtgaataccgtggctggtgccatgaagagctttttctcagaactgcctgaccccctggtcccgtataacatgcagatcgacttggtggaagcacacaaaatcaacgaccgggagcagaagttgcatgcccttaaggaggtattaaagaaatttccaaaggaaaaccacgaagtcttcaagtatgtcatctctcacctaaacaaggtcagccacaacaacaaggtgaatctcatgaccagcgagaacctctccatctgcttctggcccaccttgatgagacctgatttcagcactatggacgccctcacagccacgcgcacctaccagacaatcattgaactctttatccagcagtgccccttcttcttctacaatcggcccatcaccgagccccccggcgccaggcccagctccccctctgccgtggcttccaccgtccccttcctcacttccacgcctgtcacaagtcagccgtcgcccccacagtcgcctccacccaccccccagtccccaatgcagccactgcttccctcccagcttcaagccgaacacacgctgtgagccaccaagacctggggcgacaggagaaccggtcctctctctgacggggtggcatttggccttgaacaaaaccaagtccactggggacagaggcaggggcaagtggctctccccattaccttctcaagacctcagtgggagcaccagccaatggtaccatcggctgggctgccaggtaccctgggcctggcgctgcagacctgagctggcttggacccatttgaggactgaactaggcaggcaatggctccagtgccctccctctgttccctggaccaccaccccacgtagctgctcacaccagcctccgggtgcctccctctgcttgtacagagcccatggtcgggacagtgccctggcctttgccggggaggaggatgctctgagattcagggtggggctggcaacccctgaagagaacacttcctgttggtctgtctcttcccaccttccatctgcacacacccccaaggtaagggtacagcccggctggcggcctccttgggaacgtgtaggccacggctctgccaccactaggtacctgctgagggcgctggctctgcagatcagaacaacggaggatagctttgtgcctggacccagagagtgtgggactccccgcttcatccccaccgtcccactccacagccttcccgaaacattccctggcaaacaaaggaacactaggagaaaaaatggaaaaacccttccagtaattaaaaaggaagaaaccacagaaagaaaactacagacctcaagattccactctgtgcccgcctctgccgggagggagggaggcacacaggtggagctgaccctcgtctttgtggcagcaaaaccaggatgcctggagctgtggcctgagggcctgctggggtcccactcacccacttaggtctagtcgctagatcccccgttttcccaagaagagggttcgagcccttggtggggacagctggggagatggcagtgcaggctggaacctgggctgccccagaacacagtccattacgatagaaacaactaggcaccccccaggcgagagctagtggggtgcagagggccccatgccagacagcccttggggctcgttgcactttaagaaataggatctgtggtgtattccagggggcctgatggacacctttcccgggcgtctgcagctgccctgcccgtgcccgcctgcagtggttggagacgggagtggcccttcggctcccgagctccctctggggacggctggctcactgtctccagttctcaatggccaacgaaggtgcttggaaacacctaaccttgcaagttttaccgccttttgaggaacacaaatcggagaacaaacccagggttcaggcgtgttttctgtgaatgttggatgatgaatttttgtctcttctggtggagctgtgcctggccctgtaggcccagggttggctggaaggtgacatctgtgtttcgttttagctgaggttggcagaaacgttcccaaactcccccagccctggaccccagcagatgaggaaacggccccatttactgaccccgcccccttttcgaggttatgctcacctggtcagctcctcacgtaattgggggtggagggaaagcatggtggtgccctgggccgtccctgtgtgaacgcaggcaaaagcagcccagtccccctcactgcttgagctaacactgccacctcttttgtgtgagcacaaaagccacgtcccaagccacctggcccgattccacagatgtatgtgcggccagtgacttccccaggagtgtggagggggtggtgaggaggagcacctgggctctctacccctctcctcacagaagtacctgaaactaggtctggggcactcccaatgcagcgccttgtcagccaaggtgggcaggcagggactgtggcagcttatgtccaaagggagcccccatgcacaggaagccacagggttcctcttgtttcccccgctaacttcagcctctcatctgctgctccgggctgagggactagaggacatctcggtcgtttgaggggcatggccagtcgtggcaggccggccttcagcgtccggtcagggaagcgtgcagcccaaatgggcacttgcatgggagccacagaggagcgtccctggggattgttgggaccatgctgcccccactcccgcttttgttggggctctaagttctggaaggtgtgtgcacagagggtgctcatgggactcgcatgcagctctcagcactgggtgggagggcgttggcttgtccagaatggggacgtggggcagccacccctgcccagcgagagcgcagacaccgtgtgaggggacagcagcccttggtgcaaagccagagactgatcctggctctgacggctgaagagggaagacccaaggctgggtggcgtggctcgtgaatccacttagaattcttggcttgtgtcgcatactgggtgtcacggcacacatttactctgcattgtccccgtctttcccatcgcctagcgtttggggaggaacagggagagagcttcggggcgtctgtctccgtgctctcctgcctccaccgccttggttttgcttcctgctggaggcagggcacctgctgcgacccagattcttctgcaggatgtgtctgtctttgtcacggtggacagagggtgacatcataggagcagctcgctggccagaaggggatgggggcatccctgtgcctcactcagctcctgctgctcttagggaaaggaggcctgggtcaagccagcatccccttggtaaagacccccgcaggccaccaggcattctggacacacacacacacacacacacacacacacacacaaaacttcacagcaggccagctgcagtgacttgtcatcaagagtcacctcagctgcgcccccctcccatcctttcctatgagaagccactgctttgggggcgccggctagaaaaagtagggtgcggtggccaggagggcccctgccgcgcggggggctgggtctggttgagtcgctgctttcccgagggcagcgcagggatccggggaagctgcggcagggagcgggcgccggcttcgtggctctgaggtgtaacgggggtgggctccctccctcggaggacatcgtctgtgtccaggtcagaaagtggcccaggaagggggcagtttctgtcgcgggtccggtgggggcgcggccgcaa

SEQ ID NO: 366990 - DNA, 5088 bp, Homo sapiens
ctggactaggagcaggggaacatggcgccggggcccccgtcgttgctgccgggattttggaggccggggccgcgctgagggcgccagctggaagaaatgttggctatttggcgatgagaggtggtgaacagtgaccatactggtatacaacactatgggacctggcatttttgctgcatgtccagcccacccccactaataatgtaggaagctgtctggtccattggaaacactaatctgatctcagaagtggctgatcgtggcaggatgtgtcgacgatgatgatggcaagaaagcaagatgtccgaattcccacctacaacatcagtgtggtgggattatctgggaccgagaaggaaaagggccagtgtgggattggaaagtcttgtttgtgcaaccgcttcgtgcgcccgagtgctgacgagtttcacttggaccatacctccgtcctcagcaccagtgactttggagggcgagtggtcaataatgaccactttctctactggggagaagttagccgctccctggaggattgtgtggaatgtaagatgcacattgtggagcagactgaatttattgatgatcagacttttcaacctcatcgaagcacggccctgcagccctatatcaagagagctgctgcgaccaagcttgcatcagctgaaaaactcatgtacttttgcactgaccagctggggctggagcaggactttgagcagaaacaaatgccagacggaaagctgctggttgatggttttcttcttggtattgatgttagcaggggcatgaataggaactttgatgaccagctcaagtttgtctccaatctctacaatcagcttgcaaaaacaaaaaagcccatagtggtggtcctgactaagtgtgacgaaggtgttgagcggtacattagagatgcacatacttttgccttaagcaaaaagaacctccaggttgtggagacctcagcgagatccaatgtaaacgtggacttggctttcagcaccttagtgcaactcattgataaaagtcggggaaagacaaaaatcattccttattttgaagctctcaagcagcagagtcagcagatagctacagcaaaagacaagtatgagtggctggtgagtcgcattgtgaaaaaccacaatgagaactggctgagtgtcagccgaaagatgcaggcctctccagaataccaggactatgtctacctggaagggactcagaaagccaagaagctgtttctacagcacatccaccgcctcaagcatgagcatatcgagcgtaggagaaagctgtacctggcagccctgccattagcttttgaagctcttatacctaatctagatgaaatagaccacctaagctgcataaaagccaaaaagctcttagaaaccaagccagaattcttgaagtggtttgttgtgcttgaagagaccccatgggatgccaccagtcacattgacaacatggaaaacgaacggattccctttgatttaatggataccgtccctgcagagcagctatacgaggcccacttagagaagctgaggaacgaaaggaaaagagttgagatgcgaagggcgtttaaagaaaacctggagacttctcctttcataactcccggaaagccttgggaagaggcccgtagttttattatgaatgaggatttctaccagtggctggaggaatctgtatacatggatatttatggcaaacaccaaaagcaaattatagataaagcaaaggaagaatttcaggagttgcttttggaatattcagaattgttttatgaactggagctggatgctaagcccagcaaggagaagatgggtgttattcaggatgttctgggagaggaacagcgatttaaagccatttacaaaagctccaagcagagcgttgatgcccttattctgaaacacattcattttgtgtaccacccaacaaaggagacatgccccagctgcccagcttgtgtggacgctaagattgagcacttgattagttctcggtttatccggccgtctgaccggaatcagaaaaattcactctctgaccctaacattgatagaatcaacttggttatattgggcaaagacggccttgcccgagagttggccaatggagattcgagctctttgtacaaatgatgacaagtatgtgatagatggtaaaatgtatgagctttccctgaggccaatagaggggaatgtcaggcttcctgtgaactctttccagacgccaacatttcagccccacggctgtctctgcctttacaattcaaaggaatcgctatcctatgtagtggaaagtatagagaagagtagagagtccacgctgggccggcgggataatcatttagtccatctcccccttacattaattttggttaacaagagaggagacaccagtggagagactctgcatagcttaatacagcaaggtcaacaaattgctagcaaacttcagtgtgtctttctcgaccctgcttctgctggcattggttacggacgcaacattaatgaaaagcaaatcagtcaagttttgaagggactcctggactctaagcgtaacttaaacctggtcagttctactgctagcatcaaagatttggctgatgttgatctgcgaattgttatgtgtctgatgtgtggagatccttttagtgcagatgacatactttttcctgtccttcagtcccaaacctgtaaatcttcccattgtggaagcaacaactctgttttacttgaactaccaatcggactgcacaagaagcggattgaactgtctgttctttcataccattcctcctttagcatcagaaagagccggttggttcatgggtacattgttttttattcagccaaacgtaaggcctctttggctatgttacgtgcctttctttgtgaagtgcaggatattatccctattcagcttgtagcactcactgatggcgctgtagatgtcctggacaatgacttaagtagggaacagctaactgagggggaggagattgctcaagaaattgacggaaggttcacaagcatcccctgtagccaaccccagcataaacttgagatctttcacccattttttaaagatgtggtggaaaaaaagaacataatcgaggctactcatatgtacgataatgctgccgaggcctgtagcaccaccgaagaggtgtttaactccccccgggcaggatcaccgctctgcaactcaaacctgcaggattcagaagaagatatcgagccatcttacagcctgtttcgagaagacacatcactgccttctctgtccaaagaccattctaagctctctatggaactggagggaaatgatgggctgtctttcattatgagcaattttgagagtaaactgaacaacaaagtacctccgccagtcaaaccaaagcctcctgtccattttgaaattacaaagggggatctatcttatttagaccaaggccatagggatggacagaggaagtctgtgtcttctagcccctggctgcctcaggatgggtttgatccttctgactatgctgaacccatggatgctgtggtgaagccaaggaatgaagaagaaaacatatactccgtgccccatgacagcacccaaggcaaaatcatcaccattcggaatatcaacaaagcccagtccaacggcagcgggaatggttctgacagtgaaatggacaccagctctctagagcgagggcgcaaggtttccatcgtgagcaagccagtgctgtacaggacgagatgcacccggctggggcggtttgctagttaccggaccagcttcagcgtggggagtgatgatgagctggggcccatccggaagaaagaggaggatcaggcatcccagggttataaaggggacaatgctgtcattccatacgaaacagacgaagacccgcggaggaggaatattcttcgcagcctaaggaggaacactaagaaaccaaagcccaaaccccggccatccatcacaaaggcaacctgggagagtaactattttggggtgcccttaacaactgtcgtgactccagagaagccgatccccatttttattgaaagatgtattgagtacattgaagccacaggactgagcacggaaggcatctaccgggtcagcgggaacaagtctgagatggagagtctgcagagacagtttgatcaagaccacaacctggacctggcagagaaagactttacggtgaataccgtggctggtgccatgaagagctttttctcagaactgcctgaccccctggtcccgtataacatgcagatcgacttggtggaagcacacaaaatcaacgaccgggagcagaagttgcatgcccttaaggaggtattaaagaaatttccaaaggaaaaccacgaagtcttcaagtatgtcatctctcacctaaacaaggtcagccacaacaacaaggtgaatctcatgaccagcgagaacctctccatctgcttctggcccaccttgatgagacctgatttcagcactatggacgccctcacagccacgcgcacctaccagacaatcattgaactctttatccagcagtgccccttcttcttctacaatcggcccatcaccgagccccccggcgccaggcccagctccccctctgccgtggcttccaccgtccccttcctcacttccacgcctgtcacaagtcagccgtcgcccccacagtcgcctccacccaccccccagtccccaatgcagccactgcttccctcccagcttcaagccgaacacacgctgtgagccaccaagacctggggcgacaggagaaccggtcctctctctgacggggtggcatttggccttgaacaaaaccaagtccactggggacagaggcaggggcaagtggctctccccattaccttctcaagacctcagtgggagcaccagccaatggtaccatcggctgggctgccaggtaccctgggcctggcgctgcagacctgagctggcttggacccatttgaggactgaactaggcaggcaatggctccagtgccctccctctgttccctattttacaccaacccctgttcggttgagcggaga

SEQ ID NO: 366991 - DNA, 4921 bp, Homo sapiens
ctggactaggagcaggggaacatggcgccggggcccccgtcgttgctgccgggattttggaggccggggccgcgctgagggcgccagctggaagaaatgttggctatttggcgatgagaggtggtgaacagtgaccatactggtatacaacactatgggacctggcatttttgctgcatgtccagcccacccccactaataatgtaggaagctgtctggtccattggaaacactaatctgatctcagaagtggctgatcgtggcaggatgtgtcgacgatgatgatggcaagaaagcaagatgtccgaattcccacctacaacatcagtgtggtgggattatctgggaccgagaaggaaaagggccagtgtgggattggaaagtcttgtttgtgcaaccgcttcgtgcgcccgagtgctgacgagtttcacttggaccatacctccgtcctcagcaccagtgactttggagggcgagtggtcaataatgaccactttctctactggggagaagttagccgctccctggaggattgtgtggaatgtaagatgcacattgtggagcagactgaatttattgatgatcagacttttcaacctcatcgaagcacggccctgcagccctatatcaagagagctgctgcgaccaagcttgcatcagctgaaaaactcatgtacttttgcactgaccagctggggctggagcaggactttgagcagaaacaaatgccagacggaaagctgctggttgatggttttcttcttggtattgatgttagcaggggcatgaataggaactttgatgaccagctcaagtttgtctccaatctctacaatcagcttgcaaaaacaaaaaagcccatagtggtggtcctgactaagtgtgacgaaggtgttgagcggtacattagagatgcacatacttttgccttaagcaaaaagaacctccaggttgtggagacctcagcgagatccaatgtaaacgtggacttggctttcagcaccttagtgcaactcattgataaaagtcggggaaagacaaaaatcattccttattttgaagctctcaagcagcagagtcagcagatagctacagcaaaagacaagtatgagtggctggtgagtcgcattgtgaaaaaccacaatgagaactggctgagtgtcagccgaaagatgcaggcctctccagaataccaggactatgtctacctggaagggactcagaaagccaagaagctgtttctacagcacatccaccgcctcaagcatgagcatatcgagcgtaggagaaagctgtacctggcagccctgccattagcttttgaagctcttatacctaatctagatgaaatagaccacctaagctgcataaaagccaaaaagctcttagaaaccaagccagaattcttgaagtggtttgttgtgcttgaagagaccccatgggatgccaccagtcacattgacaacatggaaaacgaacggattccctttgatttaatggataccgtccctgcagagcagctatacgaggcccacttagagaagctgaggaacgaaaggaaaagagttgagatgcgaagggcgtttaaagaaaacctggagacttctcctttcataactcccggaaagccttgggaagaggcccgtagttttattatgaatgaggatttctaccagtggctggaggaatctgtatacatggatatttatggcaaacaccaaaagcaaattatagataaagcaaaggaagaatttcaggagttgcttttggaatattcagaattgttttatgaactggagctggatgctaagcccagcaaggagaagatgggtgttattcaggatgttctgggagaggaacagcgatttaaagccatttacaaaagctccaagcagagcgttgatgcccttattctgaaacacattcattttgtgtaccacccaacaaaggagacatgccccagctgcccagcttgtgtggacgctaagattgagcacttgattagttctcggtttatccggccgtctgaccggaatcagaaaaattcactctctgaccctaacattgatagaatcaacttggttatattgggcaaagacggccttgcccgagagttggccaatggagattcgagctctttgtacaaatgatgacaagtatgtgatagatggtaaaatgtatgagctttccctgaggccaatagaggggaatgtcaggcttcctgtgaactctttccagacgccaacatttcagccccacggctgtctctgcctttacaattcaaaggaatcgctatcctatgtagtggaaagtatagagaagagtagagagtccacgctgggccggcgggataatcatttagtccatctcccccttacattaattttggttaacaagagaggagacaccagtggagagactctgcatagcttaatacagcaaggtcaacaaattgctagcaaacttcagtgtgtctttctcgaccctgcttctgctggcattggttacggacgcaacattaatgaaaagcaaatcagtcaagttttgaagggactcctggactctaagcgtaacttaaacctggtcagttctactgctagcatcaaagatttggctgatgttgatctgcgaattgttatgtgtctgatgtgtggagatccttttagtgcagatgacatactttttcctgtccttcagtcccaaacctgtaaatcttcccattgtggaagcaacaactctgttttacttgaactaccaatcggactgcacaagaagcggattgaactgtctgttctttcataccattcctcctttagcatcagaaagagccggttggttcatgggtacattgttttttattcagccaaacgtaaggcctctttggctatgttacgtgcctttctttgtgaagtgcaggatattatccctattcagcttgtagcactcactgatggcgctgtagatgtcctggacaatgacttaagtagggaacagctaactgagggggaggagattgctcaagaaattgacggaaggttcacaagcatcccctgtagccaaccccagcataaacttgagatctttcacccattttttaaagatgtggtggaaaaaaagaacataatcgaggctactcatatgtacgataatgctgccgaggcctgtagcaccaccgaagaggtgtttaactccccccgggcaggatcaccgctctgcaactcaaacctgcaggattcagaagaagatatcgagccatcttacagcctgtttcgagaagacacatcactgccttctctgtccaaagaccattctaagctctctatggaactggagggaaatgatgggctgtctttcattatgagcaattttgagagtaaactgaacaacaaagtacctccgccagtcaaaccaaagcctcctgtccattttgaaattacaaagggggatctatcttatttagaccaaggccatagggatggacagaggaagtctgtgtcttctagcccctggctgcctcaggatgggtttgatccttctgactatgctgaacccatggatgctgtggtgaagccaaggaatgaagaagaaaacatatactccgtgccccatgacagcacccaaggcaaaatcatcaccattcggaatatcaacaaagcccagtccaacggcagcgggaatggttctgacagtgaaatggacaccagctctctagagcgagggcgcaaggtttccatcgtgagcaagccagtgctgtacaggacgagatgcacccggctggggcggtttgctagttaccggaccagcttcagcgtggggagtgatgatgagctggggcccatccggaagaaagaggaggatcaggcatcccagggttataaaggggacaatgctgtcattccatacgaaacagacgaagacccgcggaggaggaatattcttcgcagcctaaggaggaacactaagaaaccaaagcccaaaccccggccatccatcacaaaggcaacctgggagagtaactattttggggtgcccttaacaactgtcgtgactccagagaagccgatccccatttttattgaaagatgtattgagtacattgaagccacaggactgagcacggaaggcatctaccgggtcagcgggaacaagtctgagatggagagtctgcagagacagtttgatcaagaccacaacctggacctggcagagaaagactttacggtgaataccgtggctggtgccatgaagagctttttctcagaactgcctgaccccctggtcccgtataacatgcagatcgacttggtggaagcacacaaaatcaacgaccgggagcagaagttgcatgcccttaaggaggtattaaagaaatttccaaaggaaaaccacgaagtcttcaagtatgtcatctctcacctaaacaaggtcagccacaacaacaaggtgaatctcatgaccagcgagaacctctccatctgcttctggcccaccttgatgagacctgatttcagcactatggacgccctcacagccacgcgcacctaccagacaatcattgaactctttatccagcagtgccccttcttcttctacaatcggcccatcaccgagccccccggcgccaggcccagctccccctctgccgtggcttccaccgtccccttcctcacttccacgcctgtcacaagtcagccgtcggcccctgccgcgcggggggctgggtctggttgagtcgctgctttcccgagggcagcgcagggatccggggaagctgcggcagggagcgggcgccggcttcgtggctctgaggtgtaacgggggtgggctccctccctcggaggacatcgtctgtgtccaggtcagaaagtggcccaggaagggggcagtttctgtcgcgggtccggtgggggcgcggccgcaa

SEQ ID NO: 366992 - DNA, 4822 bp, Homo sapiens
ctggactaggagcaggggaacatggcgccggggcccccgtcgttgctgccgggattttggaggccggggccgcgctgagggcgccagctggaagaaatgttggctatttggcgatgagaggtggtgaacagtgaccatactggtatacaacactatgggacctggcatttttgctgcatgtccagcccacccccactaataatgtaggaagctgtctggtccattggaaacactaatctgatctcagaagtggctgatcgtggcaggatgtgtcgacgatgatgatggcaagaaagcaagatgtccgaattcccacctacaacatcagtgtggtgggattatctgggaccgagaaggaaaagggccagtgtgggattggaaagtcttgtttgtgcaaccgcttcgtgcgcccgagtgctgacgagtttcacttggaccatacctccgtcctcagcaccagtgactttggagggcgagtggtcaataatgaccactttctctactggggagaagttagccgctccctggaggattgtgtggaatgtaagatgcacattgtggagcagactgaatttattgatgatcagacttttcaacctcatcgaagcacggccctgcagccctatatcaagagagctgctgcgaccaagcttgcatcagctgaaaaactcatgtacttttgcactgaccagctggggctggagcaggactttgagcagaaacaaatgccagacggaaagctgctggttgatggttttcttcttggtattgatgttagcaggggcatgaataggaactttgatgaccagctcaagtttgtctccaatctctacaatcagcttgcaaaaacaaaaaagcccatagtggtggtcctgactaagtgtgacgaaggtgttgagcggtacattagagatgcacatacttttgccttaagcaaaaagaacctccaggttgtggagacctcagcgagatccaatgtaaacgtggacttggctttcagcaccttagtgcaactcattgataaaagtcggggaaagacaaaaatcattccttattttgaagctctcaagcagcagagtcagcagatagctacagcaaaagacaagtatgagtggctggtgagtcgcattgtgaaaaaccacaatgagaactggctgagtgtcagccgaaagatgcaggcctctccagaataccaggactatgtctacctggaagggactcagaaagccaagaagctgtttctacagcacatccaccgcctcaagcatgagcatatcgagcgtaggagaaagctgtacctggcagccctgccattagcttttgaagctcttatacctaatctagatgaaatagaccacctaagctgcataaaagccaaaaagctcttagaaaccaagccagaattcttgaagtggtttgttgtgcttgaagagaccccatgggatgccaccagtcacattgacaacatggaaaacgaacggattccctttgatttaatggataccgtccctgcagagcagctatacgaggcccacttagagaagctgaggaacgaaaggaaaagagttgagatgcgaagggcgtttaaagaaaacctggagacttctcctttcataactcccggaaagccttgggaagaggcccgtagttttattatgaatgaggatttctaccagtggctggaggaatctgtatacatggatatttatggcaaacaccaaaagcaaattatagataaagcaaaggaagaatttcaggagttgcttttggaatattcagaattgttttatgaactggagctggatgctaagcccagcaaggagaagatgggtgttattcaggatgttctgggagaggaacagcgatttaaagccatttacaaaagctccaagcagagcgttgatgcccttattctgaaacacattcattttgtgtaccacccaacaaaggagacatgccccagctgcccagcttgtgtggacgctaagattgagcacttgattagttctcggtttatccggccgtctgaccggaatcagaaaaattcactctctgaccctaacattgatagaatcaacttggttatattgggcaaagacggccttgcccgagagttggccaatggagattcgagctctttgtacaaatgatgacaagtatgtgatagatggtaaaatgtatgagctttccctgaggccaatagaggggaatgtcaggcttcctgtgaactctttccagacgccaacatttcagccccacggctgtctctgcctttacaattcaaaggaatcgctatcctatgtagtggaaagtatagagaagagtagagagtccacgctgggccggcgggataatcatttagtccatctcccccttacattaattttggttaacaagagaggagacaccagtggagagactctgcatagcttaatacagcaaggtcaacaaattgctagcaaacttcagtgtgtctttctcgaccctgcttctgctggcattggttacggacgcaacattaatgaaaagcaaatcagtcaagttttgaagggactcctggactctaagcgtaacttaaacctggtcagttctactgctagcatcaaagatttggctgatgttgatctgcgaattgttatgtgtctgatgtgtggagatccttttagtgcagatgacatactttttcctgtccttcagtcccaaacctgtaaatcttcccattgtggaagcaacaactctgttttacttgaactaccaatcggactgcacaagaagcggattgaactgtctgttctttcataccattcctcctttagcatcagaaagagccggttggttcatgggtacattgttttttattcagccaaacgtaaggcctctttggctatgttacgtgcctttctttgtgaagtgcaggatattatccctattcagcttgtagcactcactgatggcgctgtagatgtcctggacaatgacttaagtagggaacagctaactgagggggaggagattgctcaagaaattgacggaaggttcacaagcatcccctgtagccaaccccagcataaacttgagatctttcacccattttttaaagatgtggtggaaaaaaagaacataatcgaggctactcatatgtacgataatgctgccgaggcctgtagcaccaccgaagaggtgtttaactccccccgggcaggatcaccgctctgcaactcaaacctgcaggattcagaagaagatatcgagccatcttacagcctgtttcgagaagacacatcactgccttctctgtccaaagaccattctaagctctctatggaactggagggaaatgatgggctgtctttcattatgagcaattttgagagtaaactgaacaacaaagtacctccgccagtcaaaccaaagcctcctgtccattttgaaattacaaagggggatctatcttatttagaccaaggccatagggatggacagaggaagtctgtgtcttctagcccctggctgcctcaggatgggtttgatccttctgactatgctgaacccatggatgctgtggtgaagccaaggaatgaagaagaaaacatatactccgtgccccatgacagcacccaaggcaaaatcatcaccattcggaatatcaacaaagcccagtccaacggcagcgggaatggttctgacagtgaaatggacaccagctctctagagcgagggcgcaaggtttccatcgtgagcaagccagtgctgtacaggacgagatgcacccggctggggcggtttgctagttaccggaccagcttcagcgtggggagtgatgatgagctggggcccatccggaagaaagaggaggatcaggcatcccagggttataaaggggacaatgctgtcattccatacgaaacagacgaagacccgcggaggaggaatattcttcgcagcctaaggaggaacactaagaaaccaaagcccaaaccccggccatccatcacaaaggcaacctgggagagtaactattttggggtgcccttaacaactgtcgtgactccagagaagccgatccccatttttattgaaagatgtattgagtacattgaagccacaggactgagcacggaaggcatctaccgggtcagcgggaacaagtctgagatggagagtctgcagagacagtttgatcaagaccacaacctggacctggcagagaaagactttacggtgaataccgtggctggtgccatgaagagctttttctcagaactgcctgaccccctggtcccgtataacatgcagatcgacttggtggaagcacacaaaatcaacgaccgggagcagaagttgcatgcccttaaggaggtattaaagaaatttccaaaggaaaaccacgaagtcttcaagtatgtcatctctcacctaaacaaggtcagccacaacaacaaggtgaatctcatgaccagcgagaacctctccatctgcttctggcccaccttgatgagacctgatttcagcactatggacgccctcacagccacgcgcacctaccagacaatcattgaactctttatccagcagtgcagcgtggccaatgcgcggcgcgcgcgggggacagagcaggaggcggtctgtcacctcggccacctgctgacctgggctggcctcccccagccctcccgtggcggagccggcagcgatgctacaggcctaagttattgtttgcataaaaagaatcatgttccctgtgtacatttaagaaaaaaacaaaaaaacggaaatgtcagaattgtatggaaataaaacttgtttgaaaatttggaatagt

SEQ ID NO: 366993 - DNA, 4589 bp, Homo sapiens
ctggactaggagcaggggaacatggcgccggggcccccgtcgttgctgccgggattttggaggccggggccgcgctgagggcgccagctggaagaaatgttggctatttggcgatgagaggtggtgaacagtgaccatactggtatacaacactatgggacctggcatttttgctgcatgtccagcccacccccactaataatgtaggaagctgtctggtccattggaaacactaatctgatctcagaagtggctgatcgtggcaggatgtgtcgacgatgatgatggcaagaaagcaagatgtccgaattcccacctacaacatcagtgtggtgggattatctgggaccgagaaggaaaagggccagtgtgggattggaaagtcttgtttgtgcaaccgcttcgtgcgcccgagtgctgacgagtttcacttggaccatacctccgtcctcagcaccagtgactttggagggcgagtggtcaataatgaccactttctctactggggagaagttagccgctccctggaggattgtgtggaatgtaagatgcacattgtggagcagactgaatttattgatgatcagacttttcaacctcatcgaagcacggccctgcagccctatatcaagagagctgctgcgaccaagcttgcatcagctgaaaaactcatgtacttttgcactgaccagctggggctggagcaggactttgagcagaaacaaatgccagacggaaagctgctggttgatggttttcttcttggtattgatgttagcaggggcatgaataggaactttgatgaccagctcaagtttgtctccaatctctacaatcagcttgcaaaaacaaaaaagcccatagtggtggtcctgactaagtgtgacgaaggtgttgagcggtacattagagatgcacatacttttgccttaagcaaaaagaacctccaggttgtggagacctcagcgagatccaatgtaaacgtggacttggctttcagcaccttagtgcaactcattgataaaagtcggggaaagacaaaaatcattccttattttgaagctctcaagcagcagagtcagcagatagctacagcaaaagacaagtatgagtggctggtgagtcgcattgtgaaaaaccacaatgagaactggctgagtgtcagccgaaagatgcaggcctctccagaataccaggactatgtctacctggaagggactcagaaagccaagaagctgtttctacagcacatccaccgcctcaagcatgagcatatcgagcgtaggagaaagctgtacctggcagccctgccattagcttttgaagctcttatacctaatctagatgaaatagaccacctaagctgcataaaagccaaaaagctcttagaaaccaagccagaattcttgaagtggtttgttgtgcttgaagagaccccatgggatgccaccagtcacattgacaacatggaaaacgaacggattccctttgatttaatggataccgtccctgcagagcagctatacgaggcccacttagagaagctgaggaacgaaaggaaaagagttgagatgcgaagggcgtttaaagaaaacctggagacttctcctttcataactcccggaaagccttgggaagaggcccgtagttttattatgaatgaggatttctaccagtggctggaggaatctgtatacatggatatttatggcaaacaccaaaagcaaattatagataaagcaaaggaagaatttcaggagttgcttttggaatattcagaattgttttatgaactggagctggatgctaagcccagcaaggagaagatgggtgttattcaggatgttctgggagaggaacagcgatttaaagccatttacaaaagctccaagcagagcgttgatgcccttattctgaaacacattcattttgtgtaccacccaacaaaggagacatgccccagctgcccagcttgtgtggacgctaagattgagcacttgattagttctcggtttatccggccgtctgaccggaatcagaaaaattcactctctgaccctaacattgatagaatcaacttggttatattgggcaaagacggccttgcccgagagttggccaatggagattcgagctctttgtacaaatgatgacaagtatgtgatagatggtaaaatgtatgagctttccctgaggccaatagaggggaatgtcaggcttcctgtgaactctttccagacgccaacatttcagccccacggctgtctctgcctttacaattcaaaggaatcgctatcctatgtagtggaaagtatagagaagagtagagagtccacgctgggccggcgggataatcatttagtccatctcccccttacattaattttggttaacaagagaggagacaccagtggagagactctgcatagcttaatacagcaaggtcaacaaattgctagcaaacttcagtgtgtctttctcgaccctgcttctgctggcattggttacggacgcaacattaatgaaaagcaaatcagtcaagttttgaagggactcctggactctaagcgtaacttaaacctggtcagttctactgctagcatcaaagatttggctgatgttgatctgcgaattgttatgtgtctgatgtgtggagatccttttagtgcagatgacatactttttcctgtccttcagtcccaaacctgtaaatcttcccattgtggaagcaacaactctgttttacttgaactaccaatcggactgcacaagaagcggattgaactgtctgttctttcataccattcctcctttagcatcagaaagagccggttggttcatgggtacattgttttttattcagccaaacgtaaggcctctttggctatgttacgtgcctttctttgtgaagtgcaggatattatccctattcagcttgtagcactcactgatggcgctgtagatgtcctggacaatgacttaagtagggaacagctaactgagggggaggagattgctcaagaaattgacggaaggttcacaagcatcccctgtagccaaccccagcataaacttgagatctttcacccattttttaaagatgtggtggaaaaaaagaacataatcgaggctactcatatgtacgataatgctgccgaggcctgtagcaccaccgaagaggtgtttaactccccccgggcaggatcaccgctctgcaactcaaacctgcaggattcagaagaagatatcgagccatcttacagcctgtttcgagaagacacatcactgccttctctgtccaaagaccattctaagctctctatggaactggagggaaatgatgggctgtctttcattatgagcaattttgagagtaaactgaacaacaaagtacctccgccagtcaaaccaaagcctcctgtccattttgaaattacaaagggggatctatcttatttagaccaaggccatagggatggacagaggaagtctgtgtcttctagcccctggctgcctcaggatgggtttgatccttctgactatgctgaacccatggatgctgtggtgaagccaaggaatgaagaagaaaacatatactccgtgccccatgacagcacccaaggcaaaatcatcaccattcggaatatcaacaaagcccagtccaacggcagcgggaatggttctgacagtgaaatggacaccagctctctagagcgagggcgcaaggtttccatcgtgagcaagccagtgctgtacaggacgagatgcacccggctggggcggtttgctagttaccggaccagcttcagcgtggggagtgatgatgagctggggcccatccggaagaaagaggaggatcaggcatcccagggttataaaggggacaatgctgtcattccatacgaaacagacgaagacccgcggaggaggaatattcttcgcagcctaaggaggaacactaagaaaccaaagcccaaaccccggccatccatcacaaaggcaacctgggagagtaactattttggggtgcccttaacaactgtcgtgactccagagaagccgatccccatttttattgaaagatgtattgagtacattgaagccacaggactgagcacggaaggcatctaccgggtcagcgggaacaagtctgagatggagagtctgcagagacagtttgatcaagaccacaacctggacctggcagagaaagactttacggtgaataccgtggctggtgccatgaagagctttttctcagaactgcctgaccccctggtcccgtataacatgcagatcgacttggtggaagcacacagtgtcaccgaatgaaggaggcactgtccacagccccttttacagacaaggagactcaccctaaggtgtcacttgcccaaggtgacacggttgacgcgagaggccggatttgtaccagggccatctgagtcaggatctggactccagaccaccacaggaccttcctccctgctcagcgtgcccgtcattggcattctgtctgctcttccaagtctcactctcaccagggtgcttgtgcaactcccccaactctgaccctctgggtacgtcac

SEQ ID NO: 366994 - DNA, 866 bp, Homo sapiens
cggggatagcgcggagcacgcagcagcgagcggagcgcgggcggcggcgccgtacctcgggctgcgggagcgcgggcgccctggggtcctcggaatcacaatgaggacctagggcatctgtctgctgacgccccctggcctgcagtgaccatggccccccgcaagaggagccaccatggcctgggcttcctgtgctgcttcgggggcagtgacatccccgaaatcaacctccgggacaaccaccctctgcagttcatggagttctccagccccatcccgaacgcagaggagctcaacatccgctttgcagagctggtggatgaattggatctcactgacaaaaaccgagaggctatgtttgcactgccccctgagaagaaatggcagatctactgcagcaagaagaaggtgccctctctgacccctctggccacatctcagggttcatggcatggggtggctcttgctgccttggcatgctcatgcattcacctgatgtttattacatgccagccctgttctaggtgttggaggaacaacagtgaataaaatagaaaaaggaaattctgctgtcctggagcttacactcaaagaaataggattctctttttcaaaaacgcttaaagcaggacctgctgcatcccaggactggggcttgctgggagacagacaaagaagcagagtctggactctctcgtgcctgctcccaggcatggagggtgggcatcatggaccatacctggagcagctttgctataagaaatcagtttggggggcagggatgtcctcttttggatctttagtctccactctgtcccaggctagggctcacacatctgtccatgttctcctcagcatatcctccc

SEQ ID NO: 366995 - DNA, 307 bp, Homo sapiens
aggaggtggctcttgcggggcgggtaagaggaggattagggaacccacacctcaactgtccacttgacttgttggttgcagaaagagctgggctccactgaagacatctacctggcttcccgcaaggtcaaagagctgtcggtcattgatggccggagggcccaaaactgcatcatccttctttccaagttgaagctttctaacgaggagatccggcaggccatcttgaagatggatgagcaggaggaccttgctaaggacatgctggagcagctcctcaagttcatccagagggtccgaggtgttt

SEQ ID NO: 366996 - DNA, 6611 bp, Homo sapiens
  misc_feature (2458)..(2458): n is a, c, g, or t
ccctgcctgaggctcacagtacaagtcagtcaaattgttcagggcagcagtggtgtctggagacctggtttgagttcctaggttcatacctagcgtccttctgagcctcaagtttcttcatctgtaaaaagagaagatgaaagtttgagataaacctcgaacatgatcacaatgaggacctagggcatctgtctgctgacgccccctggcctgcagtgaccatggccccccgcaagaggagccaccatggcctgggcttcctgtgctgcttcgggggcagtgacatccccgaaatcaacctccgggacaaccaccctctgcagttcatggagttctccagccccatcccgaacgcagaggagctcaacatccgctttgcagagctggtggatgaattggatctcactgacaaaaaccgagaggctatgtttgcactgccccctgagaagaaatggcagatctactgcagcaagaagaaggtgccctctctgacccctctggccacatctcagggttcatggcatggggtggctcttgctgccttggcatgctcatgcattcacctgatgtttattacatgccagccctgttctaggtgttggaggaacaacagtgaataaaatagaaaaaggaaattctgctgtcctggagcttacactcaaagaaataggattctctttttcaaaaacgcttaaagcaggacctgctgcatcccaggactggggcttgctgggagacagacaaagaagcagagtctggactctctcgtgcctgctcccaggcatggagggagcaggaggaccccaacaagctggcaaccagctggcctgactattacatcgaccgcatcaattccatggctgcgatgcagagtctgtacgcgtttgatgaggaggagacggagatgaggaaccaagtcgtggaagacctgaagacagccctccggacacagcctatgaggtttgtgacccgcttcattgagctggagggcttgacctgtctgctaaatttcctccggagcatggaccacgccacctgtgagagccgcatccacacctcactcattggctgcatcaaagcattgatgaacaactcccaggggcgggcacatgtgctggcacagcctgaggccattagtaccatagcccagagcctacgcacagagaacagcaagaccaaggtggctgtgctggagatcctgggtgctgtgtgcctcgtgcctggtggccacaagaaggtgctgcaggccatgctgcactaccaggtgtatgcagcagagcgaacccgcttccagaccctgctgaacgagctagaccgaagtctgggccggtaccgggatgaagtgaatctgaaaacagccatcatgtccttcatcaatgctgtcctcaatgctggagctggagaggataatctggagttccgcctacatctacggtatgaattcctgatgctgggtatacagcctgtgattgacaagctccggcaacatgaaaatgccatcctggacaaacatttagacttcttcgagatggtgcggaatgaggatgacctggagctagccaggaggtttgacatggtccacatcgacaccaagagtgcttcccagatgtttgagttgatccacaagaagctgaagtacacggaggcctacccctgcctgctctctgtgctgcaccactgcctgcagatgccctacaaacggaacggtggctacttccagcagtggcagctcctggaccgcatcctccagcagattgtcctccaggatgagcggggtgtggaccctgacctggctcccttggagaacttcaatgtcaagaacatcgtcaacatgctcatcaacgagaatgaagtgaaacagtggcgagaccaggcagagaagttccggaaagaacacatggagcttgtgagccgtctggagaggaaggagcgggaatgcgagacaaagacattggagaaggaagagatgatgcggacgctgaacaaaatgaaggacaagctggcccgggagtcccaggagctgcgccaggctcggggacaagtggcagagctggtagcccagctcagtgaactctcaacaggccctgtatcttccccaccaccccctgggggcccactcaccttgtcttcctcaatgacaaccaatgacctgcctccaccccctcctcctctgccctttgcctgttgtccccctcccccaccaccaccccttcctcccgggggacccccgactcccccaggtgccccaccttgcctcggcatgggcctgcccctccctcaggacccctaccccagcagtgacgtcccactcaggaaaaagcgtgtcccccagccttctcacccactgaagtccttcaactgggtgaagctgaatgaggagcgtgtccctggcaccgtatggaatgagattgatgacatgcaggtatttcggatcctggacctagaggattttgaaaanatgttttcagcctaccagaggcaccaggagctgataactaatccttctcagcagaaagagctgggctccactgaagacatctacctggcttcccgcaaggtcaaagagctgtcggtcattgatggccggagggcccaaaactgcatcatccttctttccaagttgaagctttctaacgaggagatccggcaggccatcttgaagatggatgagcaggaggaccttgctaaggacatgctggagcagctcctcaagttcatcccagagaagagtgacattgacctcctggaggagcacaagcatgaaattgagcggatggcccgtgctgaccgcttcctctatgaaatgagcaggattgaccactaccagcagcgactgcaagccctcttcttcaagaagaaattccaggagcggctggctgaggcaaagcccaaagtggaagccatcctgttggcctcccgggagctggtccgcagcaagcgtcttagacagatgctagaggtcatcctagccataggcaacttcatgaacaaagggcagcgtgggggcgcctacgggttccgggtggccagcctcaacaagatcgctgacaccaagtccagcatcgacagaaacatctctctgctccattacctgatcatgatcctggagaagcattttcctgatattctaaacatgccttcagagctgcaacatcttccagaagctgccaaagtcaacctagcagaactggagaaggaggtgggcaacctcaggaggggcctgagagcggtggaggtggagctggagtatcagaggcgccaggtacgggagcccagtgacaagtttgtccctgtcatgagcgacttcatcacggtgtccagcttcagcttctccgagctggaggaccagctaaatgaggccagggacaagttcgccaaggccttgatgcacttcggggagcatgacagcaagatgcagccagacgaattctttggcatctttgataccttcttgcaggccttctcagaggcccggcaggatctagaggccatgaggaggaggaaggaggaggaggagcggcgggcgcgcatggaagccatgctgaaggagcagagggaacgtgagcggtggcagcggcagcggaaggtcctggctgcaggcagctcgctggaggagggaggagagttcgatgacctggtgtcggccctgcgctctggggaggtcttcgacaaggacttatgcaagctcaagcgcagccgcaagcgatcagggagccaggccctggaagttacccgggagcgggcaataaaccggctaaattattgacctggggaactagccacacaggaggccgggagacagggactggtgagaatggggctgagtggaggaggtggtgatatttaaaccatttggtgcttggtttagagccttgggctgggtcctgggatggggggctgtgtgtggctggaccaggtgtctccccacgcttaccttaaggggctcctcttatctccccttcacatgattccttctgtgccctggccccaggtattattctgaggctgccttggatggcctcaggccaggtaaccccaggctgaaggggccctgctccccatcccctaccatgggcacccatgtgctggcacagaacagttccagatctagactggagaggtccacagccttgtccagagttcctgtgtagcacggggagcaatgatggagggagcccctgagagggaatctggtgagggaatccagactcccttctctcaaggggaggctcaacagaacattgacctgggggcaaactttcctcttgaatgggaacagaggaggcattatatattctagttagatcagctctggtaggttccagagaacagtcaatgttggaaggatgatgcagggaccaaagccatcaggacagagtagcagtgtctgtttcccatgtcacaagtcctctggcctctccctgcatgtcttaagtatctttcccttccttctctaccctcacctccatcctgtctactaatccacagtcctagaagactcaccttgggtttccacagctatggctcactaccaggtgcttgatgaatctggcgaggggctcaagacagacctcatgcatcaccacacctcatgccttttgggcatctcccatgtccccatctcctggacacctggccattgttgtgaagccagacagtgacctcaaatgttgccttggagtcccctacagcccctcagcagagggcagcacttgaatgcttagctccatcccatagttctctacttcatataaattgctcaggccctcccaccccttctctaacactagcttcaaggcagaagccacagcagcctctgtccagcctgcaggtggccacttggaaccatgtgtccactggcgttggggagttggttcctgagaggtctgagggccagagctgccctctacattaacatgctgtctctaagggtggcccctcctctcaggcgttcagatggtgcgaacagcagagcaggcaagggaaactggggagatggggatggaggaggaaggctgatatcctctggggagcacatcacctgaaggtgccaaggaggaaggctgagaggggggccaccccatttctggtacccaatttggttcttcagcccaacttgcaaggggttccttctggtcctcccatccactgccaccttccattttgtccatctcatgctggccttggtggatgggatggctgtatctagacaaaatttttctaaaactccatcaaggctcttattcaataccacgttccgagttggcctttcatcttctttgagactggccctgcctaacctctaccatcaatgagctcttggcccttctgcccttccctgtgtttctcactttccaacctaatccctggctcagggttattgccagtggagactggtgagctgggcctactctcagctgcctatcttctgcctttcacttgcatccaactcctggggctgggaccgtagtagctgcgggggggaagaaacacagggtcggtgagcccagcatgtgcgttggtttgagggggcgggcggtgtgtgtgtgttctggtgggagggatctgagcaagtgcaagcctggctgacacaggtgtgaagaggccatcctggaacccaggtgagggcaagatgaaggcttccaggcagaacagctgcagagagtttggctatatgcatctgcagccccaagagctcccactgcaagacaagtgttggggaagatgggaggttgtgggtgaggcctctaaaggtcctctcccaaactgaccaggctgatgtcaacctaaccccctcaggggcagggaacaggggagggctccacaagcgtgtctggcattcccacccaccatggaagactggatacgcacctggaaacaaaaggactatggaagctgttcaagatacatttgatcttcagaaaagcagaatttggttcaactgttgacagaggacacaaatacgttgttccagagctcagccttctcactctaaaagaaagatatttttctatttattttctacatctggccagtggctctggtgctagatgccactgtagccagatctccaacagtgccttggaccatggactcatactcaactgagtaagaaggggctggtgcccagtcggggtggctgagctggtccttaataggttgtttcttggtcttgctttcttcatgccctccccactgctcctgccacctttagataagtttctctagctaattttgtggccaatgtaaaattcgtcatcaacctaacaaacacaaccttctcagcagcatttctcccctgtgatggaaataaagtgtttagggcagtgggaggagaaaattctccaggtgaatggggaagggtctgttccagcctctccctactcccatcccatttccaccaactggggaactgtgactatctatctcccccgacttctaccagggatgccttcacgccaaggctgttctcaccagctgcctcagatgacaaatgaggctaatggacataatctacagtgtcctttttcacttgcaccttttttataagaatatattgtaatactaaaaaatattaaattcataccatccctacccagtctgcctttaaa

SEQ ID NO: 366997 - DNA, 6229 bp, Homo sapiens
  misc_feature (2076)..(2076): n is a, c, g, or t
cggggatagcgcggagcacgcagcagcgagcggagcgcgggcggcggcgccgtacctcgggctgcgggagcgcgggcgccctggggtcctcggaatcacaatgaggacctagggcatctgtctgctgacgccccctggcctgcagtgaccatggccccccgcaagaggagccaccatggcctgggcttcctgtgctgcttcgggggcagtgacatccccgaaatcaacctccgggacaaccaccctctgcagttcatggagttctccagccccatcccgaacgcagaggagctcaacatccgctttgcagagctggtggatgaattggatctcactgacaaaaaccgagaggctatgtttgcactgccccctgagaagaaatggcagatctactgcagcaagaagaaggagcaggaggaccccaacaagctggcaaccagctggcctgactattacatcgaccgcatcaattccatggctgcgatgcagagtctgtacgcgtttgatgaggaggagacggagatgaggaaccaagtcgtggaagacctgaagacagccctccggacacagcctatgaggtttgtgacccgcttcattgagctggagggcttgacctgtctgctaaatttcctccggagcatggaccacgccacctgtgagagccgcatccacacctcactcattggctgcatcaaagcattgatgaacaactcccaggggcgggcacatgtgctggcacagcctgaggccattagtaccatagcccagagcctacgcacagagaacagcaagaccaaggtggctgtgctggagatcctgggtgctgtgtgcctcgtgcctggtggccacaagaaggtgctgcaggccatgctgcactaccaggtgtatgcagcagagcgaacccgcttccagaccctgctgaacgagctagaccgaagtctgggccggtaccgggatgaagtgaatctgaaaacagccatcatgtccttcatcaatgctgtcctcaatgctggagctggagaggataatctggagttccgcctacatctacggtatgaattcctgatgctgggtatacagcctgtgattgacaagctccggcaacatgaaaatgccatcctggacaaacatttagacttcttcgagatggtgcggaatgaggatgacctggagctagccaggaggtttgacatggtccacatcgacaccaagagtgcttcccagatgtttgagttgatccacaagaagctgaagtacacggaggcctacccctgcctgctctctgtgctgcaccactgcctgcagatgccctacaaacggaacggtggctacttccagcagtggcagctcctggaccgcatcctccagcagattgtcctccaggatgagcggggtgtggaccctgacctggctcccttggagaacttcaatgtcaagaacatcgtcaacatgctcatcaacgagaatgaagtgaaacagtggcgagaccaggcagagaagttccggaaagaacacatggagcttgtgagccgtctggagaggaaggagcgggaatgcgagacaaagacattggagaaggaagagatgatgcggacgctgaacaaaatgaaggacaagctggcccgggagtcccaggagctgcgccaggctcggggacaagtggcagagctggtagcccagctcagtgaactctcaacaggccctgtatcttccccaccaccccctgggggcccactcaccttgtcttcctcaatgacaaccaatgacctgcctccaccccctcctcctctgccctttgcctgttgtccccctcccccaccaccaccccttcctcccgggggacccccgactcccccaggtgccccaccttgcctcggcatgggcctgcccctccctcaggacccctaccccagcagtgacgtcccactcaggaaaaagcgtgtcccccagccttctcacccactgaagtccttcaactgggtgaagctgaatgaggagcgtgtccctggcaccgtatggaatgagattgatgacatgcaggtatttcggatcctggacctagaggattttgaaaanatgttttcagcctaccagaggcaccaggagctgataactaatccttctcagcagaaagagctgggctccactgaagacatctacctggcttcccgcaaggtcaaagagctgtcggtcattgatggccggagggcccaaaactgcatcatccttctttccaagttgaagctttctaacgaggagatccggcaggccatcttgaagatggatgagcaggaggaccttgctaaggacatgctggagcagctcctcaagttcatcccagagaagagtgacattgacctcctggaggagcacaagcatgaaattgagcggatggcccgtgctgaccgcttcctctatgaaatgagcaggattgaccactaccagcagcgactgcaagccctcttcttcaagaagaaattccaggagcggctggctgaggcaaagcccaaagtggaagccatcctgttggcctcccgggagctggtccgcagcaagcgtcttagacagatgctagaggtcatcctagccataggcaacttcatgaacaaagggcagcgtgggggcgcctacgggttccgggtggccagcctcaacaagatcgctgacaccaagtccagcatcgacagaaacatctctctgctccattacctgatcatgatcctggagaagcattttcctgatattctaaacatgccttcagagctgcaacatcttccagaagctgccaaagtcaacctagcagaactggagaaggaggtgggcaacctcaggaggggcctgagagcggtggaggtggagctggagtatcagaggcgccaggtacgggagcccagtgacaagtttgtccctgtcatgagcgacttcatcacggtgtccagcttcagcttctccgagctggaggaccagctaaatgaggccagggacaagttcgccaaggccttgatgcacttcggggagcatgacagcaagatgcagccagacgaattctttggcatctttgataccttcttgcaggccttctcagaggcccggcaggatctagaggccatgaggaggaggaaggaggaggaggagcggcgggcgcgcatggaagccatgctgaaggagcagagggaacgtgagcggtggcagcggcagcggaaggtcctggctgcaggcagctcgctggaggagggaggagagttcgatgacctggtgtcggccctgcgctctggggaggtcttcgacaaggacttatgcaagctcaagcgcagccgcaagcgatcagggagccaggccctggaagttacccgggagcgggcaataaaccggctaaattattgacctggggaactagccacacaggaggccgggagacagggactggtgagaatggggctgagtggaggaggtggtgatatttaaaccatttggtgcttggtttagagccttgggctgggtcctgggatggggggctgtgtgtggctggaccaggtgtctccccacgcttaccttaaggggctcctcttatctccccttcacatgattccttctgtgccctggccccaggtattattctgaggctgccttggatggcctcaggccaggtaaccccaggctgaaggggccctgctccccatcccctaccatgggcacccatgtgctggcacagaacagttccagatctagactggagaggtccacagccttgtccagagttcctgtgtagcacggggagcaatgatggagggagcccctgagagggaatctggtgagggaatccagactcccttctctcaaggggaggctcaacagaacattgacctgggggcaaactttcctcttgaatgggaacagaggaggcattatatattctagttagatcagctctggtaggttccagagaacagtcaatgttggaaggatgatgcagggaccaaagccatcaggacagagtagcagtgtctgtttcccatgtcacaagtcctctggcctctccctgcatgtcttaagtatctttcccttccttctctaccctcacctccatcctgtctactaatccacagtcctagaagactcaccttgggtttccacagctatggctcactaccaggtgcttgatgaatctggcgaggggctcaagacagacctcatgcatcaccacacctcatgccttttgggcatctcccatgtccccatctcctggacacctggccattgttgtgaagccagacagtgacctcaaatgttgccttggagtcccctacagcccctcagcagagggcagcacttgaatgcttagctccatcccatagttctctacttcatataaattgctcaggccctcccaccccttctctaacactagcttcaaggcagaagccacagcagcctctgtccagcctgcaggtggccacttggaaccatgtgtccactggcgttggggagttggttcctgagaggtctgagggccagagctgccctctacattaacatgctgtctctaagggtggcccctcctctcaggcgttcagatggtgcgaacagcagagcaggcaagggaaactggggagatggggatggaggaggaaggctgatatcctctggggagcacatcacctgaaggtgccaaggaggaaggctgagaggggggccaccccatttctggtacccaatttggttcttcagcccaacttgcaaggggttccttctggtcctcccatccactgccaccttccattttgtccatctcatgctggccttggtggatgggatggctgtatctagacaaaatttttctaaaactccatcaaggctcttattcaataccacgttccgagttggcctttcatcttctttgagactggccctgcctaacctctaccatcaatgagctcttggcccttctgcccttccctgtgtttctcactttccaacctaatccctggctcagggttattgccagtggagactggtgagctgggcctactctcagctgcctatcttctgcctttcacttgcatccaactcctggggctgggaccgtagtagctgcgggggggaagaaacacagggtcggtgagcccagcatgtgcgttggtttgagggggcgggcggtgtgtgtgtgttctggtgggagggatctgagcaagtgcaagcctggctgacacaggtgtgaagaggccatcctggaacccaggtgagggcaagatgaaggcttccaggcagaacagctgcagagagtttggctatatgcatctgcagccccaagagctcccactgcaagacaagtgttggggaagatgggaggttgtgggtgaggcctctaaaggtcctctcccaaactgaccaggctgatgtcaacctaaccccctcaggggcagggaacaggggagggctccacaagcgtgtctggcattcccacccaccatggaagactggatacgcacctggaaacaaaaggactatggaagctgttcaagatacatttgatcttcagaaaagcagaatttggttcaactgttgacagaggacacaaatacgttgttccagagctcagccttctcactctaaaagaaagatatttttctatttattttctacatctggccagtggctctggtgctagatgccactgtagccagatctccaacagtgccttggaccatggactcatactcaactgagtaagaaggggctggtgcccagtcggggtggctgagctggtccttaataggttgtttcttggtcttgctttcttcatgccctccccactgctcctgccacctttagataagtttctctagctaattttgtggccaatgtaaaattcgtcatcaacctaacaaacacaaccttctcagcagcatttctcccctgtgatggaaataaagtgtttagggcagtgggaggagaaaattctccaggtgaatggggaagggtctgttccagcctctccctactcccatcccatttccaccaactggggaactgtgactatctatctcccccgacttctaccagggatgccttcacgccaaggctgttctcaccagctgcctcagatgacaaatgaggctaatggacataatctacagtgtcctttttcacttgcaccttttttataagaatatattgtaatactaaaaaatattaaattcataccatccctacccagtctgcctttaaa

SEQ ID NO: 366998 - DNA, 6540 bp, Homo sapiens
  misc_feature (2387)..(2387): n is a, c, g, or t
cggggatagcgcggagcacgcagcagcgagcggagcgcgggcggcggcgccgtacctcgggctgcgggagcgcgggcgccctggggtcctcggaatcacaatgaggacctagggcatctgtctgctgacgccccctggcctgcagtgaccatggccccccgcaagaggagccaccatggcctgggcttcctgtgctgcttcgggggcagtgacatccccgaaatcaacctccgggacaaccaccctctgcagttcatggagttctccagccccatcccgaacgcagaggagctcaacatccgctttgcagagctggtggatgaattggatctcactgacaaaaaccgagaggctatgtttgcactgccccctgagaagaaatggcagatctactgcagcaagaagaaggtgccctctctgacccctctggccacatctcagggttcatggcatggggtggctcttgctgccttggcatgctcatgcattcacctgatgtttattacatgccagccctgttctaggtgttggaggaacaacagtgaataaaatagaaaaaggaaattctgctgtcctggagcttacactcaaagaaataggattctctttttcaaaaacgcttaaagcaggacctgctgcatcccaggactggggcttgctgggagacagacaaagaagcagagtctggactctctcgtgcctgctcccaggcatggagggagcaggaggaccccaacaagctggcaaccagctggcctgactattacatcgaccgcatcaattccatggctgcgatgcagagtctgtacgcgtttgatgaggaggagacggagatgaggaaccaagtcgtggaagacctgaagacagccctccggacacagcctatgaggtttgtgacccgcttcattgagctggagggcttgacctgtctgctaaatttcctccggagcatggaccacgccacctgtgagagccgcatccacacctcactcattggctgcatcaaagcattgatgaacaactcccaggggcgggcacatgtgctggcacagcctgaggccattagtaccatagcccagagcctacgcacagagaacagcaagaccaaggtggctgtgctggagatcctgggtgctgtgtgcctcgtgcctggtggccacaagaaggtgctgcaggccatgctgcactaccaggtgtatgcagcagagcgaacccgcttccagaccctgctgaacgagctagaccgaagtctgggccggtaccgggatgaagtgaatctgaaaacagccatcatgtccttcatcaatgctgtcctcaatgctggagctggagaggataatctggagttccgcctacatctacggtatgaattcctgatgctgggtatacagcctgtgattgacaagctccggcaacatgaaaatgccatcctggacaaacatttagacttcttcgagatggtgcggaatgaggatgacctggagctagccaggaggtttgacatggtccacatcgacaccaagagtgcttcccagatgtttgagttgatccacaagaagctgaagtacacggaggcctacccctgcctgctctctgtgctgcaccactgcctgcagatgccctacaaacggaacggtggctacttccagcagtggcagctcctggaccgcatcctccagcagattgtcctccaggatgagcggggtgtggaccctgacctggctcccttggagaacttcaatgtcaagaacatcgtcaacatgctcatcaacgagaatgaagtgaaacagtggcgagaccaggcagagaagttccggaaagaacacatggagcttgtgagccgtctggagaggaaggagcgggaatgcgagacaaagacattggagaaggaagagatgatgcggacgctgaacaaaatgaaggacaagctggcccgggagtcccaggagctgcgccaggctcggggacaagtggcagagctggtagcccagctcagtgaactctcaacaggccctgtatcttccccaccaccccctgggggcccactcaccttgtcttcctcaatgacaaccaatgacctgcctccaccccctcctcctctgccctttgcctgttgtccccctcccccaccaccaccccttcctcccgggggacccccgactcccccaggtgccccaccttgcctcggcatgggcctgcccctccctcaggacccctaccccagcagtgacgtcccactcaggaaaaagcgtgtcccccagccttctcacccactgaagtccttcaactgggtgaagctgaatgaggagcgtgtccctggcaccgtatggaatgagattgatgacatgcaggtatttcggatcctggacctagaggattttgaaaanatgttttcagcctaccagaggcaccaggagctgataactaatccttctcagcagaaagagctgggctccactgaagacatctacctggcttcccgcaaggtcaaagagctgtcggtcattgatggccggagggcccaaaactgcatcatccttctttccaagttgaagctttctaacgaggagatccggcaggccatcttgaagatggatgagcaggaggaccttgctaaggacatgctggagcagctcctcaagttcatcccagagaagagtgacattgacctcctggaggagcacaagcatgaaattgagcggatggcccgtgctgaccgcttcctctatgaaatgagcaggattgaccactaccagcagcgactgcaagccctcttcttcaagaagaaattccaggagcggctggctgaggcaaagcccaaagtggaagccatcctgttggcctcccgggagctggtccgcagcaagcgtcttagacagatgctagaggtcatcctagccataggcaacttcatgaacaaagggcagcgtgggggcgcctacgggttccgggtggccagcctcaacaagatcgctgacaccaagtccagcatcgacagaaacatctctctgctccattacctgatcatgatcctggagaagcattttcctgatattctaaacatgccttcagagctgcaacatcttccagaagctgccaaagtcaacctagcagaactggagaaggaggtgggcaacctcaggaggggcctgagagcggtggaggtggagctggagtatcagaggcgccaggtacgggagcccagtgacaagtttgtccctgtcatgagcgacttcatcacggtgtccagcttcagcttctccgagctggaggaccagctaaatgaggccagggacaagttcgccaaggccttgatgcacttcggggagcatgacagcaagatgcagccagacgaattctttggcatctttgataccttcttgcaggccttctcagaggcccggcaggatctagaggccatgaggaggaggaaggaggaggaggagcggcgggcgcgcatggaagccatgctgaaggagcagagggaacgtgagcggtggcagcggcagcggaaggtcctggctgcaggcagctcgctggaggagggaggagagttcgatgacctggtgtcggccctgcgctctggggaggtcttcgacaaggacttatgcaagctcaagcgcagccgcaagcgatcagggagccaggccctggaagttacccgggagcgggcaataaaccggctaaattattgacctggggaactagccacacaggaggccgggagacagggactggtgagaatggggctgagtggaggaggtggtgatatttaaaccatttggtgcttggtttagagccttgggctgggtcctgggatggggggctgtgtgtggctggaccaggtgtctccccacgcttaccttaaggggctcctcttatctccccttcacatgattccttctgtgccctggccccaggtattattctgaggctgccttggatggcctcaggccaggtaaccccaggctgaaggggccctgctccccatcccctaccatgggcacccatgtgctggcacagaacagttccagatctagactggagaggtccacagccttgtccagagttcctgtgtagcacggggagcaatgatggagggagcccctgagagggaatctggtgagggaatccagactcccttctctcaaggggaggctcaacagaacattgacctgggggcaaactttcctcttgaatgggaacagaggaggcattatatattctagttagatcagctctggtaggttccagagaacagtcaatgttggaaggatgatgcagggaccaaagccatcaggacagagtagcagtgtctgtttcccatgtcacaagtcctctggcctctccctgcatgtcttaagtatctttcccttccttctctaccctcacctccatcctgtctactaatccacagtcctagaagactcaccttgggtttccacagctatggctcactaccaggtgcttgatgaatctggcgaggggctcaagacagacctcatgcatcaccacacctcatgccttttgggcatctcccatgtccccatctcctggacacctggccattgttgtgaagccagacagtgacctcaaatgttgccttggagtcccctacagcccctcagcagagggcagcacttgaatgcttagctccatcccatagttctctacttcatataaattgctcaggccctcccaccccttctctaacactagcttcaaggcagaagccacagcagcctctgtccagcctgcaggtggccacttggaaccatgtgtccactggcgttggggagttggttcctgagaggtctgagggccagagctgccctctacattaacatgctgtctctaagggtggcccctcctctcaggcgttcagatggtgcgaacagcagagcaggcaagggaaactggggagatggggatggaggaggaaggctgatatcctctggggagcacatcacctgaaggtgccaaggaggaaggctgagaggggggccaccccatttctggtacccaatttggttcttcagcccaacttgcaaggggttccttctggtcctcccatccactgccaccttccattttgtccatctcatgctggccttggtggatgggatggctgtatctagacaaaatttttctaaaactccatcaaggctcttattcaataccacgttccgagttggcctttcatcttctttgagactggccctgcctaacctctaccatcaatgagctcttggcccttctgcccttccctgtgtttctcactttccaacctaatccctggctcagggttattgccagtggagactggtgagctgggcctactctcagctgcctatcttctgcctttcacttgcatccaactcctggggctgggaccgtagtagctgcgggggggaagaaacacagggtcggtgagcccagcatgtgcgttggtttgagggggcgggcggtgtgtgtgtgttctggtgggagggatctgagcaagtgcaagcctggctgacacaggtgtgaagaggccatcctggaacccaggtgagggcaagatgaaggcttccaggcagaacagctgcagagagtttggctatatgcatctgcagccccaagagctcccactgcaagacaagtgttggggaagatgggaggttgtgggtgaggcctctaaaggtcctctcccaaactgaccaggctgatgtcaacctaaccccctcaggggcagggaacaggggagggctccacaagcgtgtctggcattcccacccaccatggaagactggatacgcacctggaaacaaaaggactatggaagctgttcaagatacatttgatcttcagaaaagcagaatttggttcaactgttgacagaggacacaaatacgttgttccagagctcagccttctcactctaaaagaaagatatttttctatttattttctacatctggccagtggctctggtgctagatgccactgtagccagatctccaacagtgccttggaccatggactcatactcaactgagtaagaaggggctggtgcccagtcggggtggctgagctggtccttaataggttgtttcttggtcttgctttcttcatgccctccccactgctcctgccacctttagataagtttctctagctaattttgtggccaatgtaaaattcgtcatcaacctaacaaacacaaccttctcagcagcatttctcccctgtgatggaaataaagtgtttagggcagtgggaggagaaaattctccaggtgaatggggaagggtctgttccagcctctccctactcccatcccatttccaccaactggggaactgtgactatctatctcccccgacttctaccagggatgccttcacgccaaggctgttctcaccagctgcctcagatgacaaatgaggctaatggacataatctacagtgtcctttttcacttgcaccttttttataagaatatattgtaatactaaaaaatattaaattcataccatccctacccagtctgcctttaaa

SEQ ID NO: 366999 - DNA, 5966 bp, Homo sapiens
  misc_feature (2458)..(2458): n is a, c, g, or t
ccctgcctgaggctcacagtacaagtcagtcaaattgttcagggcagcagtggtgtctggagacctggtttgagttcctaggttcatacctagcgtccttctgagcctcaagtttcttcatctgtaaaaagagaagatgaaagtttgagataaacctcgaacatgatcacaatgaggacctagggcatctgtctgctgacgccccctggcctgcagtgaccatggccccccgcaagaggagccaccatggcctgggcttcctgtgctgcttcgggggcagtgacatccccgaaatcaacctccgggacaaccaccctctgcagttcatggagttctccagccccatcccgaacgcagaggagctcaacatccgctttgcagagctggtggatgaattggatctcactgacaaaaaccgagaggctatgtttgcactgccccctgagaagaaatggcagatctactgcagcaagaagaaggtgccctctctgacccctctggccacatctcagggttcatggcatggggtggctcttgctgccttggcatgctcatgcattcacctgatgtttattacatgccagccctgttctaggtgttggaggaacaacagtgaataaaatagaaaaaggaaattctgctgtcctggagcttacactcaaagaaataggattctctttttcaaaaacgcttaaagcaggacctgctgcatcccaggactggggcttgctgggagacagacaaagaagcagagtctggactctctcgtgcctgctcccaggcatggagggagcaggaggaccccaacaagctggcaaccagctggcctgactattacatcgaccgcatcaattccatggctgcgatgcagagtctgtacgcgtttgatgaggaggagacggagatgaggaaccaagtcgtggaagacctgaagacagccctccggacacagcctatgaggtttgtgacccgcttcattgagctggagggcttgacctgtctgctaaatttcctccggagcatggaccacgccacctgtgagagccgcatccacacctcactcattggctgcatcaaagcattgatgaacaactcccaggggcgggcacatgtgctggcacagcctgaggccattagtaccatagcccagagcctacgcacagagaacagcaagaccaaggtggctgtgctggagatcctgggtgctgtgtgcctcgtgcctggtggccacaagaaggtgctgcaggccatgctgcactaccaggtgtatgcagcagagcgaacccgcttccagaccctgctgaacgagctagaccgaagtctgggccggtaccgggatgaagtgaatctgaaaacagccatcatgtccttcatcaatgctgtcctcaatgctggagctggagaggataatctggagttccgcctacatctacggtatgaattcctgatgctgggtatacagcctgtgattgacaagctccggcaacatgaaaatgccatcctggacaaacatttagacttcttcgagatggtgcggaatgaggatgacctggagctagccaggaggtttgacatggtccacatcgacaccaagagtgcttcccagatgtttgagttgatccacaagaagctgaagtacacggaggcctacccctgcctgctctctgtgctgcaccactgcctgcagatgccctacaaacggaacggtggctacttccagcagtggcagctcctggaccgcatcctccagcagattgtcctccaggatgagcggggtgtggaccctgacctggctcccttggagaacttcaatgtcaagaacatcgtcaacatgctcatcaacgagaatgaagtgaaacagtggcgagaccaggcagagaagttccggaaagaacacatggagcttgtgagccgtctggagaggaaggagcgggaatgcgagacaaagacattggagaaggaagagatgatgcggacgctgaacaaaatgaaggacaagctggcccgggagtcccaggagctgcgccaggctcggggacaagtggcagagctggtagcccagctcagtgaactctcaacaggccctgtatcttccccaccaccccctgggggcccactcaccttgtcttcctcaatgacaaccaatgacctgcctccaccccctcctcctctgccctttgcctgttgtccccctcccccaccaccaccccttcctcccgggggacccccgactcccccaggtgccccaccttgcctcggcatgggcctgcccctccctcaggacccctaccccagcagtgacgtcccactcaggaaaaagcgtgtcccccagccttctcacccactgaagtccttcaactgggtgaagctgaatgaggagcgtgtccctggcaccgtatggaatgagattgatgacatgcaggtatttcggatcctggacctagaggattttgaaaanatgttttcagcctaccagaggcaccagaaagagctgggctccactgaagacatctacctggcttcccgcaaggtcaaagagctgtcggtcattgatggccggagggcccaaaactgcatcatccttctttccaagttgaagctttctaacgaggagatccggcaggccatcttgaagatggatgagcaggaggaccttgctaaggacatgctggagcagctcctcaagttcatcccagagaagagtgacattgacctcctggaggagcacaagcatgaaattgagcggatggcccgtgctgaccgcttcctctatgaaatgagcaggattgaccactaccagcagcgactgcaagccctcttcttcaagaagaaattccaggagcggctggctgaggcaaagcccaaagtggaagccatcctgttggcctcccgggagctggtccgcagcaagcgtcttagacagatgctagaggtcatcctagccataggcaacttcatgaacaaagggcagcgtgggggcgcctacgggttccgggtggccagcctcaacaagatcgctgacaccaagtccagcatcgacagaaacatctctctgctccattacctgatcatgatcctggagaagcattttcctgatattctaaacatgccttcagagctgcaacatcttccagaagctgccaaagtcaacctagcagaactggagaaggaggtgggcaacctcaggaggggcctgagagcggtggaggtggagctggagtatcagaggcgccaggtacgggagcccagtgacaagtttgtccctgtcatgagcgacttcatcacggtgtccagcttcagcttctccgagctggaggaccagctaaatgaggccagggacaagttcgccaaggccttgatgcacttcggggagcatgacagcaagatgcagccagacgaattctttggcatctttgataccttcttgcaggccttctcagaggcccggcaggatctagaggccatgaggaggaggaaggaggaggaggagcggcgggcgcgcatggaagccatgctgaaggagcagagggaacgtgagcggtggcagcggcagcggaaggtcctggctgcaggcagctcgctggaggagggaggagagttcgatgacctggtgtcggccctgcgctctggggaggtcttcgacaaggacttatgcaagctcaagcgcagccgcaagcgatcagggagccaggccctggaagttacccgggagcgggcaataaaccggctaaattattgacctggggaactagccacacaggaggccgggagacagggactggtgagaatggggctgagtggaggaggtggtgatatttaaaccatttggtgcttggtttagagccttgggctgggtcctgggatggggggctgtgtgtggctggaccaggtgtctccccacgcttaccttaaggggctcctcttatctccccttcacatgattccttctgtgccctggccccaggtattattctgaggctgccttggatggcctcaggccaggtaaccccaggctgaaggggccctgctccccatcccctaccatgggcacccatgtgctggcacagaacagttccagatctagactggagaggtccacagccttgtccagagttcctgtgtagcacggggagcaatgatggagggagcccctgagagggaatctggtgagggaatccagactcccttctctcaaggggaggctcaacagaacattgacctgggggcaaactttcctcttgaatgggaacagaggaggcattatatattctagttagatcagctctggtaggttccagagaacagtcaatgttggaaggatgatgcagggaccaaagccatcaggacagagtagcagtgtctgtttcccatgtcacaagtcctctggcctctccctgcatgtcttaagtatctttcccttccttctctaccctcacctccatcctgtctactaatccacagtcctagaagactcaccttgggtttccacagctatggctcactaccaggtgcttgatgaatctggcgaggggctcaagacagacctcatgcatcaccacacctcatgccttttgggcatctcccatgtccccatctcctggacacctggccattgttgtgaagccagacagtgacctcaaatgttgccttggagtcccctacagcccctcagcagagggcagcacttgaatgcttagctccatcccatagttctctacttcatataaattgctcaggccctcccaccccttctctaacactagcttcaaggcagaagccacagcagcctctgtccagcctgcaggtggccacttggaaccatgtgtccactggcgttggggagttggttcctgagaggtctgagggccagagctgccctctacattaacatgctgtctctaagggtggcccctcctctcaggcgttcagatggtgcgaacagcagagcaggcaagggaaactggggagatggggatggaggaggaaggctgatatcctctggggagcacatcacctgaaggtgccaaggaggaaggctgagaggggggccaccccatttctggtacccaatttggttcttcagcccaacttgcaaggggttccttctggtcctcccatccactgccaccttccattttgtccatctcatgctggccttggtggatgggatggctgtatctagacaaaatttttctaaaactccatcaaggctcttattcaataccacgttccgagttggcctttcatcttctttgagactggccctgcctaacctctaccatcaatgagctcttggcccttctgcccttccctgtgtttctcactttccaacctaatccctggctcagggttattgccagtggagactggtgagctgggcctactctcagctgcctatcttctgcctttcacttgcatccaactcctggggctgggaccgtagtagctgcgggggggaagaaacacagggtcggtgagcccagcatgtgcgttggtttgagggggcgggcggtgtgtgtgtgttctggtgggagggatctgagcaagtgcaagcctggctgacacaggtgtgaagaggccatcctggaacccaggtgagggcaagatgaaggcttccaggcagaacagctgcagagagtttggctatatgcatctgcagccccaagagctcccactgcaagacaagtgttggggaagatgggaggttgtgggtgaggcctctaaaggtcctctcccaaactgaccaggctgatgtcaacctaaccccctcaggggcagggaacaggggagggctccacaagcgtgtctggcattcccacccaccatggaagactggatacgcacctggaaacaaaaggactatggaagctgttcaagatacatttgatcttcagaaaagcagcaggaggaggacagcagcaggaggaggacagcagcaggaggaggacagcagcaggagagacggc

SEQ ID NO: 367000 - DNA, 530 bp, Homo sapiens
atccccgaaatcaacctccgggacaaccaccctctgcagttcatggagttctccagccccatcccgaacgcagaggagctcaacatccgctttgcagagctggtggtcagtgagagggtggggagagacagtgacaatggggaggagggtggatggagaggcagagctggacagagggcagggcccctgtgctggggtctccatctctcaaaactcctcttgggaggagataggcccccaggacacctcagctatgttggggaaccagagtctctcactgggatggacagcataaagtgtgtccccagaagaatggtcctacctcctctctgcattggattgtagaccacatggtgcagtaattaggttatcataggaaggggcagctctgggttttgcaaaataagatggtgagacatctcaaagaacatcagaacatttgacgcctttctctcttctgctccttggagtttccctgggatcttttaatgtccgaggcacaaagaagggacagagtgggattctgtggg

SEQ ID NO: 367001 - DNA, 6281 bp, Homo sapiens
  misc_feature (2128)..(2128): n is a, c, g, or t
ggcgggggaaggagcatctcaggaaaggggtccccggactctggggctctcagcacctgcggtcgcaaaccaacctcatgccctgactttaccaggcgtcgggactctgacttaaccggggaatgagggacttggtctggcggcagatcacaatgaggacctagggcatctgtctgctgacgccccctggcctgcagtgaccatggccccccgcaagaggagccaccatggcctgggcttcctgtgctgcttcgggggcagtgacatccccgaaatcaacctccgggacaaccaccctctgcagttcatggagttctccagccccatcccgaacgcagaggagctcaacatccgctttgcagagctggtggatgaattggatctcactgacaaaaaccgagaggctatgtttgcactgccccctgagaagaaatggcagatctactgcagcaagaagaaggagcaggaggaccccaacaagctggcaaccagctggcctgactattacatcgaccgcatcaattccatggctgcgatgcagagtctgtacgcgtttgatgaggaggagacggagatgaggaaccaagtcgtggaagacctgaagacagccctccggacacagcctatgaggtttgtgacccgcttcattgagctggagggcttgacctgtctgctaaatttcctccggagcatggaccacgccacctgtgagagccgcatccacacctcactcattggctgcatcaaagcattgatgaacaactcccaggggcgggcacatgtgctggcacagcctgaggccattagtaccatagcccagagcctacgcacagagaacagcaagaccaaggtggctgtgctggagatcctgggtgctgtgtgcctcgtgcctggtggccacaagaaggtgctgcaggccatgctgcactaccaggtgtatgcagcagagcgaacccgcttccagaccctgctgaacgagctagaccgaagtctgggccggtaccgggatgaagtgaatctgaaaacagccatcatgtccttcatcaatgctgtcctcaatgctggagctggagaggataatctggagttccgcctacatctacggtatgaattcctgatgctgggtatacagcctgtgattgacaagctccggcaacatgaaaatgccatcctggacaaacatttagacttcttcgagatggtgcggaatgaggatgacctggagctagccaggaggtttgacatggtccacatcgacaccaagagtgcttcccagatgtttgagttgatccacaagaagctgaagtacacggaggcctacccctgcctgctctctgtgctgcaccactgcctgcagatgccctacaaacggaacggtggctacttccagcagtggcagctcctggaccgcatcctccagcagattgtcctccaggatgagcggggtgtggaccctgacctggctcccttggagaacttcaatgtcaagaacatcgtcaacatgctcatcaacgagaatgaagtgaaacagtggcgagaccaggcagagaagttccggaaagaacacatggagcttgtgagccgtctggagaggaaggagcgggaatgcgagacaaagacattggagaaggaagagatgatgcggacgctgaacaaaatgaaggacaagctggcccgggagtcccaggagctgcgccaggctcggggacaagtggcagagctggtagcccagctcagtgaactctcaacaggccctgtatcttccccaccaccccctgggggcccactcaccttgtcttcctcaatgacaaccaatgacctgcctccaccccctcctcctctgccctttgcctgttgtccccctcccccaccaccaccccttcctcccgggggacccccgactcccccaggtgccccaccttgcctcggcatgggcctgcccctccctcaggacccctaccccagcagtgacgtcccactcaggaaaaagcgtgtcccccagccttctcacccactgaagtccttcaactgggtgaagctgaatgaggagcgtgtccctggcaccgtatggaatgagattgatgacatgcaggtatttcggatcctggacctagaggattttgaaaanatgttttcagcctaccagaggcaccaggagctgataactaatccttctcagcagaaagagctgggctccactgaagacatctacctggcttcccgcaaggtcaaagagctgtcggtcattgatggccggagggcccaaaactgcatcatccttctttccaagttgaagctttctaacgaggagatccggcaggccatcttgaagatggatgagcaggaggaccttgctaaggacatgctggagcagctcctcaagttcatcccagagaagagtgacattgacctcctggaggagcacaagcatgaaattgagcggatggcccgtgctgaccgcttcctctatgaaatgagcaggattgaccactaccagcagcgactgcaagccctcttcttcaagaagaaattccaggagcggctggctgaggcaaagcccaaagtggaagccatcctgttggcctcccgggagctggtccgcagcaagcgtcttagacagatgctagaggtcatcctagccataggcaacttcatgaacaaagggcagcgtgggggcgcctacgggttccgggtggccagcctcaacaagatcgctgacaccaagtccagcatcgacagaaacatctctctgctccattacctgatcatgatcctggagaagcattttcctgatattctaaacatgccttcagagctgcaacatcttccagaagctgccaaagtcaacctagcagaactggagaaggaggtgggcaacctcaggaggggcctgagagcggtggaggtggagctggagtatcagaggcgccaggtacgggagcccagtgacaagtttgtccctgtcatgagcgacttcatcacggtgtccagcttcagcttctccgagctggaggaccagctaaatgaggccagggacaagttcgccaaggccttgatgcacttcggggagcatgacagcaagatgcagccagacgaattctttggcatctttgataccttcttgcaggccttctcagaggcccggcaggatctagaggccatgaggaggaggaaggaggaggaggagcggcgggcgcgcatggaagccatgctgaaggagcagagggaacgtgagcggtggcagcggcagcggaaggtcctggctgcaggcagctcgctggaggagggaggagagttcgatgacctggtgtcggccctgcgctctggggaggtcttcgacaaggacttatgcaagctcaagcgcagccgcaagcgatcagggagccaggccctggaagttacccgggagcgggcaataaaccggctaaattattgacctggggaactagccacacaggaggccgggagacagggactggtgagaatggggctgagtggaggaggtggtgatatttaaaccatttggtgcttggtttagagccttgggctgggtcctgggatggggggctgtgtgtggctggaccaggtgtctccccacgcttaccttaaggggctcctcttatctccccttcacatgattccttctgtgccctggccccaggtattattctgaggctgccttggatggcctcaggccaggtaaccccaggctgaaggggccctgctccccatcccctaccatgggcacccatgtgctggcacagaacagttccagatctagactggagaggtccacagccttgtccagagttcctgtgtagcacggggagcaatgatggagggagcccctgagagggaatctggtgagggaatccagactcccttctctcaaggggaggctcaacagaacattgacctgggggcaaactttcctcttgaatgggaacagaggaggcattatatattctagttagatcagctctggtaggttccagagaacagtcaatgttggaaggatgatgcagggaccaaagccatcaggacagagtagcagtgtctgtttcccatgtcacaagtcctctggcctctccctgcatgtcttaagtatctttcccttccttctctaccctcacctccatcctgtctactaatccacagtcctagaagactcaccttgggtttccacagctatggctcactaccaggtgcttgatgaatctggcgaggggctcaagacagacctcatgcatcaccacacctcatgccttttgggcatctcccatgtccccatctcctggacacctggccattgttgtgaagccagacagtgacctcaaatgttgccttggagtcccctacagcccctcagcagagggcagcacttgaatgcttagctccatcccatagttctctacttcatataaattgctcaggccctcccaccccttctctaacactagcttcaaggcagaagccacagcagcctctgtccagcctgcaggtggccacttggaaccatgtgtccactggcgttggggagttggttcctgagaggtctgagggccagagctgccctctacattaacatgctgtctctaagggtggcccctcctctcaggcgttcagatggtgcgaacagcagagcaggcaagggaaactggggagatggggatggaggaggaaggctgatatcctctggggagcacatcacctgaaggtgccaaggaggaaggctgagaggggggccaccccatttctggtacccaatttggttcttcagcccaacttgcaaggggttccttctggtcctcccatccactgccaccttccattttgtccatctcatgctggccttggtggatgggatggctgtatctagacaaaatttttctaaaactccatcaaggctcttattcaataccacgttccgagttggcctttcatcttctttgagactggccctgcctaacctctaccatcaatgagctcttggcccttctgcccttccctgtgtttctcactttccaacctaatccctggctcagggttattgccagtggagactggtgagctgggcctactctcagctgcctatcttctgcctttcacttgcatccaactcctggggctgggaccgtagtagctgcgggggggaagaaacacagggtcggtgagcccagcatgtgcgttggtttgagggggcgggcggtgtgtgtgtgttctggtgggagggatctgagcaagtgcaagcctggctgacacaggtgtgaagaggccatcctggaacccaggtgagggcaagatgaaggcttccaggcagaacagctgcagagagtttggctatatgcatctgcagccccaagagctcccactgcaagacaagtgttggggaagatgggaggttgtgggtgaggcctctaaaggtcctctcccaaactgaccaggctgatgtcaacctaaccccctcaggggcagggaacaggggagggctccacaagcgtgtctggcattcccacccaccatggaagactggatacgcacctggaaacaaaaggactatggaagctgttcaagatacatttgatcttcagaaaagcagaatttggttcaactgttgacagaggacacaaatacgttgttccagagctcagccttctcactctaaaagaaagatatttttctatttattttctacatctggccagtggctctggtgctagatgccactgtagccagatctccaacagtgccttggaccatggactcatactcaactgagtaagaaggggctggtgcccagtcggggtggctgagctggtccttaataggttgtttcttggtcttgctttcttcatgccctccccactgctcctgccacctttagataagtttctctagctaattttgtggccaatgtaaaattcgtcatcaacctaacaaacacaaccttctcagcagcatttctcccctgtgatggaaataaagtgtttagggcagtgggaggagaaaattctccaggtgaatggggaagggtctgttccagcctctccctactcccatcccatttccaccaactggggaactgtgactatctatctcccccgacttctaccagggatgccttcacgccaaggctgttctcaccagctgcctcagatgacaaatgaggctaatggacataatctacagtgtcctttttcacttgcaccttttttataagaatatattgtaatactaaaaaatattaaattcataccatccctacccagtctgcctttaaa

SEQ ID NO: 367002 - DNA, 6435 bp, Homo sapiens
  misc_feature (2282)..(2282): n is a, c, g, or t
cggggatagcgcggagcacgcagcagcgagcggagcgcgggcggcggcgccgtacctcgggctgcgggagcgcgggcgccctggggtcctcggaatcacaatgaggacctagggcatctgtctgctgacgccccctggcctgcagtgaccatggccccccgcaagaggagccaccatggcctgggcttcctgtgctgcttcgggggcagtgacatccccgaaatcaacctccgggacaaccaccctctgcagttcatggagttctccagccccatcccgaacgcagaggagctcaacatccgctttgcagagctggtggatgaattggatctcactgacaaaaaccgagaggctatgtttgcactgccccctgagaagaaatggcagatctactgcagcaagaagaagccctgttctaggtgttggaggaacaacagtgaataaaatagaaaaaggaaattctgctgtcctggagcttacactcaaagaaataggattctctttttcaaaaacgcttaaagcaggacctgctgcatcccaggactggggcttgctgggagacagacaaagaagcagagtctggactctctcgtgcctgctcccaggcatggagggagcaggaggaccccaacaagctggcaaccagctggcctgactattacatcgaccgcatcaattccatggctgcgatgcagagtctgtacgcgtttgatgaggaggagacggagatgaggaaccaagtcgtggaagacctgaagacagccctccggacacagcctatgaggtttgtgacccgcttcattgagctggagggcttgacctgtctgctaaatttcctccggagcatggaccacgccacctgtgagagccgcatccacacctcactcattggctgcatcaaagcattgatgaacaactcccaggggcgggcacatgtgctggcacagcctgaggccattagtaccatagcccagagcctacgcacagagaacagcaagaccaaggtggctgtgctggagatcctgggtgctgtgtgcctcgtgcctggtggccacaagaaggtgctgcaggccatgctgcactaccaggtgtatgcagcagagcgaacccgcttccagaccctgctgaacgagctagaccgaagtctgggccggtaccgggatgaagtgaatctgaaaacagccatcatgtccttcatcaatgctgtcctcaatgctggagctggagaggataatctggagttccgcctacatctacggtatgaattcctgatgctgggtatacagcctgtgattgacaagctccggcaacatgaaaatgccatcctggacaaacatttagacttcttcgagatggtgcggaatgaggatgacctggagctagccaggaggtttgacatggtccacatcgacaccaagagtgcttcccagatgtttgagttgatccacaagaagctgaagtacacggaggcctacccctgcctgctctctgtgctgcaccactgcctgcagatgccctacaaacggaacggtggctacttccagcagtggcagctcctggaccgcatcctccagcagattgtcctccaggatgagcggggtgtggaccctgacctggctcccttggagaacttcaatgtcaagaacatcgtcaacatgctcatcaacgagaatgaagtgaaacagtggcgagaccaggcagagaagttccggaaagaacacatggagcttgtgagccgtctggagaggaaggagcgggaatgcgagacaaagacattggagaaggaagagatgatgcggacgctgaacaaaatgaaggacaagctggcccgggagtcccaggagctgcgccaggctcggggacaagtggcagagctggtagcccagctcagtgaactctcaacaggccctgtatcttccccaccaccccctgggggcccactcaccttgtcttcctcaatgacaaccaatgacctgcctccaccccctcctcctctgccctttgcctgttgtccccctcccccaccaccaccccttcctcccgggggacccccgactcccccaggtgccccaccttgcctcggcatgggcctgcccctccctcaggacccctaccccagcagtgacgtcccactcaggaaaaagcgtgtcccccagccttctcacccactgaagtccttcaactgggtgaagctgaatgaggagcgtgtccctggcaccgtatggaatgagattgatgacatgcaggtatttcggatcctggacctagaggattttgaaaanatgttttcagcctaccagaggcaccaggagctgataactaatccttctcagcagaaagagctgggctccactgaagacatctacctggcttcccgcaaggtcaaagagctgtcggtcattgatggccggagggcccaaaactgcatcatccttctttccaagttgaagctttctaacgaggagatccggcaggccatcttgaagatggatgagcaggaggaccttgctaaggacatgctggagcagctcctcaagttcatcccagagaagagtgacattgacctcctggaggagcacaagcatgaaattgagcggatggcccgtgctgaccgcttcctctatgaaatgagcaggattgaccactaccagcagcgactgcaagccctcttcttcaagaagaaattccaggagcggctggctgaggcaaagcccaaagtggaagccatcctgttggcctcccgggagctggtccgcagcaagcgtcttagacagatgctagaggtcatcctagccataggcaacttcatgaacaaagggcagcgtgggggcgcctacgggttccgggtggccagcctcaacaagatcgctgacaccaagtccagcatcgacagaaacatctctctgctccattacctgatcatgatcctggagaagcattttcctgatattctaaacatgccttcagagctgcaacatcttccagaagctgccaaagtcaacctagcagaactggagaaggaggtgggcaacctcaggaggggcctgagagcggtggaggtggagctggagtatcagaggcgccaggtacgggagcccagtgacaagtttgtccctgtcatgagcgacttcatcacggtgtccagcttcagcttctccgagctggaggaccagctaaatgaggccagggacaagttcgccaaggccttgatgcacttcggggagcatgacagcaagatgcagccagacgaattctttggcatctttgataccttcttgcaggccttctcagaggcccggcaggatctagaggccatgaggaggaggaaggaggaggaggagcggcgggcgcgcatggaagccatgctgaaggagcagagggaacgtgagcggtggcagcggcagcggaaggtcctggctgcaggcagctcgctggaggagggaggagagttcgatgacctggtgtcggccctgcgctctggggaggtcttcgacaaggacttatgcaagctcaagcgcagccgcaagcgatcagggagccaggccctggaagttacccgggagcgggcaataaaccggctaaattattgacctggggaactagccacacaggaggccgggagacagggactggtgagaatggggctgagtggaggaggtggtgatatttaaaccatttggtgcttggtttagagccttgggctgggtcctgggatggggggctgtgtgtggctggaccaggtgtctccccacgcttaccttaaggggctcctcttatctccccttcacatgattccttctgtgccctggccccaggtattattctgaggctgccttggatggcctcaggccaggtaaccccaggctgaaggggccctgctccccatcccctaccatgggcacccatgtgctggcacagaacagttccagatctagactggagaggtccacagccttgtccagagttcctgtgtagcacggggagcaatgatggagggagcccctgagagggaatctggtgagggaatccagactcccttctctcaaggggaggctcaacagaacattgacctgggggcaaactttcctcttgaatgggaacagaggaggcattatatattctagttagatcagctctggtaggttccagagaacagtcaatgttggaaggatgatgcagggaccaaagccatcaggacagagtagcagtgtctgtttcccatgtcacaagtcctctggcctctccctgcatgtcttaagtatctttcccttccttctctaccctcacctccatcctgtctactaatccacagtcctagaagactcaccttgggtttccacagctatggctcactaccaggtgcttgatgaatctggcgaggggctcaagacagacctcatgcatcaccacacctcatgccttttgggcatctcccatgtccccatctcctggacacctggccattgttgtgaagccagacagtgacctcaaatgttgccttggagtcccctacagcccctcagcagagggcagcacttgaatgcttagctccatcccatagttctctacttcatataaattgctcaggccctcccaccccttctctaacactagcttcaaggcagaagccacagcagcctctgtccagcctgcaggtggccacttggaaccatgtgtccactggcgttggggagttggttcctgagaggtctgagggccagagctgccctctacattaacatgctgtctctaagggtggcccctcctctcaggcgttcagatggtgcgaacagcagagcaggcaagggaaactggggagatggggatggaggaggaaggctgatatcctctggggagcacatcacctgaaggtgccaaggaggaaggctgagaggggggccaccccatttctggtacccaatttggttcttcagcccaacttgcaaggggttccttctggtcctcccatccactgccaccttccattttgtccatctcatgctggccttggtggatgggatggctgtatctagacaaaatttttctaaaactccatcaaggctcttattcaataccacgttccgagttggcctttcatcttctttgagactggccctgcctaacctctaccatcaatgagctcttggcccttctgcccttccctgtgtttctcactttccaacctaatccctggctcagggttattgccagtggagactggtgagctgggcctactctcagctgcctatcttctgcctttcacttgcatccaactcctggggctgggaccgtagtagctgcgggggggaagaaacacagggtcggtgagcccagcatgtgcgttggtttgagggggcgggcggtgtgtgtgtgttctggtgggagggatctgagcaagtgcaagcctggctgacacaggtgtgaagaggccatcctggaacccaggtgagggcaagatgaaggcttccaggcagaacagctgcagagagtttggctatatgcatctgcagccccaagagctcccactgcaagacaagtgttggggaagatgggaggttgtgggtgaggcctctaaaggtcctctcccaaactgaccaggctgatgtcaacctaaccccctcaggggcagggaacaggggagggctccacaagcgtgtctggcattcccacccaccatggaagactggatacgcacctggaaacaaaaggactatggaagctgttcaagatacatttgatcttcagaaaagcagaatttggttcaactgttgacagaggacacaaatacgttgttccagagctcagccttctcactctaaaagaaagatatttttctatttattttctacatctggccagtggctctggtgctagatgccactgtagccagatctccaacagtgccttggaccatggactcatactcaactgagtaagaaggggctggtgcccagtcggggtggctgagctggtccttaataggttgtttcttggtcttgctttcttcatgccctccccactgctcctgccacctttagataagtttctctagctaattttgtggccaatgtaaaattcgtcatcaacctaacaaacacaaccttctcagcagcatttctcccctgtgatggaaataaagtgtttagggcagtgggaggagaaaattctccaggtgaatggggaagggtctgttccagcctctccctactcccatcccatttccaccaactggggaactgtgactatctatctcccccgacttctaccagggatgccttcacgccaaggctgttctcaccagctgcctcagatgacaaatgaggctaatggacataatctacagtgtcctttttcacttgcaccttttttataagaatatattgtaatactaaaaaatattaaattcataccatccctacccagtctgcctttaaa

SEQ ID NO: 367003 - DNA, 5531 bp, Homo sapiens
  misc_feature (14)..(14): n is a, c, g, or t
  misc_feature (22)..(22): n is a, c, g, or t
  misc_feature (25)..(25): n is a, c, g, or t
  misc_feature (1378)..(1378): n is a, c, g, or t
tagagcatccccgnctcatttnagntcacatgtgctggcacagcctgaggccattagtaccatagcccagagcctacgcacagagaacagcaagaccaaggtggctgtgctggagatcctgggtgctgtgtgcctcgtgcctggtggccacaagaaggtgctgcaggccatgctgcactaccaggtgtatgcagcagagcgaacccgcttccagaccctgctgaacgagctagaccgaagtctgggccggtaccgggatgaagtgaatctgaaaacagccatcatgtccttcatcaatgctgtcctcaatgctggagctggagaggataatctggagttccgcctacatctacggtatgaattcctgatgctgggtatacagcctgtgattgacaagctccggcaacatgaaaatgccatcctggacaaacatttagacttcttcgagatggtgcggaatgaggatgacctggagctagccaggaggtttgacatggtccacatcgacaccaagagtgcttcccagatgtttgagttgatccacaagaagctgaagtacacggaggcctacccctgcctgctctctgtgctgcaccactgcctgcagatgccctacaaacggaacggtggctacttccagcagtggcagctcctggaccgcatcctccagcagattgtcctccaggatgagcggggtgtggaccctgacctggctcccttggagaacttcaatgtcaagaacatcgtcaacatgctcatcaacgagaatgaagtgaaacagtggcgagaccaggcagagaagttccggaaagaacacatggagcttgtgagccgtctggagaggaaggagcgggaatgcgagacaaagacattggagaaggaagagatgatgcggacgctgaacaaaatgaaggacaagctggcccgggagtcccaggagctgcgccaggctcggggacaagtggcagagctggtagcccagctcagtgaactctcaacaggccctgtatcttccccaccaccccctgggggcccactcaccttgtcttcctcaatgacaaccaatgacctgcctccaccccctcctcctctgccctttgcctgttgtccccctcccccaccaccaccccttcctcccgggggacccccgactcccccaggtgccccaccttgcctcggcatgggcctgcccctccctcaggacccctaccccagcagtgacgtcccactcaggaaaaagcgtgtcccccagccttctcacccactgaagtccttcaactgggtgaagctgaatgaggagcgtgtccctggcaccgtatggaatgagattgatgacatgcaggtatttcggatcctggacctagaggattttgaaaanatgttttcagcctaccagaggcaccaggagctgataactaatccttctcagcagaaagagctgggctccactgaagacatctacctggcttcccgcaaggtcaaagagctgtcggtcattgatggccggagggcccaaaactgcatcatccttctttccaagttgaagctttctaacgaggagatccggcaggccatcttgaagatggatgagcaggaggaccttgctaaggacatgctggagcagctcctcaagttcatcccagagaagagtgacattgacctcctggaggagcacaagcatgaaattgagcggatggcccgtgctgaccgcttcctctatgaaatgagcaggattgaccactaccagcagcgactgcaagccctcttcttcaagaagaaattccaggagcggctggctgaggcaaagcccaaagtggaagccatcctgttggcctcccgggagctggtccgcagcaagcgtcttagacagatgctagaggtcatcctagccataggcaacttcatgaacaaagggcagcgtgggggcgcctacgggttccgggtggccagcctcaacaagatcgctgacaccaagtccagcatcgacagaaacatctctctgctccattacctgatcatgatcctggagaagcattttcctgatattctaaacatgccttcagagctgcaacatcttccagaagctgccaaagtcaacctagcagaactggagaaggaggtgggcaacctcaggaggggcctgagagcggtggaggtggagctggagtatcagaggcgccaggtacgggagcccagtgacaagtttgtccctgtcatgagcgacttcatcacggtgtccagcttcagcttctccgagctggaggaccagctaaatgaggccagggacaagttcgccaaggccttgatgcacttcggggagcatgacagcaagatgcagccagacgaattctttggcatctttgataccttcttgcaggccttctcagaggcccggcaggatctagaggccatgaggaggaggaaggaggaggaggagcggcgggcgcgcatggaagccatgctgaaggagcagagggaacgtgagcggtggcagcggcagcggaaggtcctggctgcaggcagctcgctggaggagggaggagagttcgatgacctggtgtcggccctgcgctctggggaggtcttcgacaaggacttatgcaagctcaagcgcagccgcaagcgatcagggagccaggccctggaagttacccgggagcgggcaataaaccggctaaattattgacctggggaactagccacacaggaggccgggagacagggactggtgagaatggggctgagtggaggaggtggtgatatttaaaccatttggtgcttggtttagagccttgggctgggtcctgggatggggggctgtgtgtggctggaccaggtgtctccccacgcttaccttaaggggctcctcttatctccccttcacatgattccttctgtgccctggccccaggtattattctgaggctgccttggatggcctcaggccaggtaaccccaggctgaaggggccctgctccccatcccctaccatgggcacccatgtgctggcacagaacagttccagatctagactggagaggtccacagccttgtccagagttcctgtgtagcacggggagcaatgatggagggagcccctgagagggaatctggtgagggaatccagactcccttctctcaaggggaggctcaacagaacattgacctgggggcaaactttcctcttgaatgggaacagaggaggcattatatattctagttagatcagctctggtaggttccagagaacagtcaatgttggaaggatgatgcagggaccaaagccatcaggacagagtagcagtgtctgtttcccatgtcacaagtcctctggcctctccctgcatgtcttaagtatctttcccttccttctctaccctcacctccatcctgtctactaatccacagtcctagaagactcaccttgggtttccacagctatggctcactaccaggtgcttgatgaatctggcgaggggctcaagacagacctcatgcatcaccacacctcatgccttttgggcatctcccatgtccccatctcctggacacctggccattgttgtgaagccagacagtgacctcaaatgttgccttggagtcccctacagcccctcagcagagggcagcacttgaatgcttagctccatcccatagttctctacttcatataaattgctcaggccctcccaccccttctctaacactagcttcaaggcagaagccacagcagcctctgtccagcctgcaggtggccacttggaaccatgtgtccactggcgttggggagttggttcctgagaggtctgagggccagagctgccctctacattaacatgctgtctctaagggtggcccctcctctcaggcgttcagatggtgcgaacagcagagcaggcaagggaaactggggagatggggatggaggaggaaggctgatatcctctggggagcacatcacctgaaggtgccaaggaggaaggctgagaggggggccaccccatttctggtacccaatttggttcttcagcccaacttgcaaggggttccttctggtcctcccatccactgccaccttccattttgtccatctcatgctggccttggtggatgggatggctgtatctagacaaaatttttctaaaactccatcaaggctcttattcaataccacgttccgagttggcctttcatcttctttgagactggccctgcctaacctctaccatcaatgagctcttggcccttctgcccttccctgtgtttctcactttccaacctaatccctggctcagggttattgccagtggagactggtgagctgggcctactctcagctgcctatcttctgcctttcacttgcatccaactcctggggctgggaccgtagtagctgcgggggggaagaaacacagggtcggtgagcccagcatgtgcgttggtttgagggggcgggcggtgtgtgtgtgttctggtgggagggatctgagcaagtgcaagcctggctgacacaggtgtgaagaggccatcctggaacccaggtgagggcaagatgaaggcttccaggcagaacagctgcagagagtttggctatatgcatctgcagccccaagagctcccactgcaagacaagtgttggggaagatgggaggttgtgggtgaggcctctaaaggtcctctcccaaactgaccaggctgatgtcaacctaaccccctcaggggcagggaacaggggagggctccacaagcgtgtctggcattcccacccaccatggaagactggatacgcacctggaaacaaaaggactatggaagctgttcaagatacatttgatcttcagaaaagcagaatttggttcaactgttgacagaggacacaaatacgttgttccagagctcagccttctcactctaaaagaaagatatttttctatttattttctacatctggccagtggctctggtgctagatgccactgtagccagatctccaacagtgccttggaccatggactcatactcaactgagtaagaaggggctggtgcccagtcggggtggctgagctggtccttaataggttgtttcttggtcttgctttcttcatgccctccccactgctcctgccacctttagataagtttctctagctaattttgtggccaatgtaaaattcgtcatcaacctaacaaacacaaccttctcagcagcatttctcccctgtgatggaaataaagtgtttagggcagtgggaggagaaaattctccaggtgaatggggaagggtctgttccagcctctccctactcccatcccatttccaccaactggggaactgtgactatctatctcccccgacttctaccagggatgccttcacgccaaggctgttctcaccagctgcctcagatgacaaatgaggctaatggacataatctacagtgtcctttttcacttgcaccttttttataagaatatattgtaatactaaaaaatattaaattcataccatccctacccagtctgcctttaaa

SEQ ID NO: 367004 - DNA, 6584 bp, Homo sapiens
  misc_feature (2458)..(2458): n is a, c, g, or t
ccctgcctgaggctcacagtacaagtcagtcaaattgttcagggcagcagtggtgtctggagacctggtttgagttcctaggttcatacctagcgtccttctgagcctcaagtttcttcatctgtaaaaagagaagatgaaagtttgagataaacctcgaacatgatcacaatgaggacctagggcatctgtctgctgacgccccctggcctgcagtgaccatggccccccgcaagaggagccaccatggcctgggcttcctgtgctgcttcgggggcagtgacatccccgaaatcaacctccgggacaaccaccctctgcagttcatggagttctccagccccatcccgaacgcagaggagctcaacatccgctttgcagagctggtggatgaattggatctcactgacaaaaaccgagaggctatgtttgcactgccccctgagaagaaatggcagatctactgcagcaagaagaaggtgccctctctgacccctctggccacatctcagggttcatggcatggggtggctcttgctgccttggcatgctcatgcattcacctgatgtttattacatgccagccctgttctaggtgttggaggaacaacagtgaataaaatagaaaaaggaaattctgctgtcctggagcttacactcaaagaaataggattctctttttcaaaaacgcttaaagcaggacctgctgcatcccaggactggggcttgctgggagacagacaaagaagcagagtctggactctctcgtgcctgctcccaggcatggagggagcaggaggaccccaacaagctggcaaccagctggcctgactattacatcgaccgcatcaattccatggctgcgatgcagagtctgtacgcgtttgatgaggaggagacggagatgaggaaccaagtcgtggaagacctgaagacagccctccggacacagcctatgaggtttgtgacccgcttcattgagctggagggcttgacctgtctgctaaatttcctccggagcatggaccacgccacctgtgagagccgcatccacacctcactcattggctgcatcaaagcattgatgaacaactcccaggggcgggcacatgtgctggcacagcctgaggccattagtaccatagcccagagcctacgcacagagaacagcaagaccaaggtggctgtgctggagatcctgggtgctgtgtgcctcgtgcctggtggccacaagaaggtgctgcaggccatgctgcactaccaggtgtatgcagcagagcgaacccgcttccagaccctgctgaacgagctagaccgaagtctgggccggtaccgggatgaagtgaatctgaaaacagccatcatgtccttcatcaatgctgtcctcaatgctggagctggagaggataatctggagttccgcctacatctacggtatgaattcctgatgctgggtatacagcctgtgattgacaagctccggcaacatgaaaatgccatcctggacaaacatttagacttcttcgagatggtgcggaatgaggatgacctggagctagccaggaggtttgacatggtccacatcgacaccaagagtgcttcccagatgtttgagttgatccacaagaagctgaagtacacggaggcctacccctgcctgctctctgtgctgcaccactgcctgcagatgccctacaaacggaacggtggctacttccagcagtggcagctcctggaccgcatcctccagcagattgtcctccaggatgagcggggtgtggaccctgacctggctcccttggagaacttcaatgtcaagaacatcgtcaacatgctcatcaacgagaatgaagtgaaacagtggcgagaccaggcagagaagttccggaaagaacacatggagcttgtgagccgtctggagaggaaggagcgggaatgcgagacaaagacattggagaaggaagagatgatgcggacgctgaacaaaatgaaggacaagctggcccgggagtcccaggagctgcgccaggctcggggacaagtggcagagctggtagcccagctcagtgaactctcaacaggccctgtatcttccccaccaccccctgggggcccactcaccttgtcttcctcaatgacaaccaatgacctgcctccaccccctcctcctctgccctttgcctgttgtccccctcccccaccaccaccccttcctcccgggggacccccgactcccccaggtgccccaccttgcctcggcatgggcctgcccctccctcaggacccctaccccagcagtgacgtcccactcaggaaaaagcgtgtcccccagccttctcacccactgaagtccttcaactgggtgaagctgaatgaggagcgtgtccctggcaccgtatggaatgagattgatgacatgcaggtatttcggatcctggacctagaggattttgaaaanatgttttcagcctaccagaggcaccagaaagagctgggctccactgaagacatctacctggcttcccgcaaggtcaaagagctgtcggtcattgatggccggagggcccaaaactgcatcatccttctttccaagttgaagctttctaacgaggagatccggcaggccatcttgaagatggatgagcaggaggaccttgctaaggacatgctggagcagctcctcaagttcatcccagagaagagtgacattgacctcctggaggagcacaagcatgaaattgagcggatggcccgtgctgaccgcttcctctatgaaatgagcaggattgaccactaccagcagcgactgcaagccctcttcttcaagaagaaattccaggagcggctggctgaggcaaagcccaaagtggaagccatcctgttggcctcccgggagctggtccgcagcaagcgtcttagacagatgctagaggtcatcctagccataggcaacttcatgaacaaagggcagcgtgggggcgcctacgggttccgggtggccagcctcaacaagatcgctgacaccaagtccagcatcgacagaaacatctctctgctccattacctgatcatgatcctggagaagcattttcctgatattctaaacatgccttcagagctgcaacatcttccagaagctgccaaagtcaacctagcagaactggagaaggaggtgggcaacctcaggaggggcctgagagcggtggaggtggagctggagtatcagaggcgccaggtacgggagcccagtgacaagtttgtccctgtcatgagcgacttcatcacggtgtccagcttcagcttctccgagctggaggaccagctaaatgaggccagggacaagttcgccaaggccttgatgcacttcggggagcatgacagcaagatgcagccagacgaattctttggcatctttgataccttcttgcaggccttctcagaggcccggcaggatctagaggccatgaggaggaggaaggaggaggaggagcggcgggcgcgcatggaagccatgctgaaggagcagagggaacgtgagcggtggcagcggcagcggaaggtcctggctgcaggcagctcgctggaggagggaggagagttcgatgacctggtgtcggccctgcgctctggggaggtcttcgacaaggacttatgcaagctcaagcgcagccgcaagcgatcagggagccaggccctggaagttacccgggagcgggcaataaaccggctaaattattgacctggggaactagccacacaggaggccgggagacagggactggtgagaatggggctgagtggaggaggtggtgatatttaaaccatttggtgcttggtttagagccttgggctgggtcctgggatggggggctgtgtgtggctggaccaggtgtctccccacgcttaccttaaggggctcctcttatctccccttcacatgattccttctgtgccctggccccaggtattattctgaggctgccttggatggcctcaggccaggtaaccccaggctgaaggggccctgctccccatcccctaccatgggcacccatgtgctggcacagaacagttccagatctagactggagaggtccacagccttgtccagagttcctgtgtagcacggggagcaatgatggagggagcccctgagagggaatctggtgagggaatccagactcccttctctcaaggggaggctcaacagaacattgacctgggggcaaactttcctcttgaatgggaacagaggaggcattatatattctagttagatcagctctggtaggttccagagaacagtcaatgttggaaggatgatgcagggaccaaagccatcaggacagagtagcagtgtctgtttcccatgtcacaagtcctctggcctctccctgcatgtcttaagtatctttcccttccttctctaccctcacctccatcctgtctactaatccacagtcctagaagactcaccttgggtttccacagctatggctcactaccaggtgcttgatgaatctggcgaggggctcaagacagacctcatgcatcaccacacctcatgccttttgggcatctcccatgtccccatctcctggacacctggccattgttgtgaagccagacagtgacctcaaatgttgccttggagtcccctacagcccctcagcagagggcagcacttgaatgcttagctccatcccatagttctctacttcatataaattgctcaggccctcccaccccttctctaacactagcttcaaggcagaagccacagcagcctctgtccagcctgcaggtggccacttggaaccatgtgtccactggcgttggggagttggttcctgagaggtctgagggccagagctgccctctacattaacatgctgtctctaagggtggcccctcctctcaggcgttcagatggtgcgaacagcagagcaggcaagggaaactggggagatggggatggaggaggaaggctgatatcctctggggagcacatcacctgaaggtgccaaggaggaaggctgagaggggggccaccccatttctggtacccaatttggttcttcagcccaacttgcaaggggttccttctggtcctcccatccactgccaccttccattttgtccatctcatgctggccttggtggatgggatggctgtatctagacaaaatttttctaaaactccatcaaggctcttattcaataccacgttccgagttggcctttcatcttctttgagactggccctgcctaacctctaccatcaatgagctcttggcccttctgcccttccctgtgtttctcactttccaacctaatccctggctcagggttattgccagtggagactggtgagctgggcctactctcagctgcctatcttctgcctttcacttgcatccaactcctggggctgggaccgtagtagctgcgggggggaagaaacacagggtcggtgagcccagcatgtgcgttggtttgagggggcgggcggtgtgtgtgtgttctggtgggagggatctgagcaagtgcaagcctggctgacacaggtgtgaagaggccatcctggaacccaggtgagggcaagatgaaggcttccaggcagaacagctgcagagagtttggctatatgcatctgcagccccaagagctcccactgcaagacaagtgttggggaagatgggaggttgtgggtgaggcctctaaaggtcctctcccaaactgaccaggctgatgtcaacctaaccccctcaggggcagggaacaggggagggctccacaagcgtgtctggcattcccacccaccatggaagactggatacgcacctggaaacaaaaggactatggaagctgttcaagatacatttgatcttcagaaaagcagaatttggttcaactgttgacagaggacacaaatacgttgttccagagctcagccttctcactctaaaagaaagatatttttctatttattttctacatctggccagtggctctggtgctagatgccactgtagccagatctccaacagtgccttggaccatggactcatactcaactgagtaagaaggggctggtgcccagtcggggtggctgagctggtccttaataggttgtttcttggtcttgctttcttcatgccctccccactgctcctgccacctttagataagtttctctagctaattttgtggccaatgtaaaattcgtcatcaacctaacaaacacaaccttctcagcagcatttctcccctgtgatggaaataaagtgtttagggcagtgggaggagaaaattctccaggtgaatggggaagggtctgttccagcctctccctactcccatcccatttccaccaactggggaactgtgactatctatctcccccgacttctaccagggatgccttcacgccaaggctgttctcaccagctgcctcagatgacaaatgaggctaatggacataatctacagtgtcctttttcacttgcaccttttttataagaatatattgtaatactaaaaaatattaaattcataccatccctacccagtctgcctttaaa

SEQ ID NO: 367005 - DNA, 5142 bp, Homo sapiens
  misc_feature (1016)..(1016): n is a, c, g, or t
gcctaagtggaactgctccggcctaagtggaactgctccggcaacatgaaaatgccatcctggacaaacatttagacttcttcgagatggtgcggaatgaggatgacctggagctagccaggaggtttgacatggtccacatcgacaccaagagtgcttcccagatgtttgagttgatccacaagaagctgaagtacacggaggcctacccctgcctgctctctgtgctgcaccactgcctgcagatgccctacaaacggaacggtggctacttccagcagtggcagctcctggaccgcatcctccagcagattgtcctccaggatgagcggggtgtggaccctgacctggctcccttggagaacttcaatgtcaagaacatcgtcaacatgctcatcaacgagaatgaagtgaaacagtggcgagaccaggcagagaagttccggaaagaacacatggagcttgtgagccgtctggagaggaaggagcgggaatgcgagacaaagacattggagaaggaagagatgatgcggacgctgaacaaaatgaaggacaagctggcccgggagtcccaggagctgcgccaggctcggggacaagtggcagagctggtagcccagctcagtgaactctcaacaggccctgtatcttccccaccaccccctgggggcccactcaccttgtcttcctcaatgacaaccaatgacctgcctccaccccctcctcctctgccctttgcctgttgtccccctcccccaccaccaccccttcctcccgggggacccccgactcccccaggtgccccaccttgcctcggcatgggcctgcccctccctcaggacccctaccccagcagtgacgtcccactcaggaaaaagcgtgtcccccagccttctcacccactgaagtccttcaactgggtgaagctgaatgaggagcgtgtccctggcaccgtatggaatgagattgatgacatgcaggtatttcggatcctggacctagaggattttgaaaanatgttttcagcctaccagaggcaccagaaagagctgggctccactgaagacatctacctggcttcccgcaaggtcaaagagctgtcggtcattgatggccggagggcccaaaactgcatcatccttctttccaagttgaagctttctaacgaggagatccggcaggccatcttgaagatggatgagcaggaggaccttgctaaggacatgctggagcagctcctcaagttcatcccagagaagagtgacattgacctcctggaggagcacaagcatgaaattgagcggatggcccgtgctgaccgcttcctctatgaaatgagcaggattgaccactaccagcagcgactgcaagccctcttcttcaagaagaaattccaggagcggctggctgaggcaaagcccaaagtggaagccatcctgttggcctcccgggagctggtccgcagcaagcgtcttagacagatgctagaggtcatcctagccataggcaacttcatgaacaaagggcagcgtgggggcgcctacgggttccgggtggccagcctcaacaagatcgctgacaccaagtccagcatcgacagaaacatctctctgctccattacctgatcatgatcctggagaagcattttcctgatattctaaacatgccttcagagctgcaacatcttccagaagctgccaaagtcaacctagcagaactggagaaggaggtgggcaacctcaggaggggcctgagagcggtggaggtggagctggagtatcagaggcgccaggtacgggagcccagtgacaagtttgtccctgtcatgagcgacttcatcacggtgtccagcttcagcttctccgagctggaggaccagctaaatgaggccagggacaagttcgccaaggccttgatgcacttcggggagcatgacagcaagatgcagccagacgaattctttggcatctttgataccttcttgcaggccttctcagaggcccggcaggatctagaggccatgaggaggaggaaggaggaggaggagcggcgggcgcgcatggaagccatgctgaaggagcagagggaacgtgagcggtggcagcggcagcggaaggtcctggctgcaggcagctcgctggaggagggaggagagttcgatgacctggtgtcggccctgcgctctggggaggtcttcgacaaggacttatgcaagctcaagcgcagccgcaagcgatcagggagccaggccctggaagttacccgggagcgggcaataaaccggctaaattattgacctggggaactagccacacaggaggccgggagacagggactggtgagaatggggctgagtggaggaggtggtgatatttaaaccatttggtgcttggtttagagccttgggctgggtcctgggatggggggctgtgtgtggctggaccaggtgtctccccacgcttaccttaaggggctcctcttatctccccttcacatgattccttctgtgccctggccccaggtattattctgaggctgccttggatggcctcaggccaggtaaccccaggctgaaggggccctgctccccatcccctaccatgggcacccatgtgctggcacagaacagttccagatctagactggagaggtccacagccttgtccagagttcctgtgtagcacggggagcaatgatggagggagcccctgagagggaatctggtgagggaatccagactcccttctctcaaggggaggctcaacagaacattgacctgggggcaaactttcctcttgaatgggaacagaggaggcattatatattctagttagatcagctctggtaggttccagagaacagtcaatgttggaaggatgatgcagggaccaaagccatcaggacagagtagcagtgtctgtttcccatgtcacaagtcctctggcctctccctgcatgtcttaagtatctttcccttccttctctaccctcacctccatcctgtctactaatccacagtcctagaagactcaccttgggtttccacagctatggctcactaccaggtgcttgatgaatctggcgaggggctcaagacagacctcatgcatcaccacacctcatgccttttgggcatctcccatgtccccatctcctggacacctggccattgttgtgaagccagacagtgacctcaaatgttgccttggagtcccctacagcccctcagcagagggcagcacttgaatgcttagctccatcccatagttctctacttcatataaattgctcaggccctcccaccccttctctaacactagcttcaaggcagaagccacagcagcctctgtccagcctgcaggtggccacttggaaccatgtgtccactggcgttggggagttggttcctgagaggtctgagggccagagctgccctctacattaacatgctgtctctaagggtggcccctcctctcaggcgttcagatggtgcgaacagcagagcaggcaagggaaactggggagatggggatggaggaggaaggctgatatcctctggggagcacatcacctgaaggtgccaaggaggaaggctgagaggggggccaccccatttctggtacccaatttggttcttcagcccaacttgcaaggggttccttctggtcctcccatccactgccaccttccattttgtccatctcatgctggccttggtggatgggatggctgtatctagacaaaatttttctaaaactccatcaaggctcttattcaataccacgttccgagttggcctttcatcttctttgagactggccctgcctaacctctaccatcaatgagctcttggcccttctgcccttccctgtgtttctcactttccaacctaatccctggctcagggttattgccagtggagactggtgagctgggcctactctcagctgcctatcttctgcctttcacttgcatccaactcctggggctgggaccgtagtagctgcgggggggaagaaacacagggtcggtgagcccagcatgtgcgttggtttgagggggcgggcggtgtgtgtgtgttctggtgggagggatctgagcaagtgcaagcctggctgacacaggtgtgaagaggccatcctggaacccaggtgagggcaagatgaaggcttccaggcagaacagctgcagagagtttggctatatgcatctgcagccccaagagctcccactgcaagacaagtgttggggaagatgggaggttgtgggtgaggcctctaaaggtcctctcccaaactgaccaggctgatgtcaacctaaccccctcaggggcagggaacaggggagggctccacaagcgtgtctggcattcccacccaccatggaagactggatacgcacctggaaacaaaaggactatggaagctgttcaagatacatttgatcttcagaaaagcagaatttggttcaactgttgacagaggacacaaatacgttgttccagagctcagccttctcactctaaaagaaagatatttttctatttattttctacatctggccagtggctctggtgctagatgccactgtagccagatctccaacagtgccttggaccatggactcatactcaactgagtaagaaggggctggtgcccagtcggggtggctgagctggtccttaataggttgtttcttggtcttgctttcttcatgccctccccactgctcctgccacctttagataagtttctctagctaattttgtggccaatgtaaaattcgtcatcaacctaacaaacacaaccttctcagcagcatttctcccctgtgatggaaataaagtgtttagggcagtgggaggagaaaattctccaggtgaatggggaagggtctgttccagcctctccctactcccatcccatttccaccaactggggaactgtgactatctatctcccccgacttctaccagggatgccttcacgccaaggctgttctcaccagctgcctcagatgacaaatgaggctaatggacataatctacagtgtcctttttcacttgcaccttttttataagaatatattgtaatactaaaaaatattaaattcataccatccctacccagtctgcctttaaa

SEQ ID NO: 367006 - DNA, 6399 bp, Homo sapiens
  misc_feature (2458)..(2458): n is a, c, g, or t
ccctgcctgaggctcacagtacaagtcagtcaaattgttcagggcagcagtggtgtctggagacctggtttgagttcctaggttcatacctagcgtccttctgagcctcaagtttcttcatctgtaaaaagagaagatgaaagtttgagataaacctcgaacatgatcacaatgaggacctagggcatctgtctgctgacgccccctggcctgcagtgaccatggccccccgcaagaggagccaccatggcctgggcttcctgtgctgcttcgggggcagtgacatccccgaaatcaacctccgggacaaccaccctctgcagttcatggagttctccagccccatcccgaacgcagaggagctcaacatccgctttgcagagctggtggatgaattggatctcactgacaaaaaccgagaggctatgtttgcactgccccctgagaagaaatggcagatctactgcagcaagaagaaggtgccctctctgacccctctggccacatctcagggttcatggcatggggtggctcttgctgccttggcatgctcatgcattcacctgatgtttattacatgccagccctgttctaggtgttggaggaacaacagtgaataaaatagaaaaaggaaattctgctgtcctggagcttacactcaaagaaataggattctctttttcaaaaacgcttaaagcaggacctgctgcatcccaggactggggcttgctgggagacagacaaagaagcagagtctggactctctcgtgcctgctcccaggcatggagggagcaggaggaccccaacaagctggcaaccagctggcctgactattacatcgaccgcatcaattccatggctgcgatgcagagtctgtacgcgtttgatgaggaggagacggagatgaggaaccaagtcgtggaagacctgaagacagccctccggacacagcctatgaggtttgtgacccgcttcattgagctggagggcttgacctgtctgctaaatttcctccggagcatggaccacgccacctgtgagagccgcatccacacctcactcattggctgcatcaaagcattgatgaacaactcccaggggcgggcacatgtgctggcacagcctgaggccattagtaccatagcccagagcctacgcacagagaacagcaagaccaaggtggctgtgctggagatcctgggtgctgtgtgcctcgtgcctggtggccacaagaaggtgctgcaggccatgctgcactaccaggtgtatgcagcagagcgaacccgcttccagaccctgctgaacgagctagaccgaagtctgggccggtaccgggatgaagtgaatctgaaaacagccatcatgtccttcatcaatgctgtcctcaatgctggagctggagaggataatctggagttccgcctacatctacggtatgaattcctgatgctgggtatacagcctgtgattgacaagctccggcaacatgaaaatgccatcctggacaaacatttagacttcttcgagatggtgcggaatgaggatgacctggagctagccaggaggtttgacatggtccacatcgacaccaagagtgcttcccagatgtttgagttgatccacaagaagctgaagtacacggaggcctacccctgcctgctctctgtgctgcaccactgcctgcagatgccctacaaacggaacggtggctacttccagcagtggcagctcctggaccgcatcctccagcagattgtcctccaggatgagcggggtgtggaccctgacctggctcccttggagaacttcaatgtcaagaacatcgtcaacatgctcatcaacgagaatgaagtgaaacagtggcgagaccaggcagagaagttccggaaagaacacatggagcttgtgagccgtctggagaggaaggagcgggaatgcgagacaaagacattggagaaggaagagatgatgcggacgctgaacaaaatgaaggacaagctggcccgggagtcccaggagctgcgccaggctcggggacaagtggcagagctggtagcccagctcagtgaactctcaacaggccctgtatcttccccaccaccccctgggggcccactcaccttgtcttcctcaatgacaaccaatgacctgcctccaccccctcctcctctgccctttgcctgttgtccccctcccccaccaccaccccttcctcccgggggacccccgactcccccaggtgccccaccttgcctcggcatgggcctgcccctccctcaggacccctaccccagcagtgacgtcccactcaggaaaaagcgtgtcccccagccttctcacccactgaagtccttcaactgggtgaagctgaatgaggagcgtgtccctggcaccgtatggaatgagattgatgacatgcaggtatttcggatcctggacctagaggattttgaaaanatgttttcagcctaccagaggcaccagaaagagctgggctccactgaagacatctacctggcttcccgcaaggtcaaagagctgtcggtcattgatggccggagggcccaaaactgcatcatccttctttccaagttgaagctttctaacgaggagatccggcaggccatcttgaagatggatgagcaggaggaccttgctaaggacatgctggagcagctcctcaagttcatcccagagaagagtgacattgacctcctggaggagcacaagcatgaaattgagcggatggcccgtgctgaccgcttcctctatgaaatgagcaggattgaccactaccagcagcgactgcaagccctcttcttcaagaagaaattccaggagcggctggctgaggcaaagcccaaagtggaagccatcctgttggcctcccgggagctggtccgcagcaagcgtcttagacagatgctagaggtcatcctagccataggcaacttcatgaacaaagggcagcgtgggggcgcctacgggttccgggtggccagcctcaacaagatcgctgacaccaagtccagcatcgacagaaacatctctctgctccattacctgatcatgatcctggagaagcattttcctgatattctaaacatgccttcagagctgcaacatcttccagaagctgccaaagtcaacctagcagaactggagaaggaggtgggcaacctcaggaggggcctgagagcggtggaggtggagctggagtatcagaggcgccaggtacgggagcccagtgacaagtttgtccctgtcatgagcgacttcatcacggtgtccagcttcagcttctccgagctggaggaccagctaaatgaggccagggacaagttcgccaaggccttgatgcacttcggggagcatgacagcaagatgcagccagacgaattctttggcatctttgataccttcttgcaggccttctcagaggcccggcaggatctagaggccatgaggaggaggaaggaggaggaggagcggcgggcgcgcatggaagccatgctgaaggagcagagggaacgtgagcggtggcagcggcagcggaaggtcctggctgcaggcagctcgctggaggagggaggagagttcgatgacctggtgtcggccctgcgctctggggaggtcttcgacaaggacttatgcaagctcaagcgcagccgcaagcgatcagggagccaggccctggaagttacccgggagcgggcaataaaccggctaaattattgacctggggaactagccacacaggaggccgggagacagggactggtgagaatggggctgagtggaggaggtggtgatatttaaaccatttggtgcttggtttagagccttgggctgggtcctgggatggggggctgtgtgtggctggaccaggtgtctccccacgcttaccttaaggggctcctcttatctccccttcacatgattccttctgtgccctggccccaggtattattctgaggctgccttggatggcctcaggccaggtaaccccaggctgaaggggccctgctccccatcccctaccatgggcacccatgtgctggcacagaacagttccagatctagactggagaggtccacagccttgtccagagttcctgtgtagcacggggagcaatgatggagggagcccctgagagggaatctggtgagggaatccagactcccttctctcaaggggaggctcaacagaacattgacctgggggcaaactttcctcttgaatgggaacagaggaggcattatatattctagttagatcagctctggtaggttccagagaacagtcaatgttggaaggatgatgcagggaccaaagccatcaggacagagtagcagtgtctgtttcccatgtcacaagtcctctggcctctccctgcatgtcttaagtatctttcccttccttctctaccctcacctccatcctgtctactaatccacagtcctagaagactcaccttgggtttccacagctatggctcactaccaggtgcttgatgaatctggcgaggggctcaagacagacctcatgcatcaccacacctcatgccttttgggcatctcccatgtccccatctcctggacacctggccattgttgtgaagccagacagtgacctcaaatgttgccttggagtcccctacagcccctcagcagagggcagcacttgaatgcttagctccatcccatagttctctacttcatataaattgctcaggcgttcagatggtgcgaacagcagagcaggcaagggaaactggggagatggggatggaggaggaaggctgatatcctctggggagcacatcacctgaaggtgccaaggaggaaggctgagaggggggccaccccatttctggtacccaatttggttcttcagcccaacttgcaaggggttccttctggtcctcccatccactgccaccttccattttgtccatctcatgctggccttggtggatgggatggctgtatctagacaaaatttttctaaaactccatcaaggctcttattcaataccacgttccgagttggcctttcatcttctttgagactggccctgcctaacctctaccatcaatgagctcttggcccttctgcccttccctgtgtttctcactttccaacctaatccctggctcagggttattgccagtggagactggtgagctgggcctactctcagctgcctatcttctgcctttcacttgcatccaactcctggggctgggaccgtagtagctgcgggggggaagaaacacagggtcggtgagcccagcatgtgcgttggtttgagggggcgggcggtgtgtgtgtgttctggtgggagggatctgagcaagtgcaagcctggctgacacaggtgtgaagaggccatcctggaacccaggtgagggcaagatgaaggcttccaggcagaacagctgcagagagtttggctatatgcatctgcagccccaagagctcccactgcaagacaagtgttggggaagatgggaggttgtgggtgaggcctctaaaggtcctctcccaaactgaccaggctgatgtcaacctaaccccctcaggggcagggaacaggggagggctccacaagcgtgtctggcattcccacccaccatggaagactggatacgcacctggaaacaaaaggactatggaagctgttcaagatacatttgatcttcagaaaagcagaatttggttcaactgttgacagaggacacaaatacgttgttccagagctcagccttctcactctaaaagaaagatatttttctatttattttctacatctggccagtggctctggtgctagatgccactgtagccagatctccaacagtgccttggaccatggactcatactcaactgagtaagaaggggctggtgcccagtcggggtggctgagctggtccttaataggttgtttcttggtcttgctttcttcatgccctccccactgctcctgccacctttagataagtttctctagctaattttgtggccaatgtaaaattcgtcatcaacctaacaaacacaaccttctcagcagcatttctcccctgtgatggaaataaagtgtttagggcagtgggaggagaaaattctccaggtgaatggggaagggtctgttccagcctctccctactcccatcccatttccaccaactggggaactgtgactatctatctcccccgacttctaccagggatgccttcacgccaaggctgttctcaccagctgcctcagatgacaaatgaggctaatggacataatctacagtgtcctttttcacttgcaccttttttataagaatatattgtaatactaaaaaatattaaattcataccatccctacccagtctgcctttaaa

SEQ ID NO: 367007 - DNA, 6418 bp, Homo sapiens
  misc_feature (2458)..(2458): n is a, c, g, or t
ccctgcctgaggctcacagtacaagtcagtcaaattgttcagggcagcagtggtgtctggagacctggtttgagttcctaggttcatacctagcgtccttctgagcctcaagtttcttcatctgtaaaaagagaagatgaaagtttgagataaacctcgaacatgatcacaatgaggacctagggcatctgtctgctgacgccccctggcctgcagtgaccatggccccccgcaagaggagccaccatggcctgggcttcctgtgctgcttcgggggcagtgacatccccgaaatcaacctccgggacaaccaccctctgcagttcatggagttctccagccccatcccgaacgcagaggagctcaacatccgctttgcagagctggtggatgaattggatctcactgacaaaaaccgagaggctatgtttgcactgccccctgagaagaaatggcagatctactgcagcaagaagaaggtgccctctctgacccctctggccacatctcagggttcatggcatggggtggctcttgctgccttggcatgctcatgcattcacctgatgtttattacatgccagccctgttctaggtgttggaggaacaacagtgaataaaatagaaaaaggaaattctgctgtcctggagcttacactcaaagaaataggattctctttttcaaaaacgcttaaagcaggacctgctgcatcccaggactggggcttgctgggagacagacaaagaagcagagtctggactctctcgtgcctgctcccaggcatggagggagcaggaggaccccaacaagctggcaaccagctggcctgactattacatcgaccgcatcaattccatggctgcgatgcagagtctgtacgcgtttgatgaggaggagacggagatgaggaaccaagtcgtggaagacctgaagacagccctccggacacagcctatgaggtttgtgacccgcttcattgagctggagggcttgacctgtctgctaaatttcctccggagcatggaccacgccacctgtgagagccgcatccacacctcactcattggctgcatcaaagcattgatgaacaactcccaggggcgggcacatgtgctggcacagcctgaggccattagtaccatagcccagagcctacgcacagagaacagcaagaccaaggtggctgtgctggagatcctgggtgctgtgtgcctcgtgcctggtggccacaagaaggtgctgcaggccatgctgcactaccaggtgtatgcagcagagcgaacccgcttccagaccctgctgaacgagctagaccgaagtctgggccggtaccgggatgaagtgaatctgaaaacagccatcatgtccttcatcaatgctgtcctcaatgctggagctggagaggataatctggagttccgcctacatctacggtatgaattcctgatgctgggtatacagcctgtgattgacaagctccggcaacatgaaaatgccatcctggacaaacatttagacttcttcgagatggtgcggaatgaggatgacctggagctagccaggaggtttgacatggtccacatcgacaccaagagtgcttcccagatgtttgagttgatccacaagaagctgaagtacacggaggcctacccctgcctgctctctgtgctgcaccactgcctgcagatgccctacaaacggaacggtggctacttccagcagtggcagctcctggaccgcatcctccagcagattgtcctccaggatgagcggggtgtggaccctgacctggctcccttggagaacttcaatgtcaagaacatcgtcaacatgctcatcaacgagaatgaagtgaaacagtggcgagaccaggcagagaagttccggaaagaacacatggagcttgtgagccgtctggagaggaaggagcgggaatgcgagacaaagacattggagaaggaagagatgatgcggacgctgaacaaaatgaaggacaagctggcccgggagtcccaggagctgcgccaggctcggggacaagtggcagagctggtagcccagctcagtgaactctcaacaggccctgtatcttccccaccaccccctgggggcccactcaccttgtcttcctcaatgacaaccaatgacctgcctccaccccctcctcctctgccctttgcctgttgtccccctcccccaccaccaccccttcctcccgggggacccccgactcccccaggtgccccaccttgcctcggcatgggcctgcccctccctcaggacccctaccccagcagtgacgtcccactcaggaaaaagcgtgtcccccagccttctcacccactgaagtccttcaactgggtgaagctgaatgaggagcgtgtccctggcaccgtatggaatgagattgatgacatgcaggtatttcggatcctggacctagaggattttgaaaanatgttttcagcctaccagaggcaccagaaagagctgggctccactgaagacatctacctggcttcccgcaaggtcaaagagctgtcggtcattgatggccggagggcccaaaactgcatcatccttctttccaagttgaagctttctaacgaggagatccggcaggccatcttgaagatggatgagcaggaggaccttgctaaggacatgctggagcagctcctcaagttcatcccagagaagagtgacattgacctcctggaggagcacaagcatgaaattgagcggatggcccgtgctgaccgcttcctctatgaaatgagcaggattgaccactaccagcagcgactgcaagccctcttcttcaagaagaaattccaggagcggctggctgaggcaaagcccaaagtggaagccatcctgttggcctcccgggagctggtccgcagcaagcgtcttagacagatgctagaggtcatcctagccataggcaacttcatgaacaaagggcagcgtgggggcgcctacgggttccgggtggccagcctcaacaagatcgctgacaccaagtccagcatcgacagaaacatctctctgctccattacctgatcatgatcctggagaagcattttcctgatattctaaacatgccttcagagctgcaacatcttccagaagctgccaaagtcaacctagcagaactggagaaggaggtgggcaacctcaggaggggcctgagagcggtggaggtggagctggagtatcagaggcgccaggtacgggagcccagtgacaagtttgtccctgtcatgagcgacttcatcacggtgtccagcttcagcttctccgagctggaggaccagctaaatgaggccagggacaagttcgccaaggccttgatgcacttcggggagcatgacagcaagatgcagccagacgaattctttggcatctttgataccttcttgcaggccttctcagaggcccggcaggatctagaggccatgaggaggaggaaggaggaggaggagcggcgggcgcgcatggaagccatgctgaaggagcagagggaacgtgagcggtggcagcggcagcggaaggtcctggctgcaggcagctcgctggaggagggaggagagttcgatgacctggtgtcggccctgcgctctggggaggtcttcgacaaggacttatgcaagctcaagcgcagccgcaagcgatcagggagccaggccctggaagttacccgggagcgggcaataaaccggctaaattattgacctggggaactagccacacaggaggccgggagacagggactggtgagaatggggctgagtggaggaggtggtgatatttaaaccatttggtgcttggtttagagccttgggctgggtcctgggatggggggctgtgtgtggctggaccaggtgtctccccacgcttaccttaaggggctcctcttatctccccttcacatgattccttctgtgccctggccccaggtattattctgaggctgccttggatggcctcaggccaggtaaccccaggctgaaggggccctgctccccatcccctaccatgggcacccatgtgctggcacagaacagttccagatctagactggagaggtccacagccttgtccagagttcctgtgtagcacggggagcaatgatggagggagcccctgagagggaatctggtgagggaatccagactcccttctctcaaggggaggctcaacagaacattgacctgggggcaaactttcctcttgaatgggaacagaggaggcattatatattctagttagatcagctctggtaggttccagagaacagtcaatgttggaaggatgatgcagggaccaaagccatcaggacagagtagcagtgtctgtttcccatgtcacaagtcctctggcctctccctgcatgtcttaagtatctttcccttccttctctaccctcacctccatcctgtctactaatccacagtcctagaagactcaccttgggtttccacagctatggctcactaccaggtgcttgatgaatctggcgaggggctcaagacagacctcatgcatcaccacacctcatgccttttgggcatctcccatgtccccatctcctggacacctggccattgttgtgaagccagacagtgacctcaaatgttgccttggagtcccctacagcccctcagcagagggcagcacttgaatgcttagctccatcccatagttctctaattaacatgctgtctctaagggtggcccctcctctcaggcgttcagatggtgcgaacagcagagcaggcaagggaaactggggagatggggatggaggaggaaggctgatatcctctggggagcacatcacctgaaggtgccaaggaggaaggctgagaggggggccaccccatttctggtacccaatttggttcttcagcccaacttgcaaggggttccttctggtcctcccatccactgccaccttccattttgtccatctcatgctggccttggtggatgggatggctgtatctagacaaaatttttctaaaactccatcaaggctcttattcaataccacgttccgagttggcctttcatcttctttgagactggccctgcctaacctctaccatcaatgagctcttggcccttctgcccttccctgtgtttctcactttccaacctaatccctggctcagggttattgccagtggagactggtgagctgggcctactctcagctgcctatcttctgcctttcacttgcatccaactcctggggctgggaccgtagtagctgcgggggggaagaaacacagggtcggtgagcccagcatgtgcgttggtttgagggggcgggcggtgtgtgtgtgttctggtgggagggatctgagcaagtgcaagcctggctgacacaggtgtgaagaggccatcctggaacccaggtgagggcaagatgaaggcttccaggcagaacagctgcagagagtttggctatatgcatctgcagccccaagagctcccactgcaagacaagtgttggggaagatgggaggttgtgggtgaggcctctaaaggtcctctcccaaactgaccaggctgatgtcaacctaaccccctcaggggcagggaacaggggagggctccacaagcgtgtctggcattcccacccaccatggaagactggatacgcacctggaaacaaaaggactatggaagctgttcaagatacatttgatcttcagaaaagcagaatttggttcaactgttgacagaggacacaaatacgttgttccagagctcagccttctcactctaaaagaaagatatttttctatttattttctacatctggccagtggctctggtgctagatgccactgtagccagatctccaacagtgccttggaccatggactcatactcaactgagtaagaaggggctggtgcccagtcggggtggctgagctggtccttaataggttgtttcttggtcttgctttcttcatgccctccccactgctcctgccacctttagataagtttctctagctaattttgtggccaatgtaaaattcgtcatcaacctaacaaacacaaccttctcagcagcatttctcccctgtgatggaaataaagtgtttagggcagtgggaggagaaaattctccaggtgaatggggaagggtctgttccagcctctccctactcccatcccatttccaccaactggggaactgtgactatctatctcccccgacttctaccagggatgccttcacgccaaggctgttctcaccagctgcctcagatgacaaatgaggctaatggacataatctacagtgtcctttttcacttgcaccttttttataagaatatattgtaatactaaaaaatattaaattcataccatccctacccagtctgcctttaaa

SEQ ID NO: 367008 - DNA, 2021 bp, Homo sapiens
gtcaccgccattcttcacgtggtatcaacacttagggcacaagtttggtttggtgaaaagccagacagtgacctcaaatgttgccttggagtcccctacagcccctcagcagagggcagcacttgaatgcttagctccatcccatagttctctacttcatataaattgctcaggccctcccaccccttctctaacactagcttcaaggcagaagccacagcagcctctgtccagcctgcaggtggccacttggaaccatgtgtccactggcgttggggagttggttcctgagaggtctgagggccagagctgccctctacattaacatgctgtctctaagggtggcccctcctctcaggcgttcagatggtgcgaacagcagagcaggcaagggaaactggggagatggggatggaggaggaaggctgatatcctctggggagcacatcacctgaaggtgccaaggaggaaggctgagaggggggccaccccatttctggtacccaatttggttcttcagcccaacttgcaaggggttccttctggtcctcccatccactgccaccttccattttgtccatctcatgctggccttggtggatgggatggctgtatctagacaaaatttttctaaaactccatcaaggctcttattcaataccacgttccgagttggcctttcatcttctttgagactggccctgcctaacctctaccatcaatgagctcttggcccttctgcccttccctgtgtttctcactttccaacctaatccctggctcagggttattgccagtggagactggtgagctgggcctactctcagctgcctatcttctgcctttcacttgcatccaactcctggggctgggaccgtagtagctgcgggggggaagaaacacagggtcggtgagcccagcatgtgcgttggtttgagggggcgggcggtgtgtgtgtgttctggtgggagggatctgagcaagtgcaagcctggctgacacaggtgtgaagaggccatcctggaacccaggtgagggcaagatgaaggcttccaggcagaacagctgcagagagtttggctatatgcatctgcagccccaagagctcccactgcaagacaagtgttggggaagatgggaggttgtgggtgaggcctctaaaggtcctctcccaaactgaccaggctgatgtcaacctaaccccctcaggggcagggaacaggggagggctccacaagcgtgtctggcattcccacccaccatggaagactggatacgcacctggaaacaaaaggactatggaagctgttcaagatacatttgatcttcagaaaagcagaatttggttcaactgttgacagaggacacaaatacgttgttccagagctcagccttctcactctaaaagaaagatatttttctatttattttctacatctggccagtggctctggtgctagatgccactgtagccagatctccaacagtgccttggaccatggactcatactcaactgagtaagaaggggctggtgcccagtcggggtggctgagctggtccttaataggttgtttcttggtcttgctttcttcatgccctccccactgctcctgccacctttagataagtttctctagctaattttgtggccaatgtaaaattcgtcatcaacctaacaaacacaaccttctcagcagcatttctcccctgtgatggaaataaagtgtttagggcagtgggaggagaaaattctccaggtgaatggggaagggtctgttccagcctctccctactcccatcccatttccaccaactggggaactgtgactatctatctcccccgacttctaccagggatgccttcacgccaaggctgttctcaccagctgcctcagatgacaaatgaggctaatggacataatctacagtgtcctttttcacttgcaccttttttataagaatatattgtaatactaaaaaatattaaattcataccatccctacccagtctgcctttaaa

SEQ ID NO: 367009 - DNA, 4892 bp, Homo sapiens
  misc_feature (2458)..(2458): n is a, c, g, or t
ccctgcctgaggctcacagtacaagtcagtcaaattgttcagggcagcagtggtgtctggagacctggtttgagttcctaggttcatacctagcgtccttctgagcctcaagtttcttcatctgtaaaaagagaagatgaaagtttgagataaacctcgaacatgatcacaatgaggacctagggcatctgtctgctgacgccccctggcctgcagtgaccatggccccccgcaagaggagccaccatggcctgggcttcctgtgctgcttcgggggcagtgacatccccgaaatcaacctccgggacaaccaccctctgcagttcatggagttctccagccccatcccgaacgcagaggagctcaacatccgctttgcagagctggtggatgaattggatctcactgacaaaaaccgagaggctatgtttgcactgccccctgagaagaaatggcagatctactgcagcaagaagaaggtgccctctctgacccctctggccacatctcagggttcatggcatggggtggctcttgctgccttggcatgctcatgcattcacctgatgtttattacatgccagccctgttctaggtgttggaggaacaacagtgaataaaatagaaaaaggaaattctgctgtcctggagcttacactcaaagaaataggattctctttttcaaaaacgcttaaagcaggacctgctgcatcccaggactggggcttgctgggagacagacaaagaagcagagtctggactctctcgtgcctgctcccaggcatggagggagcaggaggaccccaacaagctggcaaccagctggcctgactattacatcgaccgcatcaattccatggctgcgatgcagagtctgtacgcgtttgatgaggaggagacggagatgaggaaccaagtcgtggaagacctgaagacagccctccggacacagcctatgaggtttgtgacccgcttcattgagctggagggcttgacctgtctgctaaatttcctccggagcatggaccacgccacctgtgagagccgcatccacacctcactcattggctgcatcaaagcattgatgaacaactcccaggggcgggcacatgtgctggcacagcctgaggccattagtaccatagcccagagcctacgcacagagaacagcaagaccaaggtggctgtgctggagatcctgggtgctgtgtgcctcgtgcctggtggccacaagaaggtgctgcaggccatgctgcactaccaggtgtatgcagcagagcgaacccgcttccagaccctgctgaacgagctagaccgaagtctgggccggtaccgggatgaagtgaatctgaaaacagccatcatgtccttcatcaatgctgtcctcaatgctggagctggagaggataatctggagttccgcctacatctacggtatgaattcctgatgctgggtatacagcctgtgattgacaagctccggcaacatgaaaatgccatcctggacaaacatttagacttcttcgagatggtgcggaatgaggatgacctggagctagccaggaggtttgacatggtccacatcgacaccaagagtgcttcccagatgtttgagttgatccacaagaagctgaagtacacggaggcctacccctgcctgctctctgtgctgcaccactgcctgcagatgccctacaaacggaacggtggctacttccagcagtggcagctcctggaccgcatcctccagcagattgtcctccaggatgagcggggtgtggaccctgacctggctcccttggagaacttcaatgtcaagaacatcgtcaacatgctcatcaacgagaatgaagtgaaacagtggcgagaccaggcagagaagttccggaaagaacacatggagcttgtgagccgtctggagaggaaggagcgggaatgcgagacaaagacattggagaaggaagagatgatgcggacgctgaacaaaatgaaggacaagctggcccgggagtcccaggagctgcgccaggctcggggacaagtggcagagctggtagcccagctcagtgaactctcaacaggccctgtatcttccccaccaccccctgggggcccactcaccttgtcttcctcaatgacaaccaatgacctgcctccaccccctcctcctctgccctttgcctgttgtccccctcccccaccaccaccccttcctcccgggggacccccgactcccccaggtgccccaccttgcctcggcatgggcctgcccctccctcaggacccctaccccagcagtgacgtcccactcaggaaaaagcgtgtcccccagccttctcacccactgaagtccttcaactgggtgaagctgaatgaggagcgtgtccctggcaccgtatggaatgagattgatgacatgcaggtatttcggatcctggacctagaggattttgaaaanatgttttcagcctaccagaggcaccagaaagagctgggctccactgaagacatctacctggcttcccgcaaggtcaaagagctgtcggtcattgatggccggagggcccaaaactgcatcatccttctttccaagttgaagctttctaacgaggagatccggcaggccatcttgaagatggatgagcaggaggaccttgctaaggacatgctggagcagctcctcaagttcatcccagagaagagtgacattgacctcctggaggagcacaagcatgaaattgagcggatggcccgtgctgaccgcttcctctatgaaatgagcaggattgaccactaccagcagcgactgcaagccctcttcttcaagaagaaattccaggagcggctggctgaggcaaagcccaaagtggaagccatcctgttggcctcccgggagctggtccgcagcaagcgtcttagacagatgctagaggtcatcctagccataggcaacttcatgaacaaagggcagcgtgggggcgcctacgggttccgggtggccagcctcaacaagatcgctgacaccaagtccagcatcgacagaaacatctctctgctccattacctgatcatgatcctggagaagcattttcctgatattctaaacatgccttcagagctgcaacatcttccagaagctgccaaagtcaacctagcagaactggagaaggaggtgggcaacctcaggaggggcctgagagcggtggaggtggagctggagtatcagaggcgccaggtacgggagcccagtgacaagtttgtccctgtcatgagcgacttcatcacggtgtccagcttcagcttctccgagctggaggaccagctaaatgaggccagggacaagttcgccaaggccttgatgcacttcggggagcatgacagcaagatgcagccagacgaattctttggcatctttgataccttcttgcaggccttctcagaggcccggcaggatctagaggccatgaggaggaggaaggaggaggaggagcggcgggcgcgcatggaagccatgctgaaggagcagagggaacgtgagcggtggcagcggcagcggaaggtcctggctgcaggcagctcgctggaggagggaggagagttcgatgacctggtgtcggccctgcgctctggggaggtcttcgacaaggacttatgcaagctcaagcgcagccgcaagcgatcagggagccaggccctggaagttacccgggagcgggcaataaaccggctaaattattgacctggggaactagccacacaggaggccgggagacagggactggtgagaatggggctgagtggaggaggtggtgatatttaaaccatttggtgcttggtttagagccttgggctgggtcctgggatggggggctgtgtgtggctggaccaggtgtctccccacgcttaccttaaggggctcctcttatctccccttcacatgattccttctgtgccctggccccaggtattattctgaggctgccttggatggcctcaggccaggtaaccccaggctgaaggggccctgctccccatcccctaccatgggcacccatgtgctggcacagaacagttccagatctagactggagaggtccacagccttgtccagagttcctgtgtagcacggggagcaatgatggagggagcccctgagagggaatctggtgagggaatccagactcccttctctcaaggggaggctcaacagaacattgacctgggggcaaactttcctcttgaatgggaacagaggaggcattatatattctagttagatcagctctggtaggttccagagaacagtcaatgttggaaggatgatgcagggaccaaagccatcaggacagagtagcagtgtctgtttcccatgtcacaagtcctctggcctctccctgcatgtcttaagtatctttcccttccttctctaccctcacctccatcctgtctactaatccacagtcctagaagactcaccttgggtttccacagctatggctcactaccaggtgcttgatgaatctggcgaggggctcaagacagacctcatgcatcaccacacctcatgccttttgggcatctcccatgtccccatctcctggacacctggccattgttgtgaagccagacagtgacctcaaatgttgccttggagtcccctacagcccctcagcagagggcagcacttgaatgcttagctccatcccatagttctctattctaccagggatgccttcacgccaaggctgttctcaccagctgcctcagatgacaaatgaggctaatggacataatctacagtgtcctttttcacttgcaccttttttataagaatatattgtaatactaaaaaatattaaattcataccatccctacccagtctgcctttaaa

SEQ ID NO: 367010 - DNA, 548 bp, Homo sapiens
ataaggtaaactaaaatttctggtactacagtaccagacttagtaaatgttaatctcttctttcactttcctcaggtcagtttggttgccctgttcttggaatgctccatgttttcctacacttttgccatcacccttctgaacggtttttcactcccagcacttctgacaccaaatgcggagggtggaggggctccctccacaccaaccaattttccagtaccaactgagtgtcctagaattcatttcaattctgatactaactacgcagagctagcctcagatgtgataggtttaagggctcattcccacaagactgccctcacatcagaggccagttgcaagtagcaggtttccaggttacccacaccttccgtcccacttgactacaaagttgggaattcccatgactctctactcaggttctataatttgctagcacgtctcacagaacctaggaaaacagtttacttacatgcactggtttattataaagaatacaactcagaaacagccaaacggaagaaatacatagagcaaggtatagg

SEQ ID NO: 367011 - DNA, 722 bp, Homo sapiens
atggctgaaggcgaaaggcacgtcttacagggtggcaggcaagagagaatgagagccaagagaaggggtttccccttttaaaaccatcagatctcatgagacttatttactatcataagaacagcacaggaaagacttgcccccatgattcaattacctcccaccgggtccctctcacgacacatgggaattgtgggagctacaattcaagatgagatttgggtggcgacacagtcaaaccatatcaatcattcttttaaaaagtaaaaatggtgttccatgagaaaagtaactagttcagttcacaaccctgaaagggtctcagactacagaatatgcagactacactttgggaaccactgctttatggtaaagaaaaattatcagtcaacttcaacatttgcagcaagaatagcatatcattttctggccaggtgcggtagctcacgcctgtagtcctgcactttgggaggccaaggcaggcagatcacttgagattaggagtttgagaccagcctggccaatatggtgaaaccccctctctactaaaaatacaaaaattagctgggcatggtggcgcacgcctgtaatcccagctactctgatggctgacgcatgaggatcacttgagcctggggggcagaggttgcaattagccaagattgtgccactgcactccagcctgagtgacaaggtgagacactgtctcaaaaaaaaaaaaa

SEQ ID NO: 367012 - DNA, 245 bp, Homo sapiens
gtttgcaagcatctggagctgagaagggtctccgcaggtcacgatagaagcctggcttgcacctctggcaatactgtccttctgtgttgtgctgacagtcatcacagacaccaccactacgattccctgatgcctcccacacattaacgtcgaagtgacagagacaacaaggagtccacagatgcgttgactttacaaagaaagcttttgagtatcgtgggcttgttacttacttctgcactcgt

SEQ ID NO: 367013 - DNA, 541 bp, Homo sapiens
gcccagttctgaagatgttgctacttcttgtgggtgaattatcaattcatttacagagaaagccacatacaaaacaagaggcagcccttcaggtcaggggagatgttctgaatcagcaaacagacataaaaagaactcttatcttaactatctcctgaaccttgcagttctcctgtaacagccagaacactttaataagactgggatattcttggagatgtggactgggcctaacttttatttctgatattccacctttaacctggacctccaagtttttctgtaaagtgagctgtgaaaaaagacaggctggagatccaagatttccttgtgctttcttatgaagtttggtgaagagcaatttaagagatattgtcaaggttggtgtgctgccccaaactctgcgactagaaaccaaaagtttctagggaactttttttcttttttttaaacttgaaggccttgctgaaatgctaccttctccattacactttacctaattcctttctctcctgtaacctctgagctaaaggtaatgtct

SEQ ID NO: 367014 - DNA, 372 bp, Homo sapiens
catatgtttgttggctgtttgtataccatctttttatgggtgcatagctttcttagctagctgttaagttcatcaagggtagaaatcatgcattttgcagctttgtgttccctgtaatatacagtagactgctatctctacagtaactactcaataaacattcagcacttttggaggctgaagcaggaggattgctggaagccaggagttcgaggctgcagtgagctacaatcatgccactatactccagcctaggtgacagaatgagacagtttctaaaaataaaactaaacaccacatgttctcacttataagcaggagctaaacaatgagaacacatggacacagggaggggacacagggacacacctg

SEQ ID NO: 367015 - DNA, 797 bp, Homo sapiens
tcagctgctagtgagcagcttcattttgtttgttagtatacaattcatttggaaatgtaaattttcaaaaatatcagaatagcaatatgaggtactgctagaatgtattatactaataactaaactaagaggaaagattttttgctgatgaggcaaaagttggtttctagtaactgtcctagaggcagcttaatactggtagaaaacatgggccttggagacactgggcatgaatcttagcctcactacttacagtctgtgtgatcttttgcaagttacctaaattttcggtgcccatttcattatctataaaattagtaaagctaactacctcctaggatggttgtgaagattaaattagttaatatagacgtaactcctaatacagagcatgacacttagtaaatcagaaatgttagtagcaattgttatttaaataaaacaataaaaaacccatgagtaattaactataaaaatcaactgataaaaaaattagctgacagaataagaacagtggttgtcagggaagggaggaagaatggggagttactgtttaatgggtatagagtttcagtggtatttgcaccaccatccatcaccagaactttttcatcatcacatactgaatgtacttaatgccactgaattgtacctaaaaatggttaaagtggtaaattttgcattatgtataatttgcacagtttgaaagaataatggacaaaataatgagctgacagtagatactaactggaaagaggtgatagtgttttaaggattgaaacaatataataaattac

SEQ ID NO: 367016 - DNA, 364 bp, Homo sapiens
acacatacatatgtctgtatgtacctatatagacacatacatatgtctgtatgtacctatatagacacatacatatgtctgtatgtacctatatagacacatacatatgtctgtatgtacctatatagacacatacatatgtctgtatgtacctatatagacacatacatatgtctgtatgtacctatatagacacatacatatgtctgtatgtacctatatagacacatacatatgtctgtatgtacctatatagacacatacatatgtctgtatgtacctatatagacacatacatatgtctgtatgtacctatatagacacatacatatgtctgtatgtacctatatagacacatacatat

SEQ ID NO: 367017 - DNA, 1546 bp, Homo sapiens
aaatttttgatcatgggaattttgtcatgttcaatgaaaagtaatgttctgtcaaatgaaaataatgaggttcataaatgggaatatataagacaaaaatatgaatagccaaaatacgtttaaaaaatctaaactattgaacataaattaaattggttatccctgggaaaagatactgtatattttaatgatctctgtgtatttgggaactatagcagtaaatgcaaagatacatcttgcctgtctctcccggttttaagttaattgacacagatatttcaatagtagtattactcgttaaaattctgcaatacttattacctggtatcatttaaaaagatattttctctaagataaaagatactaatgaagatagaagacaccaatctgtttccatcctccttttctctcttgcattttcccttctgtgtattagaaacaataacaaaggcctgcttttatagtcttgacaaatcgtttcttacctgaaaggaacttgggttttctctttttaagctagctcttagtctgtagcttctgatagcaagtaatctcttcattctctagtatcctttgccatgacttaaaaatggagactatagcttaattgattgaatactctgacctagcagtcccatgtttgagtgcagggatggtgttgggcattttatcccctggtagtgatattctagaatgctttatgttcctaccccctaaaaaatcctccaaatccttcatattctcaagtagcacttataactttagcattattgcctaacacaacagttctaccattaatcatactacatgttcatccttctaaatgtcattatcaatttaggtagcctgtaagagtattgaatttaaggaaaagggtgaagggaagataaaaccatttatataaaagtgctgggtttcattgcttgtggtaaataatgttttaattttttgccaagtgaaaacaaatctttaaaaggaaaggaaaacaattattttatggaaatattttgtaaacatgtatgtaaagacattgttttctttgccaccaacaaattgttaataaaaaagtttttttttagtttcttcttgaatgaggttcctttgtgtatagtagggcaaattattcaggccttaaaaaaaaaatcttcaatctgagtttatttaatcagatgtcaacagaaaggttgcagcttcttccattttgttgttattttcaaccaatgtcttttccctctttttaagaaaaaagtcattgttttttaaatactatttttggatgaattatgtctgtagaatggttgaccaacagcatttgctaaactattgaaaaactaatgattggttggtcatctctatctatgatgtactttcattcatgaaaaccaatgagttctcatgataaataactcttggaaatagaaactctgcttactaacatgtacttgctgagggtaataatccggcattatacatacagtatgtgaggggaggggaattgcttatcctaacagtgttttcccgcattctcacacattgtactcatcat

SEQ ID NO: 367018 - DNA, 3320 bp, Homo sapiens
acccagtccccctccccctcccctcgccggctagggtggtgcgtgccggcaggccggtcaaggaggcgggacacgtcggcgctaccaccgccaccgccgccgccgcccctcctcccgttccagctgccgctgccgcttcctgggctgagtccgcccgcggtcccggcggcgccaggtgcgttcactctgcccggctccagccagcgtccgccgccgccgtagctgccccaggctccccgccccgctgccgagatggcgacgcgctcctgtcgggagaaggctcagaagctgaacgagcagcaccagctcatcctatccaagcttctgagggaggaggacaacaagtactgcgccgactgcgaggccaaaggtcctcgatgggcttcctggaatattggtgtgtttatttgcatcagatgtgctggaattcatagaaatcttggggttcatatatccagggtcaaatcagtcaacctagaccaatggacagcagaacagatacagtgcatgcaagatatgggaaatactaaagcaagactactctatgaagccaatcttccagagaactttcgaagaccacagacagatcaagcagtggaatttttcatcagagataaatatgaaaagaagaaatactacgataaaaatgccatagctattacaaataaagaaaaggaaaaaaaaaaggaagagaaaaagagagaaaaggagccagaaaagccggcaaaaccacttacagctgaaaagctgcagaagaaagatcagcaactggagcctaaaaaaagtaccagccctaaaaaagctgcggagcccactgtggatcttttaggacttgatggccctgctgtggcaccagtgaccaacgggaacacaacggtgccacccctgaacgatgatctggacatctttggaccgatgatttctaatcccttacctgcaactgtcatgcccccagctcaggggacaccctctgcaccagcagctgcaaccctgtctacagtaacatctggggatctagatttattcactgagcaaactacaaaatcagaagaagtggcaaagaaacaactttccaaagactccatcttatctctgtatggcacaggaaccattcaacagcaaagtactcctggtgtatttatgggacccacaaatataccatttacctcacaagcaccagctgcatttcagggctttccatcgatgggcgtgcctgtgcctgcagctcctggccttataggaaatgtgatgggacagagtccaagcatgatggtgggcatgcccatgcccaatgggtttatgggaaatgcacaaactggtgtgatgccacttcctcagaacgttgttggcccccaaggaggaatggtgggacaaatgggtgcaccccagagtaagtttggcctgccgcaagctcagcagccccagtggagcctctcacagataatgcagaagggtgatgctgttctccagcactccatcagtgcaatctactggccaacgacaaggtggttaaaatgtcctttagtagatgaatcagcagatggctggcatgagtatcagtagtgcaacccctactgcaggttttggccagccctccagcacaacagcaggatggtctggaagctcatcaggtcagactctcagcacacaactgtggaaatgaaaactgcaatacaagtttcatccagaactaccacctgacattccttgctgaaacgcatctagttcccctgtttattcatatgcatattttttttctttttacccatttgttcatattaagaatgatctgattgaccgtgttggtctgtactgattcaatttgatgtggtgaaaagcaggttgataaatcattttatgtcaagggcagctttgctcatatttcccatgatttcatgtactgcattatttgagaagctgctcaacttgcaaaatcagttttcctctcaataaaattatagctctaatgtttgcatataagggaagtagttatcatgttagtaatacctctaatagtataaaccccaccccaaaattagccagtaatcctgtaggaaggtactgtatgatcaaatgtttaatcatataaatagaatgtaaatgtctcactgagcactgttttctagtgtatcaaaatgctcttatttcatcattcacttcactgtgctgttgttatgatgtgcttaacagggaacgtgattagtgaaaggaagataaacgtggatgttactccaaaacttcgtttaatgaatgcttaaagaattcaaattttatctgcctctcttgtaatttggatctcttcttaatgtacatagtgctaacatgaagacctttttctgcactatatgcaaacagggtaactaactaaaacaaagccactttcaatcttcaatccttgaaggtatatctaggtttatgacagtaattgtgtttacattttatggtgcctagtattgacaaaatgttatttccctacattaaacatgactccatagaccttttcatttgtgggtttttatttcctatgatgtatactgccactaaccttccaaaaattacttagtattgcaaagtcaggaatcatcaggaacgtttagctgacaaaatacttgtctgttttaaaaacctgttcaagtctaccaacctgttcaagtctaccaattataagggcaaattggagaaaaagaaaaaatatatactcaagagtggtatcttgcagtatcggcactgtacaaaaaaatcttccaatttagttgttgtagagaaaacatgcagaacaaatgaagacaaaacatacattttgtaccaaccatccaattagcttatgttaactgacaagctccatttaaacagatgtccatcagatgacaagaaaggctgctgtactgaagtaaaacaaacaatacctgaatgctctgtagcctaaactccaaacatcctcttccatatggatccactggctggacaaactgcaccagttgctgcttcaatttatacctcaattttcactgtgtccaggtggtactttggctcgttggctagattaaccttctctgtccgagtgtgccacacgagaacctgaaggggaaggaaatagcttgggtagcgcactcttcatggtgacactcgaggtcgggcagcacaagtgtaatgaataccttagtgcagttatttgctttcggttccagttcttcgactgttgttatctgtttgagaaagtcagattcttgcatccctggctgggatccacgacgcttaaatacagcttttggattggacaaaatgacttgaagacttacagcaaatcctttgtgaaaaat

SEQ ID NO: 367019 - DNA, 824 bp, Homo sapiens
cattgatgttcctccagcattttggcaatcttggtttctgtttggtcacttgttttacctttagagcattcagggaatagtctagagtgatttctaacattagcacaatcactatatatcacagttaattttgctaccaccatttacaagaatataggtaaaacattggtctctacccgctgggaatctaaaaaattgtatgtgctaagtgtcagtcacatggtcaacatgctgaagcacacccagctcaggttaaggtgctagatgaaccaggaaggagttaatactggctcttacttccagataatgcagaagggtgatgctgttctccagcactccatcagtgcaatctactggccaacgacaaggtggttaaaatgtcctttagtaggtatgaagacgtgatctgcttcttcagacacttatgcctgattagtgatgtagtttatgttagtgtctttgaaactgtaaataagtcaagtcaaatgtattaaattaagaacacagtctaactctgagtgtaagttttaaacccactcactatatggtaaatcttgcctttccttctcttatcaccaattttggaagtaagagaatcacagggttaagatgcttatatatatatatatttgactccagtcttgaagaaaaatacatgtaatcttatgctttattgcatacaatgaaaataaattttagatgtttatgttgttagatcagcgagagaaataaatgctttatgaccactttaaaaatatttaggaagtatataagattttaatagagaataatatctatcatacaaagtttataggataatttta

SEQ ID NO: 367020 - DNA, 3232 bp, Homo sapiens
acccagtccccctccccctcccctcgccggctagggtggtgcgtgccggcaggccggtcaaggaggcgggacacgtcggcgctaccaccgccaccgccgccgccgcccctcctcccgttccagctgccgctgccgcttcctgggctgagtccgcccgcggtcccggcggcgccaggtgcgttcactctgcccggctccagccagcgtccgccgccgccgtagctgccccaggctccccgccccgctgccgagatggcgacgcgctcctgtcgggagaaggctcagaagctgaacgagcagcaccagctcatcctatccaagcttctgagggaggaggacaacaagtactgcgccgactgcgaggccaaaggtcctcgatgggcttcctggaatattggtgtgtttatttgcatcagatgtgctggaattcatagaaatcttggggttcatatatccagggtcaaatcagtcaacctagaccaatggacagcagaacagatacagtgcatgcaagatatgggaaatactaaagcaagactactctatgaagccaatcttccagagaactttcgaagaccacagacagatcaagcagtggaatttttcatcagagataaatatgaaaagaagaaatactacgataaaaatgccatagctattacaaataaagaaaaggaaaaaaaaaaggaagagaaaaagagagaaaaggagccagaaaagccggcaaaaccacttacagctgaaaagctgcagaagaaagatcagcaactggagcctaaaaaaagtaccagccctaaaaaagctgcggagcccactgtggatcttttaggacttgatggccctgctgtggcaccagtgaccaacgggaacacaacggtgccacccctgaacgatgatctggacatctttggaccgatgatttctaatcccttacctgcaactgtcatgcccccagctcaggggacaccctctgcaccagcagctgcaaccctgtctacagtaacatctggggatctagatttattcactgagcaaactacaaaatcagaagaagtggcaaagaaacaactttccaaagactccatcttatctctgtatggcacaggaaccattcaacagcaaagtactcctggtgtatttatgggacccacaaatataccatttacctcacaagcaccagctgcatttcagggctttccatcgatgggcgtgcctgtgcctgcagctcctggccttataggaaatgtgatgggacagagtccaagcatgatggtgggcatgcccatgcccaatgggtttatgggaaatgcacaaactggtgtgatgccacttcctcagaacgttgttggcccccaaggaggaatggtgggacaaatgggtgcaccccagagtaagtttggcctgccgcaagctcagcagccccagtggagcctctcacagatgaatcagcagatggctggcatgagtatcagtagtgcaacccctactgcaggttttggccagccctccagcacaacagcaggatggtctggaagctcatcaggtcagactctcagcacacaactgtggaaatgaaaactgcaatacaagtttcatccagaactaccacctgacattccttgctgaaacgcatctagttcccctgtttattcatatgcatattttttttctttttacccatttgttcatattaagaatgatctgattgaccgtgttggtctgtactgattcaatttgatgtggtgaaaagcaggttgataaatcattttatgtcaagggcagctttgctcatatttcccatgatttcatgtactgcattatttgagaagctgctcaacttgcaaaatcagttttcctctcaataaaattatagctctaatgtttgcatataagggaagtagttatcatgttagtaatacctctaatagtataaaccccaccccaaaattagccagtaatcctgtaggaaggtactgtatgatcaaatgtttaatcatataaatagaatgtaaatgtctcactgagcactgttttctagtgtatcaaaatgctcttatttcatcattcacttcactgtgctgttgttatgatgtgcttaacagggaacgtgattagtgaaaggaagataaacgtggatgttactccaaaacttcgtttaatgaatgcttaaagaattcaaattttatctgcctctcttgtaatttggatctcttcttaatgtacatagtgctaacatgaagacctttttctgcactatatgcaaacagggtaactaactaaaacaaagccactttcaatcttcaatccttgaaggtatatctaggtttatgacagtaattgtgtttacattttatggtgcctagtattgacaaaatgttatttccctacattaaacatgactccatagaccttttcatttgtgggtttttatttcctatgatgtatactgccactaaccttccaaaaattacttagtattgcaaagtcaggaatcatcaggaacgtttagctgacaaaatacttgtctgttttaaaaacctgttcaagtctaccaacctgttcaagtctaccaattataagggcaaattggagaaaaagaaaaaatatatactcaagagtggtatcttgcagtatcggcactgtacaaaaaaatcttccaatttagttgttgtagagaaaacatgcagaacaaatgaagacaaaacatacattttgtaccaaccatccaattagcttatgttaactgacaagctccatttaaacagatgtccatcagatgacaagaaaggctgctgtactgaagtaaaacaaacaatacctgaatgctctgtagcctaaactccaaacatcctcttccatatggatccactggctggacaaactgcaccagttgctgcttcaatttatacctcaattttcactgtgtccaggtggtactttggctcgttggctagattaaccttctctgtccgagtgtgccacacgagaacctgaaggggaaggaaatagcttgggtagcgcactcttcatggtgacactcgaggtcgggcagcacaagtgtaatgaataccttagtgcagttatttgctttcggttccagttcttcgactgttgttatctgtttgagaaagtcagattcttgcatccctggctgggatccacgacgcttaaatacagcttttggattggacaaaatgacttgaagacttacagcaaatcctttgtgaaaaat

SEQ ID NO: 367021 - DNA, 4123 bp, Homo sapiens
acccagtccccctccccctcccctcgccggctagggtggtgcgtgccggcaggccggtcaaggaggcgggacacgtcggcgctaccaccgccaccgccgccgccgcccctcctcccgttccagctgccgctgccgcttcctgggctgagtccgcccgcggtcccggcggcgccaggtgcgttcactctgcccggctccagccagcgtccgccgccgccgtagctgccccaggctccccgccccgctgccgagatggcgacgcgctcctgtcgggagaaggctcagaagctgaacgagcagcaccagctcatcctatccaagcttctgagggaggaggacaacaagtactgcgccgactgcgaggccaaaggtcctcgatgggcttcctggaatattggtgtgtttatttgcatcagatgtgctggaattcatagaaatcttggggttcatatatccagggtcaaatcagtcaacctagaccaatggacagcagaacagatacagtgcatgcaagatatgggaaatactaaagcaagactactctatgaagccaatcttccagagaactttcgaagaccacagacagatcaagcagtggaatttttcatcagagataaatatgaaaagaagaaatactacgataaaaatgccatagctattacaaataaagaaaaggaaaaaaaaaaggaagagaaaaagagagaaaaggagccagaaaagccggcaaaaccacttacagctgaaaagctgcagaagaaagatcagcaactggagcctaaaaaaagtaccagccctaaaaaagctgcggagcccactgtggatcttttaggacttgatggccctgctgtggcaccagtgaccaacgggaacacaacggtgccacccctgaacgatgatctggacatctttggaccgatgatttctaatcccttacctgcaactgtcatgcccccagctcaggggacaccctctgcaccagcagctgcaaccctgtctacagtaacatctggggatctagatttattcactgagcaaactacaaaatcagaagaagtggcaaagaaacaactttccaaagactccatcttatctctgtatggcacaggaaccattcaacagcaaagtactcctggtaatgaattttgatatctgctttcagtgacattactagaagtacatcctttgtaattatataataagatcaattatatatcttttattgttccatgtagtgagtgcttttgttgttgcagtttatacaactatgaagccgaaatgaatgagcattagaattaaaaaattaagaggcatgtacaggattcacagaactttatttggaattaacaagctgttcatagatcactaaatgttgtttcacaagcttatagaacatggattatctttgatgaattattgaaacgatttgcatgaagtttatgactgcgtacagtgtattttctctgcaggtaaacagtcttgagttaccacatggattaaaaaaaatctatgaatttttttgtaatcataacaaaatattagcataagccttattgtttacagagttttaatctttcacaccatttcctttaaaataatgagctgcatttcacatgtgagctaaaattgttgggcagcccactacacctattgaagcgagatatagtcagctctcacttccctgtttcgtactgggggaccagtggtacaaatcagcaataaaacagtgtatgatgtcatgctacatagtttggtcttcacagtggaagatattttgtgtggctgttgcatatgatttacatttcttaattaaatttactcaggttaataactgatttgtctgcatcctagaaacaaccagctctcagggtttaggtgtgggttggtctgagtagtaggagcagccaaactggaattaaaatgtttgctgtgagtagttcagaaaggcaatttttctgtgattatagagatgagtgcaactacacgtgatagctctgtcttcattcattttctttttgtggtgcaggtgtatttatgggacccacaaatataccatttacctcacaagcaccagctgcatttcagggctttccatcgatgggcgtgcctgtgcctgcagctcctggccttataggaaatgtgatgggacagagtccaagcatgatggtgggcatgcccatgcccaatgggtttatgggaaatgcacaaactggtgtgatgccacttcctcagaacgttgttggcccccaaggaggaatggtgggacaaatgggtgcaccccagagtaagtttggcctgccgcaagctcagcagccccagtggagcctctcacagatgaatcagcagatggctggcatgagtatcagtagtgcaacccctactgcaggttttggccagccctccagcacaacagcaggatggtctggaagctcatcaggtcagactctcagcacacaactgtggaaatgaaaactgcaatacaagtttcatccagaactaccacctgacattccttgctgaaacgcatctagttcccctgtttattcatatgcatattttttttctttttacccatttgttcatattaagaatgatctgattgaccgtgttggtctgtactgattcaatttgatgtggtgaaaagcaggttgataaatcattttatgtcaagggcagctttgctcatatttcccatgatttcatgtactgcattatttgagaagctgctcaacttgcaaaatcagttttcctctcaataaaattatagctctaatgtttgcatataagggaagtagttatcatgttagtaatacctctaatagtataaaccccaccccaaaattagccagtaatcctgtaggaaggtactgtatgatcaaatgtttaatcatataaatagaatgtaaatgtctcactgagcactgttttctagtgtatcaaaatgctcttatttcatcattcacttcactgtgctgttgttatgatgtgcttaacagggaacgtgattagtgaaaggaagataaacgtggatgttactccaaaacttcgtttaatgaatgcttaaagaattcaaattttatctgcctctcttgtaatttggatctcttcttaatgtacatagtgctaacatgaagacctttttctgcactatatgcaaacagggtaactaactaaaacaaagccactttcaatcttcaatccttgaaggtatatctaggtttatgacagtaattgtgtttacattttatggtgcctagtattgacaaaatgttatttccctacattaaacatgactccatagaccttttcatttgtgggtttttatttcctatgatgtatactgccactaaccttccaaaaattacttagtattgcaaagtcaggaatcatcaggaacgtttagctgacaaaatacttgtctgttttaaaaacctgttcaagtctaccaacctgttcaagtctaccaattataagggcaaattggagaaaaagaaaaaatatatactcaagagtggtatcttgcagtatcggcactgtacaaaaaaatcttccaatttagttgttgtagagaaaacatgcagaacaaatgaagacaaaacatacattttgtaccaaccatccaattagcttatgttaactgacaagctccatttaaacagatgtccatcagatgacaagaaaggctgctgtactgaagtaaaacaaacaatacctgaatgctctgtagcctaaactccaaacatcctcttccatatggatccactggctggacaaactgcaccagttgctgcttcaatttatacctcaattttcactgtgtccaggtggtactttggctcgttggctagattaaccttctctgtccgagtgtgccacacgagaacctgaaggggaaggaaatagcttgggtagcgcactcttcatggtgacactcgaggtcgggcagcacaagtgtaatgaataccttagtgcagttatttgctttcggttccagttcttcgactgttgttatctgtttgagaaagtcagattcttgcatccctggctgggatccacgacgcttaaatacagcttttggattggacaaaatgacttgaagacttacagcaaatcctttgtgaaaaat

SEQ ID NO: 367022 - DNA, 3470 bp, Homo sapiens
acccagtccccctccccctcccctcgccggctagggtggtgcgtgccggcaggccggtcaaggaggcgggacacgtcggcgctaccaccgccaccgccgccgccgcccctcctcccgttccagctgccgctgccgcttcctgggctgagtccgcccgcggtcccggcggcgccaggtgcgttcactctgcccggctccagccagcgtccgccgccgccgtagctgccccaggctccccgccccgctgccgagatggcgacgcgctcctgtcgggagaaggctcagaagctgaacgagcagcaccagctcatcctatccaagcttctgagggaggaggacaacaagtactgcgccgactgcgaggccaaagagcttcctgcggctgagggagggatgaaacaagtacccatgtgaccaccaccactgggactgcgctggattagacctgaaaccagcatagcactgagtcttacccgggacctgtggcgaccactgcctggctaccactgatgttctctcaaggcccaagagctcttcagtcagcaggtagtgaatccggcctggcttgtatcctcccttcaggacagcgagctctccactggcccaaggtcctcgatgggcttcctggaatattggtgtgtttatttgcatcagatgtgctggaattcatagaaatcttggggttcatatatccagggtcaaatcagtcaacctagaccaatggacagcagaacagatacagtgcatgcaagatatgggaaatactaaagcaagactactctatgaagccaatcttccagagaactttcgaagaccacagacagatcaagcagtggaatttttcatcagagataaatatgaaaagaagaaatactacgataaaaatgccatagctattacaaataaagaaaaggaaaaaaaaaaggaagagaaaaagagagaaaaggagccagaaaagccggcaaaaccacttacagctgaaaagctgcagaagaaagatcagcaactggagcctaaaaaaagtaccagccctaaaaaagctgcggagcccactgtggatcttttaggacttgatggccctgctgtggcaccagtgaccaacgggaacacaacggtgccacccctgaacgatgatctggacatctttggaccgatgatttctaatcccttacctgcaactgtcatgcccccagctcaggggacaccctctgcaccagcagctgcaaccctgtctacagtaacatctggggatctagatttattcactgagcaaactacaaaatcagaagaagtggcaaagaaacaactttccaaagactccatcttatctctgtatggcacaggaaccattcaacagcaaagtactcctggtgtatttatgggacccacaaatataccatttacctcacaagcaccagctgcatttcagggctttccatcgatgggcgtgcctgtgcctgcagctcctggccttataggaaatgtgatgggacagagtccaagcatgatggtgggcatgcccatgcccaatgggtttatgggaaatgcacaaactggtgtgatgccacttcctcagaacgttgttggcccccaaggaggaatggtgggacaaatgggtgcaccccagagtaagtttggcctgccgcaagctcagcagccccagtggagcctctcacagatgaatcagcagatggctggcatgagtatcagtagtgcaacccctactgcaggttttggccagccctccagcacaacagcaggatggtctggaagctcatcaggtcagactctcagcacacaactgtggaaatgaaaactgcaatacaagtttcatccagaactaccacctgacattccttgctgaaacgcatctagttcccctgtttattcatatgcatattttttttctttttacccatttgttcatattaagaatgatctgattgaccgtgttggtctgtactgattcaatttgatgtggtgaaaagcaggttgataaatcattttatgtcaagggcagctttgctcatatttcccatgatttcatgtactgcattatttgagaagctgctcaacttgcaaaatcagttttcctctcaataaaattatagctctaatgtttgcatataagggaagtagttatcatgttagtaatacctctaatagtataaaccccaccccaaaattagccagtaatcctgtaggaaggtactgtatgatcaaatgtttaatcatataaatagaatgtaaatgtctcactgagcactgttttctagtgtatcaaaatgctcttatttcatcattcacttcactgtgctgttgttatgatgtgcttaacagggaacgtgattagtgaaaggaagataaacgtggatgttactccaaaacttcgtttaatgaatgcttaaagaattcaaattttatctgcctctcttgtaatttggatctcttcttaatgtacatagtgctaacatgaagacctttttctgcactatatgcaaacagggtaactaactaaaacaaagccactttcaatcttcaatccttgaaggtatatctaggtttatgacagtaattgtgtttacattttatggtgcctagtattgacaaaatgttatttccctacattaaacatgactccatagaccttttcatttgtgggtttttatttcctatgatgtatactgccactaaccttccaaaaattacttagtattgcaaagtcaggaatcatcaggaacgtttagctgacaaaatacttgtctgttttaaaaacctgttcaagtctaccaacctgttcaagtctaccaattataagggcaaattggagaaaaagaaaaaatatatactcaagagtggtatcttgcagtatcggcactgtacaaaaaaatcttccaatttagttgttgtagagaaaacatgcagaacaaatgaagacaaaacatacattttgtaccaaccatccaattagcttatgttaactgacaagctccatttaaacagatgtccatcagatgacaagaaaggctgctgtactgaagtaaaacaaacaatacctgaatgctctgtagcctaaactccaaacatcctcttccatatggatccactggctggacaaactgcaccagttgctgcttcaatttatacctcaattttcactgtgtccaggtggtactttggctcgttggctagattaaccttctctgtccgagtgtgccacacgagaacctgaaggggaaggaaatagcttgggtagcgcactcttcatggtgacactcgaggtcgggcagcacaagtgtaatgaataccttagtgcagttatttgctttcggttccagttcttcgactgttgttatctgtttgagaaagtcagattcttgcatccctggctgggatccacgacgcttaaatacagcttttggattggacaaaatgacttgaagacttacagcaaatcctttgtgaaaaat

SEQ ID NO: 367023 - DNA, 4011 bp, Homo sapiens
acccagtccccctccccctcccctcgccggctagggtggtgcgtgccggcaggccggtcaaggaggcgggacacgtcggcgctaccaccgccaccgccgccgccgcccctcctcccgttccagctgccgctgccgcttcctgggctgagtccgcccgcggtcccggcggcgccaggtgcgttcactctgcccggctccagccagcgtccgccgccgccgtagctgccccaggctccccgccccgctgccgagatggcgacgcgctcctgtcgggagaaggctcagaagctgaacgagcagcaccagctcatcctatccaagcttctgagggaggaggacaacaagtactgcgccgactgcgaggccaaaggtcctcgatgggcttcctggaatattggtgtgtttatttgcatcagatgtgctggaattcatagaaatcttggggttcatatatccagggtcaaatcagtcaacctagaccaatggacagcagaacagatacagtgcatgcaagatatgggaaatactaaagcaagactactctatgaagccaatcttccagagaactttcgaagaccacagacagatcaagcagtggaatttttcatcagagataaatatgaaaagaagaaatactgcagaagaaagatcagcaactggagcctaaaaaaagtaccagccctaaaaaagctgcggagcccactgtggatcttttaggacttgatggccctgctgtggcaccagtgaccaacgggaacacaacggtgccacccctgaacgatgatctggacatctttggaccgatgatttctaatcccttacctgcaactgtcatgcccccagctcaggggacaccctctgcaccagcagctgcaaccctgtctacagtaacatctggggatctagatttattcactgagcaaactacaaaatcagaagaagtggcaaagaaacaactttccaaagactccatcttatctctgtatggcacaggaaccattcaacagcaaagtactcctggtaatgaattttgatatctgctttcagtgacattactagaagtacatcctttgtaattatataataagatcaattatatatcttttattgttccatgtagtgagtgcttttgttgttgcagtttatacaactatgaagccgaaatgaatgagcattagaattaaaaaattaagaggcatgtacaggattcacagaactttatttggaattaacaagctgttcatagatcactaaatgttgtttcacaagcttatagaacatggattatctttgatgaattattgaaacgatttgcatgaagtttatgactgcgtacagtgtattttctctgcaggtaaacagtcttgagttaccacatggattaaaaaaaatctatgaatttttttgtaatcataacaaaatattagcataagccttattgtttacagagttttaatctttcacaccatttcctttaaaataatgagctgcatttcacatgtgagctaaaattgttgggcagcccactacacctattgaagcgagatatagtcagctctcacttccctgtttcgtactgggggaccagtggtacaaatcagcaataaaacagtgtatgatgtcatgctacatagtttggtcttcacagtggaagatattttgtgtggctgttgcatatgatttacatttcttaattaaatttactcaggttaataactgatttgtctgcatcctagaaacaaccagctctcagggtttaggtgtgggttggtctgagtagtaggagcagccaaactggaattaaaatgtttgctgtgagtagttcagaaaggcaatttttctgtgattatagagatgagtgcaactacacgtgatagctctgtcttcattcattttctttttgtggtgcaggtgtatttatgggacccacaaatataccatttacctcacaagcaccagctgcatttcagggctttccatcgatgggcgtgcctgtgcctgcagctcctggccttataggaaatgtgatgggacagagtccaagcatgatggtgggcatgcccatgcccaatgggtttatgggaaatgcacaaactggtgtgatgccacttcctcagaacgttgttggcccccaaggaggaatggtgggacaaatgggtgcaccccagagtaagtttggcctgccgcaagctcagcagccccagtggagcctctcacagatgaatcagcagatggctggcatgagtatcagtagtgcaacccctactgcaggttttggccagccctccagcacaacagcaggatggtctggaagctcatcaggtcagactctcagcacacaactgtggaaatgaaaactgcaatacaagtttcatccagaactaccacctgacattccttgctgaaacgcatctagttcccctgtttattcatatgcatattttttttctttttacccatttgttcatattaagaatgatctgattgaccgtgttggtctgtactgattcaatttgatgtggtgaaaagcaggttgataaatcattttatgtcaagggcagctttgctcatatttcccatgatttcatgtactgcattatttgagaagctgctcaacttgcaaaatcagttttcctctcaataaaattatagctctaatgtttgcatataagggaagtagttatcatgttagtaatacctctaatagtataaaccccaccccaaaattagccagtaatcctgtaggaaggtactgtatgatcaaatgtttaatcatataaatagaatgtaaatgtctcactgagcactgttttctagtgtatcaaaatgctcttatttcatcattcacttcactgtgctgttgttatgatgtgcttaacagggaacgtgattagtgaaaggaagataaacgtggatgttactccaaaacttcgtttaatgaatgcttaaagaattcaaattttatctgcctctcttgtaatttggatctcttcttaatgtacatagtgctaacatgaagacctttttctgcactatatgcaaacagggtaactaactaaaacaaagccactttcaatcttcaatccttgaaggtatatctaggtttatgacagtaattgtgtttacattttatggtgcctagtattgacaaaatgttatttccctacattaaacatgactccatagaccttttcatttgtgggtttttatttcctatgatgtatactgccactaaccttccaaaaattacttagtattgcaaagtcaggaatcatcaggaacgtttagctgacaaaatacttgtctgttttaaaaacctgttcaagtctaccaacctgttcaagtctaccaattataagggcaaattggagaaaaagaaaaaatatatactcaagagtggtatcttgcagtatcggcactgtacaaaaaaatcttccaatttagttgttgtagagaaaacatgcagaacaaatgaagacaaaacatacattttgtaccaaccatccaattagcttatgttaactgacaagctccatttaaacagatgtccatcagatgacaagaaaggctgctgtactgaagtaaaacaaacaatacctgaatgctctgtagcctaaactccaaacatcctcttccatatggatccactggctggacaaactgcaccagttgctgcttcaatttatacctcaattttcactgtgtccaggtggtactttggctcgttggctagattaaccttctctgtccgagtgtgccacacgagaacctgaaggggaaggaaatagcttgggtagcgcactcttcatggtgacactcgaggtcgggcagcacaagtgtaatgaataccttagtgcagttatttgctttcggttccagttcttcgactgttgttatctgtttgagaaagtcagattcttgcatccctggctgggatccacgacgcttaaatacagcttttggattggacaaaatgacttgaagacttacagcaaatcctttgtgaaaaat

SEQ ID NO: 367024 - DNA, 3314 bp, Homo sapiens
cttcaagaatttaaagaagactaacgttggctttatcatcttgacttttccatttctcaactttgcaaggataaaattggccactgttcttctaatacatgtggaatcctatatgatgtgcccagggacagcatatatagtggaaaagaacatagatgttggaatcacaagtgcttaatctttccaagttgctgtttcttcatctatgatatggaactaataatatgcacattcgtggggtgtgggaggaattaaaggacccaaagtatgtacagcatatatagtataggatgtctggctcagtgtgggtacttgcatagatgttaatttcttataccaaaaaccccaaatgaacctgaattgaatttaaagtgtggtgatgcattgatagtggtggtggtgatgtaggaattaagaattgtcatttacttttctttctagaattagtttggatgagttttgttcagtgagaaaatttcctgaaagaggtagacttctttaagagaaagaaaagtagtttacagaatgtagttgcagaaataatgtgaaagagagcacagattgaggagtaggaaaattaaatttagagtcccaactttgtggagtggcgtgaataaagggaagtgtacatatcactgaattcatgcttttccttaagttatctgttttcagagcagtggaatttttcatcagagataaatatgaaaagaagaaatactacgataaaaatgccatagctattacaaataaagaaaaggaaaaaaaaaaggaagagaaaaagagagaaaaggagccagaaaagccggcaaaaccacttacagctgaaaagctgcagaagaaagatcagcaactggagcctaaaaaaagtaccagccctaaaaaagctgcggagcccactgtggatcttttaggacttgatggccctgctgtggcaccagtgaccaacgggaacacaacggtgccacccctgaacgatgatctggacatctttggaccgatgatttctaatcccttacctgcaactgtcatgcccccagctcaggggacaccctctgcaccagcagctgcaaccctgtctacagtaacatctggggatctagatttattcactgagcaaactacaaaatcagaagaagtggcaaagaaacaactttccaaagactccatcttatctctgtatggcacaggaaccattcaacagcaaagtactcctggtgtatttatgggacccacaaatataccatttacctcacaagcaccagctgcatttcagggctttccatcgatgggcgtgcctgtgcctgcagctcctggccttataggaaatgtgatgggacagagtccaagcatgatggtgggcatgcccatgcccaatgggtttatgggaaatgcacaaactggtgtgatgccacttcctcagaacgttgttggcccccaaggaggaatggtgggacaaatgggtgcaccccagagtaagtttggcctgccgcaagctcagcagccccagtggagcctctcacagatgaatcagcagatggctggcatgagtatcagtagtgcaacccctactgcaggttttggccagccctccagcacaacagcaggatggtctggaagctcatcaggtcagactctcagcacacaactgtggaaatgaaaactgcaatacaagtttcatccagaactaccacctgacattccttgctgaaacgcatctagttcccctgtttattcatatgcatattttttttctttttacccatttgttcatattaagaatgatctgattgaccgtgttggtctgtactgattcaatttgatgtggtgaaaagcaggttgataaatcattttatgtcaagggcagctttgctcatatttcccatgatttcatgtactgcattatttgagaagctgctcaacttgcaaaatcagttttcctctcaataaaattatagctctaatgtttgcatataagggaagtagttatcatgttagtaatacctctaatagtataaaccccaccccaaaattagccagtaatcctgtaggaaggtactgtatgatcaaatgtttaatcatataaatagaatgtaaatgtctcactgagcactgttttctagtgtatcaaaatgctcttatttcatcattcacttcactgtgctgttgttatgatgtgcttaacagggaacgtgattagtgaaaggaagataaacgtggatgttactccaaaacttcgtttaatgaatgcttaaagaattcaaattttatctgcctctcttgtaatttggatctcttcttaatgtacatagtgctaacatgaagacctttttctgcactatatgcaaacagggtaactaactaaaacaaagccactttcaatcttcaatccttgaaggtatatctaggtttatgacagtaattgtgtttacattttatggtgcctagtattgacaaaatgttatttccctacattaaacatgactccatagaccttttcatttgtgggtttttatttcctatgatgtatactgccactaaccttccaaaaattacttagtattgcaaagtcaggaatcatcaggaacgtttagctgacaaaatacttgtctgttttaaaaacctgttcaagtctaccaacctgttcaagtctaccaattataagggcaaattggagaaaaagaaaaaatatatactcaagagtggtatcttgcagtatcggcactgtacaaaaaaatcttccaatttagttgttgtagagaaaacatgcagaacaaatgaagacaaaacatacattttgtaccaaccatccaattagcttatgttaactgacaagctccatttaaacagatgtccatcagatgacaagaaaggctgctgtactgaagtaaaacaaacaatacctgaatgctctgtagcctaaactccaaacatcctcttccatatggatccactggctggacaaactgcaccagttgctgcttcaatttatacctcaattttcactgtgtccaggtggtactttggctcgttggctagattaaccttctctgtccgagtgtgccacacgagaacctgaaggggaaggaaatagcttgggtagcgcactcttcatggtgacactcgaggtcgggcagcacaagtgtaatgaataccttagtgcagttatttgctttcggttccagttcttcgactgttgttatctgtttgagaaagtcagattcttgcatccctggctgggatccacgacgcttaaatacagcttttggattggacaaaatgacttgaagacttacagcaaatcctttgtgaaaaat

SEQ ID NO: 367025 - DNA, 3395 bp, Homo sapiens
cttcaagaatttaaagaagactaacgttggctttatcatcttgacttttccatttctcaactttgcaaggataaaattggccactgttcttctaatacatgtggaatcctatatgatgtgcccagggacagcatatatagtggaaaagaacatagatgttggaatcacaagtgcttaatctttccaagttgctgtttcttcatctatgatatggaactaataatatgcacattcgtggggtgtgggaggaattaaaggacccaaagtatgtacagcatatatagtataggatgtctggctcagtgtgggtacttgcatagatgttaatttcttataccaaaaaccccaaatgaacctgaattgaatttaaagtgtggtgatgcattgatagtggtggtggtgatgtaggaattaagaattgtcatttacttttctttctagaattagtttggatgagttttgttcagtgagaaaatttcctgaaagaggtagacttctttaagagaaagaaaagtagtttacagaatgtagttgcagaaataatgtgaaagagagcacagattgaggagtaggaaaattaaatttagagtcccaactttgtggagtggcgtgaataaagggaagtgtacatatcactgaattcatgcttttccttaagttatctgttttcagagcagtggaatttttcatcagagataaatatgaaaagaagaaatactacgataaaaatgccatagctattacaaatatttcctcctctgatgctcctcttcagcctttggtatcctctccttctctgcaagctgctgttgacaaaaataaattggagaaagaaaaggaaaaaaaaaaggaagagaaaaagagagaaaaggagccagaaaagccggcaaaaccacttacagctgaaaagctgcagaagaaagatcagcaactggagcctaaaaaaagtaccagccctaaaaaagctgcggagcccactgtggatcttttaggacttgatggccctgctgtggcaccagtgaccaacgggaacacaacggtgccacccctgaacgatgatctggacatctttggaccgatgatttctaatcccttacctgcaactgtcatgcccccagctcaggggacaccctctgcaccagcagctgcaaccctgtctacagtaacatctggggatctagatttattcactgagcaaactacaaaatcagaagaagtggcaaagaaacaactttccaaagactccatcttatctctgtatggcacaggaaccattcaacagcaaagtactcctggtgtatttatgggacccacaaatataccatttacctcacaagcaccagctgcatttcagggctttccatcgatgggcgtgcctgtgcctgcagctcctggccttataggaaatgtgatgggacagagtccaagcatgatggtgggcatgcccatgcccaatgggtttatgggaaatgcacaaactggtgtgatgccacttcctcagaacgttgttggcccccaaggaggaatggtgggacaaatgggtgcaccccagagtaagtttggcctgccgcaagctcagcagccccagtggagcctctcacagatgaatcagcagatggctggcatgagtatcagtagtgcaacccctactgcaggttttggccagccctccagcacaacagcaggatggtctggaagctcatcaggtcagactctcagcacacaactgtggaaatgaaaactgcaatacaagtttcatccagaactaccacctgacattccttgctgaaacgcatctagttcccctgtttattcatatgcatattttttttctttttacccatttgttcatattaagaatgatctgattgaccgtgttggtctgtactgattcaatttgatgtggtgaaaagcaggttgataaatcattttatgtcaagggcagctttgctcatatttcccatgatttcatgtactgcattatttgagaagctgctcaacttgcaaaatcagttttcctctcaataaaattatagctctaatgtttgcatataagggaagtagttatcatgttagtaatacctctaatagtataaaccccaccccaaaattagccagtaatcctgtaggaaggtactgtatgatcaaatgtttaatcatataaatagaatgtaaatgtctcactgagcactgttttctagtgtatcaaaatgctcttatttcatcattcacttcactgtgctgttgttatgatgtgcttaacagggaacgtgattagtgaaaggaagataaacgtggatgttactccaaaacttcgtttaatgaatgcttaaagaattcaaattttatctgcctctcttgtaatttggatctcttcttaatgtacatagtgctaacatgaagacctttttctgcactatatgcaaacagggtaactaactaaaacaaagccactttcaatcttcaatccttgaaggtatatctaggtttatgacagtaattgtgtttacattttatggtgcctagtattgacaaaatgttatttccctacattaaacatgactccatagaccttttcatttgtgggtttttatttcctatgatgtatactgccactaaccttccaaaaattacttagtattgcaaagtcaggaatcatcaggaacgtttagctgacaaaatacttgtctgttttaaaaacctgttcaagtctaccaacctgttcaagtctaccaattataagggcaaattggagaaaaagaaaaaatatatactcaagagtggtatcttgcagtatcggcactgtacaaaaaaatcttccaatttagttgttgtagagaaaacatgcagaacaaatgaagacaaaacatacattttgtaccaaccatccaattagcttatgttaactgacaagctccatttaaacagatgtccatcagatgacaagaaaggctgctgtactgaagtaaaacaaacaatacctgaatgctctgtagcctaaactccaaacatcctcttccatatggatccactggctggacaaactgcaccagttgctgcttcaatttatacctcaattttcactgtgtccaggtggtactttggctcgttggctagattaaccttctctgtccgagtgtgccacacgagaacctgaaggggaaggaaatagcttgggtagcgcactcttcatggtgacactcgaggtcgggcagcacaagtgtaatgaataccttagtgcagttatttgctttcggttccagttcttcgactgttgttatctgtttgagaaagtcagattcttgcatccctggctgggatccacgacgcttaaatacagcttttggattggacaaaatgacttgaagacttacagcaaatcctttgtgaaaaat

SEQ ID NO: 367026 - DNA, 2406 bp, Homo sapiens
acccagtccccctccccctcccctcgccggctagggtggtgcgtgccggcaggccggtcaaggaggcgggacacgtcggcgctaccaccgccaccgccgccgccgcccctcctcccgttccagctgccgctgccgcttcctgggctgagtccgcccgcggtcccggcggcgccaggtgcgttcactctgcccggctccagccagcgtccgccgccgccgtagctgccccaggctccccgccccgctgccgagatggcgacgcgctcctgtcgggagaaggctcagaagctgaacgagcagcaccagctcatcctatccaagcttctgagggaggaggacaacaagtactgcgccgactgcgaggccaaaggtcctcgatgggcttcctggaatattggtgtgtttatttgcatcagatgtgctggaattcatagaaatcttggggttcatatatccagggtcaaatcagtcaacctagaccaatggacagcagaacagatacagtgcatgcaagatatgggaaatactaaagcaagactactctatgaagccaatcttccagagaactttcgaagaccacagacagatcaagcagtggaatttttcatcagagataaatatgaaaagaagaaatactacgataaaaatgccatagctattacaaataaagaaaaggaaaaaaaaaaggaagagaaaaagagagaaaaggagccagaaaagccggcaaaaccacttacagctgaaaagctgcagaagaaagatcagcaactggagcctaaaaaaagtaccagccctaaaaaagctgcggagcccactgtggatcttttaggacttgatggccctgctgtggcaccagtgaccaacgggaacacaacggtgccacccctgaacgatgatctggacatctttggaccgatgatttctaatcccttacctgcaactgtcatgcccccagctcaggggacaccctctgcaccagcagctgcaaccctgtctacagtaacatctggggatctagatttattcactgagcaaactacaaaatcagaagaagtggcaaagaaacaactttccaaagactccatcttatctctgtatggcacaggaaccattcaacagcaaagtactcctggtgtatttatgggacccacaaatataccatttacctcacaagcaccagctgcatttcagggctttccatcgatgggcgtgcctgtgcctgcagctcctggccttataggaaatgtgatgggacagagtccaagcatgatggtgggcatgcccatgcccaatgggtttatgggaaatgcacaaactggtgtgatgccacttcctcagaacgttgttggcccccaaggaggaatggtgggacaaatgggtgcaccccagagtaagtttggcctgccgcaagctcagcagccccagtggagcctctcacagatgaatcagcagatggctggcatgagtatcagtagtgcaacccctactgcaggttttggccagccctccagcacaacagcaggatggtctggaagctcatcaggtcagactctcagcacacaactgtggaaatgaaaactgcaatacaagtttcatccagaactaccacctgacattccttgctgaaacgcatctagttcccctgtttattcatatgcatattttttttctttttacccatttgttcatattaagaatgatctgattgaccgtgttggtctgtactgattcaatttgatgtggtgaaaagcaggttgataaatcattttatgtcaagggcagctttgctcatatttcccatgatttcatgtactgcattatttgagaagctgctcaacttgcaaaatcagttttcctctcaataaaattatagctctaatgtttgcatataagggaagtagttatcatgttagtaatacctctaatagtataaaccccaccccaaaattagccagtaatcctgtaggaaggtactgtatgatcaaatgtttaatcatataaatagaatgtaaatgtctcactgagcactgttttctagtgtatcaaaatgctcttatttcatcattcacttcactgtgctgttgttatgatgtgcttaacagggaacgtgattagtgaaaggaagataaacgtggatgttactccaaaacttcgtttaatgaatgcttaaagaattcaaattttatctgcctctcttgtaatttggatctcttcttaatgtacatagtgctaacatgaagacctttttctgcactatatgcaaacagggtaactaactaaaacaaagccactttcaatcttcaatccttgaaggtatatctaggtttatgacagtaattgtgtttacattttatggtgcctagtattgacaaaatgttatttccctacattaaacatgactccata

SEQ ID NO: 367027 - DNA, 1886 bp, Homo sapiens
gagatcatcgtggatgttactccaaaacttcgtttaatgaatgcttaaagaattcaaattttatctgcctctcttgtaatttggagcctctcacatgaatcagcagatggctggcatgagtatcagtagtgcaacccctactgcaggttttggccagccctccagcacaacagcaggatggtctggaagctcatcaggtcagactctcagcacacaactgtggaaatgaaaactgcaatacaagtttcatccagaactaccacctgacattccttgctgaaacgcatctagttcccctgtttattcatatgcatattttttttctttttacccatttgttcatattaagaatgatctgattgaccgtgttggtctgtactgattcaatttgatgtggtgaaaagcaggttgataaatcattttatgtcaagggcagctttgctcatatttcccatgatttcatgtactgcattatttgagaagctgctcaacttgcaaaatcagttttcctctcaataaaattatagctctaatgtttgcatataagggaagtagttatcatgttagtaatacctctaatagtataaaccccaccccaaaattagccagtaatcctgtaggaaggtactgtatgatcaaatgtttaatcatataaatagaatgtaaatgtctcactgagcactgttttctagtgtatcaaaatgctcttatttcatcattcacttcactgtgctgttgttatgatgtgcttaacagggaacgtgattagtgaaaggaagataaacgtggatgttactccaaaacttcgtttaatgaatgcttaaagaattcaaattttatctgcctctcttgtaatttggatctcttcttaatgtacatagtgctaacatgaagacctttttctgcactatatgcaaacagggtaactaactaaaacaaagccactttcaatcttcaatccttgaaggtatatctaggtttatgacagtaattgtgtttacattttatggtgcctagtattgacaaaatgttatttccctacattaaacatgactccatagaccttttcatttgtgggtttttatttcctatgatgtatactgccactaaccttccaaaaattacttagtattgcaaagtcaggaatcatcaggaacgtttagctgacaaaatacttgtctgttttaaaaacctgttcaagtctaccaacctgttcaagtctaccaattataagggcaaattggagaaaaagaaaaaatatatactcaagagtggtatcttgcagtatcggcactgtacaaaaaaatcttccaatttagttgttgtagagaaaacatgcagaacaaatgaagacaaaacatacattttgtaccaaccatccaattagcttatgttaactgacaagctccatttaaacagatgtccatcagatgacaagaaaggctgctgtactgaagtaaaacaaacaatacctgaatgctctgtagcctaaactccaaacatcctcttccatatggatccactggctggacaaactgcaccagttgctgcttcaatttatacctcaattttcactgtgtccaggtggtactttggctcgttggctagattaaccttctctgtccgagtgtgccacacgagaacctgaaggggaaggaaatagcttgggtagcgcactcttcatggtgacactcgaggtcgggcagcacaagtgtaatgaataccttagtgcagttatttgctttcggttccagttcttcgactgttgttatctgtttgagaaagtcagattcttgcatccctggctgggatccacgacgcttaaatacagcttttggattggacaaaatgacttgaagacttacagcaaatcctttgtgaaaaat

SEQ ID NO: 367028 - DNA, 2183 bp, Homo sapiens
cattgatgttcctccagcattttggcaatcttggtttctgtttggtcacttgttttacctttagagcattcagggaatagtctagagtgatttctaacattagcacaatcactatatatcacagttaattttgctaccaccatttacaagaatataggtaaaacattggtctctacccgctgggaatctaaaaaattgtatgtgctaagtgtcagtcacatggtcaacatgctgaagcacacccagctcaggttaaggtgctagatgaaccaggaaggagttaatactggctcttacttccagataatgcagaagggtgatgctgttctccagcactccatcagtgcaatctactggccaacgacaaggtggttaaaatgtcctttagtagatgaatcagcagatggctggcatgagtatcagtagtgcaacccctactgcaggttttggccagccctccagcacaacagcaggatggtctggaagctcatcaggtcagactctcagcacacaactgtggaaatgaaaactgcaatacaagtttcatccagaactaccacctgacattccttgctgaaacgcatctagttcccctgtttattcatatgcatattttttttctttttacccatttgttcatattaagaatgatctgattgaccgtgttggtctgtactgattcaatttgatgtggtgaaaagcaggttgataaatcattttatgtcaagggcagctttgctcatatttcccatgatttcatgtactgcattatttgagaagctgctcaacttgcaaaatcagttttcctctcaataaaattatagctctaatgtttgcatataagggaagtagttatcatgttagtaatacctctaatagtataaaccccaccccaaaattagccagtaatcctgtaggaaggtactgtatgatcaaatgtttaatcatataaatagaatgtaaatgtctcactgagcactgttttctagtgtatcaaaatgctcttatttcatcattcacttcactgtgctgttgttatgatgtgcttaacagggaacgtgattagtgaaaggaagataaacgtggatgttactccaaaacttcgtttaatgaatgcttaaagaattcaaattttatctgcctctcttgtaatttggatctcttcttaatgtacatagtgctaacatgaagacctttttctgcactatatgcaaacagggtaactaactaaaacaaagccactttcaatcttcaatccttgaaggtatatctaggtttatgacagtaattgtgtttacattttatggtgcctagtattgacaaaatgttatttccctacattaaacatgactccatagaccttttcatttgtgggtttttatttcctatgatgtatactgccactaaccttccaaaaattacttagtattgcaaagtcaggaatcatcaggaacgtttagctgacaaaatacttgtctgttttaaaaacctgttcaagtctaccaacctgttcaagtctaccaattataagggcaaattggagaaaaagaaaaaatatatactcaagagtggtatcttgcagtatcggcactgtacaaaaaaatcttccaatttagttgttgtagagaaaacatgcagaacaaatgaagacaaaacatacattttgtaccaaccatccaattagcttatgttaactgacaagctccatttaaacagatgtccatcagatgacaagaaaggctgctgtactgaagtaaaacaaacaatacctgaatgctctgtagcctaaactccaaacatcctcttccatatggatccactggctggacaaactgcaccagttgctgcttcaatttatacctcaattttcactgtgtccaggtggtactttggctcgttggctagattaaccttctctgtccgagtgtgccacacgagaacctgaaggggaaggaaatagcttgggtagcgcactcttcatggtgacactcgaggtcgggcagcacaagtgtaatgaataccttagtgcagttatttgctttcggttccagttcttcgactgttgttatctgtttgagaaagtcagattcttgcatccctggctgggatccacgacgcttaaatacagcttttggattggacaaaatgacttgaagacttacagcaaatcctttgtgaaaaat

SEQ ID NO: 367029 - DNA, 2852 bp, Homo sapiens
acccagtccccctccccctcccctcgccggctagggtggtgcgtgccggcaggccggtcaaggaggcgggacacgtcggcgctaccaccgccaccgccgccgccgcccctcctcccgttccagctgccgctgccgcttcctgggctgagtccgcccgcggtcccggcggcgccaggtgcgttcactctgcccggctccagccagcgtccgccgccgccgtagctgccccaggctccccgccccgctgccgagatggcgacgcgctcctgtcgggagaaggctcagaagctgaacgagcagcaccagctcatcctatccaagcttctgagggaggaggacaacaagtactgcgccgactgcgaggccaaaggtcctcgatgggcttcctggaatattggtgtgtttatttgcatcagatgtgctggaattcatagaaatcttggggttcatatatccagggtcaaatcagtcaacctagaccaatggacagcagaacagatacagtgcatgcaagatatgggaaatactaaagcaagactactctatgaagccaatcttccagagaactttcgaagaccacagacagatcaagcagtggaatttttcatcagagataaatatgaaaagaagaaatactacgataaaaatgccatagctattacaaataaagaaaaggaaaaaaaaaaggaagagaaaaagagagaaaaggagccagaaaagccggcaaaaccacttacagctgaaaagctgcagaagaaagatcagcaactggagcctaaaaaaagtaccagccctaaaaaagctgcggagcccactgtggatcttttaggacttgatggccctgctgtggcaccagtgaccaacgggaacacaacggtgccacccctgaacgatgatctggacatctttggaccgatgatttctaatcccttacctgcaactgtcatgcccccagctcaggggacaccctctgcaccagcagctgcaaccctgtctacagtaacatctggggatctagatttattcactgagcaaactacaaaatcagaagaagtggcaaagaaacaactttccaaagactccatcttatctctgtatggcacaggaaccattcaacagcaaagtactcctggtaatgaattttgatatctgctttcagtgacattactagaagtacatcctttgtaattatataataagatcaattatatatcttttattgttccatgtagtgagtgcttttgttgttgcagtttatacaactatgaagccgaaatgaatgagcattagaattaaaaaattaagaggcatgtacaggattcacagaactttatttggaattaacaagctgttcatagatcactaaatgttgtttcacaagcttatagaacatggattatctttgatgaattattgaaacgatttgcatgaagtttatgactgcgtacagtgtattttctctgcaggtaaacagtcttgagttaccacatggattaaaaaaaatctatgaatttttttgtaatcataacaaaatattagcataagccttattgtttacagagttttaatctttcacaccatttcctttaaaataatgagctgcatttcacatgtgagctaaaattgttgggcagcccactacacctattgaagcgagatatagtcagctctcacttccctgtttcgtactgggggaccagtggtacaaatcagcaataaaacagtgtatgatgtcatgctacatagtttggtcttcacagtggaagatattttgtgtggctgttgcatatgatttacatttcttaattaaatttactcaggttaataactgatttgtctgcatcctagaaacaaccagctctcagggtttaggtgtgggttggtctgagtagtaggagcagccaaactggaattaaaatgtttgctgtgagtagttcagaaaggcaatttttctgtgattatagagatgagtgcaactacacgtgatagctctgtcttcattcattttctttttgtggtgcaggtgtatttatgggacccacaaatataccatttacctcacaagcaccagctgcatttcagggctttccatcgatgggcgtgcctgtgcctgcagctcctggccttataggaaatgtgatgggacagagtccaagcatgatggtgggcatgcccatgcccaatgggtttatgggaaatgcacaaactggtgtgatgccacttcctcagaacgttgttggcccccaaggaggaatggtgggacaaatgggtgcaccccagagtaagtttggcctgccgcaagctcagcagccccagtggagcctctcacagataatgcagaagggtgatgctgttctccagcactccatcagtgcaatctactggccaacgacaaggtggttaaaatgtcctttagtaggtatgaagacgtgatctgcttcttcagacacttatgcctgattagtgatgtagtttatgttagtgtctttgaaactgtaaataagtcaagtcaaatgtattaaattaagaacacagtctaactctgagtgtaagttttaaacccactcactatatggtaaatcttgcctttccttctcttatcaccaattttggaagtaagagaatcacagggttaagatgcttatatatatatatatttgactccagtcttgaagaaaaatacatgtaatcttatgctttattgcatacaatgaaaataaattttagatgtttatgttgttagatcagcgagagaaataaatgctttatgaccactttaaaaatatttaggaagtatataagattttaatagagaataatatctatcatacaaagtttataggataatttta

SEQ ID NO: 367030 - DNA, 402 bp, Homo sapiens
tgattgtagatgtttttatatgggcttgggcttgtaagtgatcctcttgaatggcaccattttaccttctacaattgtttgattcctatctaattttataactttatttggattttaagtaatggataagctgcgctttactatgcagaatttgatagcttattttggtgtttgtctcaggggacaccctctgcaccagcagctgcaaccctgtctacagtaacatctggggatctagatttattcactgagcaaactacaaaatcagaagaagtggcaaagaaacaactttccaaagactccatcttatctctgtatggcacaggaaccattcaacagcaaagtactcctggtaatgaattttgatatctgctttcagtgacattactagaagtacatcct

SEQ ID NO: 367031 - DNA, 3313 bp, Homo sapiens
acccagtccccctccccctcccctcgccggctagggtggtgcgtgccggcaggccggtcaaggaggcgggacacgtcggcgctaccaccgccaccgccgccgccgcccctcctcccgttccagctgccgctgccgcttcctgggctgagtccgcccgcggtcccggcggcgccaggtgcgttcactctgcccggctccagccagcgtccgccgccgccgtagctgccccaggctccccgccccgctgccgagatggcgacgcgctcctgtcgggagaaggctcagaagctgaacgagcagcaccagctcatcctatccaagcttctgagggaggaggacaacaagtactgcgccgactgcgaggccaaaggtcctcgatgggcttcctggaatattggtgtgtttatttgcatcagatgtgctggaattcatagaaatcttggggttcatatatccagggtcaaatcagtcaacctagaccaatggacagcagaacagatacagtgcatgcaagatatgggaaatactaaagcaagactactctatgaagccaatcttccagagaactttcgaagaccacagacagatcaagcagtggaatttttcatcagagataaatatgaaaagaagaaatactacgataaaaatgccatagctattacaaatatttcctcctctgatgctcctcttcagcctttggtatcctctccttctctgcaagctgctgttgacaaaaataaattggagaaagaaaaggaaaaaaaaaaggaagagaaaaagagagaaaaggagccagaaaagccggcaaaaccacttacagctgaaaagctgcagaagaaagatcagcaactggagcctaaaaaaagtaccagccctaaaaaagctgcggagcccactgtggatcttttaggacttgatggccctgctgtggcaccagtgaccaacgggaacacaacggtgccacccctgaacgatgatctggacatctttggaccgatgatttctaatcccttacctgcaactgtcatgcccccagctcaggggacaccctctgcaccagcagctgcaaccctgtctacagtaacatctggggatctagatttattcactgagcaaactacaaaatcagaagaagtggcaaagaaacaactttccaaagactccatcttatctctgtatggcacaggaaccattcaacagcaaagtactcctggtgtatttatgggacccacaaatataccatttacctcacaagcaccagctgcatttcagggctttccatcgatgggcgtgcctgtgcctgcagctcctggccttataggaaatgtgatgggacagagtccaagcatgatggtgggcatgcccatgcccaatgggtttatgggaaatgcacaaactggtgtgatgccacttcctcagaacgttgttggcccccaaggaggaatggtgggacaaatgggtgcaccccagagtaagtttggcctgccgcaagctcagcagccccagtggagcctctcacagatgaatcagcagatggctggcatgagtatcagtagtgcaacccctactgcaggttttggccagccctccagcacaacagcaggatggtctggaagctcatcaggtcagactctcagcacacaactgtggaaatgaaaactgcaatacaagtttcatccagaactaccacctgacattccttgctgaaacgcatctagttcccctgtttattcatatgcatattttttttctttttacccatttgttcatattaagaatgatctgattgaccgtgttggtctgtactgattcaatttgatgtggtgaaaagcaggttgataaatcattttatgtcaagggcagctttgctcatatttcccatgatttcatgtactgcattatttgagaagctgctcaacttgcaaaatcagttttcctctcaataaaattatagctctaatgtttgcatataagggaagtagttatcatgttagtaatacctctaatagtataaaccccaccccaaaattagccagtaatcctgtaggaaggtactgtatgatcaaatgtttaatcatataaatagaatgtaaatgtctcactgagcactgttttctagtgtatcaaaatgctcttatttcatcattcacttcactgtgctgttgttatgatgtgcttaacagggaacgtgattagtgaaaggaagataaacgtggatgttactccaaaacttcgtttaatgaatgcttaaagaattcaaattttatctgcctctcttgtaatttggatctcttcttaatgtacatagtgctaacatgaagacctttttctgcactatatgcaaacagggtaactaactaaaacaaagccactttcaatcttcaatccttgaaggtatatctaggtttatgacagtaattgtgtttacattttatggtgcctagtattgacaaaatgttatttccctacattaaacatgactccatagaccttttcatttgtgggtttttatttcctatgatgtatactgccactaaccttccaaaaattacttagtattgcaaagtcaggaatcatcaggaacgtttagctgacaaaatacttgtctgttttaaaaacctgttcaagtctaccaacctgttcaagtctaccaattataagggcaaattggagaaaaagaaaaaatatatactcaagagtggtatcttgcagtatcggcactgtacaaaaaaatcttccaatttagttgttgtagagaaaacatgcagaacaaatgaagacaaaacatacattttgtaccaaccatccaattagcttatgttaactgacaagctccatttaaacagatgtccatcagatgacaagaaaggctgctgtactgaagtaaaacaaacaatacctgaatgctctgtagcctaaactccaaacatcctcttccatatggatccactggctggacaaactgcaccagttgctgcttcaatttatacctcaattttcactgtgtccaggtggtactttggctcgttggctagattaaccttctctgtccgagtgtgccacacgagaacctgaaggggaaggaaatagcttgggtagcgcactcttcatggtgacactcgaggtcgggcagcacaagtgtaatgaataccttagtgcagttatttgctttcggttccagttcttcgactgttgttatctgtttgagaaagtcagattcttgcatccctggctgggatccacgacgcttaaatacagcttttggattggacaaaatgacttgaagacttacagcaaatcctttgtgaaaaat

SEQ ID NO: 367032 - DNA, 2392 bp, Homo sapiens
acccagtccccctccccctcccctcgccggctagggtggtgcgtgccggcaggccggtcaaggaggcgggacacgtcggcgctaccaccgccaccgccgccgccgcccctcctcccgttccagctgccgctgccgcttcctgggctgagtccgcccgcggtcccggcggcgccaggtgcgttcactctgcccggctccagccagcgtccgccgccgccgtagctgccccaggctccccgccccgctgccgagatggcgacgcgctcctgtcgggagaaggctcagaagctgaacgagcagcaccagctcatcctatccaagcttctgagggaggaggacaacaagtactgcgccgactgcgaggccaaaggtcctcgatgggcttcctggaatattggtgtgtttatttgcatcagatgtgctggaattcatagaaatcttggggttcatatatccagggtcaaatcagtcaacctagaccaatggacagcagaacagatacagtgcatgcaagatatgggaaatactaaagcaagactactctatgaagccaatcttccagagaactttcgaagaccacagacagatcaagcagtggaatttttcatcagagataaatatgaaaagaagaaatactacgataaaaatgccatagctattacaaataaagaaaaggaaaaaaaaaaggaagagaaaaagagagaaaaggagccagaaaagccggcaaaaccacttacagctgaaaagctgcagaagaaagatcagcaactggagcctaaaaaaagtaccagccctaaaaaagctgcggagcccactgtggatcttttaggacttgatggccctgctgtggcaccagtgaccaacgggaacacaacggtgccacccctgaacgatgatctggacatctttggaccgatgatttctaatcccttacctgcaactgtcatgcccccagctcaggggacaccctctgcaccagcagctgcaaccctgtctacagtaacatctggggatctagatttattcactgagcaaactacaaaatcagaagaagtggcaaagaaacaactttccaaagactccatcttatctctgtatggcacaggaaccattcaacagcaaagtactcctggtgtatttatgggacccacaaatataccatttacctcacaagcaccagctgcatttcagggctttccatcgatgggcgtgcctgtgcctgcagctcctggccttataggaaatgtgatgggacagagtccaagcatgatggtgggcatgcccatgcccaatgggtttatgggaaatgcacaaactggtgtgatgccacttcctcagaacgttgttggcccccaaggaggaatggtgggacaaatgggtgcaccccagagtaagtttggcctgccgcaagctcagcagccccagtggagcctctcacagatgaatcagcagatggctggcatgagtatcagtagtgcaacccctactgcaggttttggccagccctccagcacaacagcaggatggtctggaagctcatcaggtcagactctcagcacacaactgtggaaatgaaaactgcaatacaagtttcatccagaactaccacctgacattccttgctgaaacgcatctagttcccctgtttattcatatgcatattttttttctttttacccatttgttcatattaagaatgatctgattgaccgtgttggtctgtactgattcaatttgatgtggtgaaaagcaggttgataaatcattttatgtcaagggcagctttgctcatatttcccatgatttcatgtactgcattatttgagaagctgctcaacttgcaaaatcagttttcctctcaataaaattatagctctaatgtttgcatataagggaagtagttatcatgttagtaatacctctaatagtataaaccccaccccaaaattagccagtaatcctgtaggaaggtactgtatgatcaaatgtttaatcatataaatagaatgtaaatgtctcactgagcactgttttctagtgtatcaaaatgctcttatttcatcattcacttcactgtgctgttgttatgatgtgcttaacagggaacgtgattagtgaaaggaagataaacgtggatgttactccaaaacttcgtttaatgaatgcttaaagaattcaaattttatctgcctctcttgtaatttggatctcttcttaatgtacatagtgctaacatgaagacctttttctgcactatatgcaaacagggtaactaactaaaacaaagccactttcaatcttcaatccttgaaggtatatctaggtttaccccggcctttgtgttaaggtgggatggtttttttttttaaaaaaagggtcccccccctcgtta

SEQ ID NO: 367033 - DNA, 1050 bp, Homo sapiens
acccagtccccctccccctcccctcgccggctagggtggtgcgtgccggcaggccggtcaaggaggcgggacacgtcggcgctaccaccgccaccgccgccgccgcccctcctcccgttccagctgccgctgccgcttcctgggctgagtccgcccgcggtcccggcggcgccaggtgcgttcactctgcccggctccagccagcgtccgccgccgccgtagctgccccaggctccccgccccgctgccgagatggcgacgcgctcctgtcgggagaaggctcagaagctgaacgagcagcaccagctcatcctatccaagcttctgagggaggaggacaacaagtactgcgccgactgcgaggccaaaggtcctcgatgggcttcctggaatattggtgtgtttatttgcatcagatgtgctggaattcatagaaatcttggggttcatatatccagggtcaaatcagtcaacctagaccaatggacagcagaacagatacagtgcatgcaagatatgggaaatactaaagcaagactactctatgaagccaatcttccagagaactttcgaagaccacagacagatcaagcagtggaatttttcatcagagataaatatgaaaagaagaaatactacgataaaaatgccatagctattacaaatatttcctcctctgatgctcctcttcagcctttggtatcctctccttctctgcaagctgctgttgacaaaaataaattggagaaagaaaaggaaaaaaaaaaggaagagaaaaagagagaaaaggagccagaaaagccggcaaaaccacttacagctgaaaagctgcagaagaaagatcagcaactggagcctaaaaaaagtaccagccctaaaaaagctgcggagcccactgtggatcttttaggacttgtttggagaaagattgagaaggaaaagagtgaaaggcagttagttgaagtggaagagttgaccttcatgtactgctttccaaaaaattgatcctagttgttattgaataaattgttgtctgttttaagaattata

SEQ ID NO: 367034 - DNA, 309 bp, Homo sapiens
tgagatggagtctcgctctgtcgcccaggctggagtacagtggtgcgagctcggctcactgcaagctccgcctcccgggttcacgccattctcctgcctcagcctcccgagtagctgggactacaggcactcgccaccacggccagctaattttttgtgttttttttagtagagacggagtttcaccgtgttagccagtttggtctcgatctcctgacttcgtgatccatttctcttaatctcagaaagccacactcggacatgctgcctatataatatccagaccaatgctacatagagttaaaggct

SEQ ID NO: 367035 - DNA, 171 bp, Homo sapiens
gaggtaaacagacaagatacacatatagttggcagattttaggggatagctgagctatagaaaatgacatactaatatgtgttatcattttttaaattggccctattgatgtaccctgcatgttaaacttatcctttctggcaggagcaggacctaatctactatcaaata

SEQ ID NO: 367036 - DNA, 301 bp, Homo sapiens
ggaatatctacctgtaggtttaatttaagggttaaatggaataatttatataaagcacctctgcatctgccccttagtcctaaataaacaactgcagatgatattgttggaaaagttgaggaagaaaagatatttgttatctattactgcataacaaaccaaaagcaacagtaaagatttatgacagtcacagtttctgtaggtcaggaatttgcagtggcttagtcgatagtcctggcccaaggcctcactcacatggctgacaggctggcgctccctgatgatggagaggcttcagttc

SEQ ID NO: 367037 - DNA, 912 bp, Homo sapiens
acccaacacacgcattcctggctacttaccaaggagaatagaaagcaggcagatctctacagcagctctctacctgattgcaaaacaatggaaatgcccacatgtccacaaacaagtgtgtggtctgcctgtgccatgaagcacagtgtggctgagcgtcaagagtccccacactcaaaggaggcagcagatacagggctgcacactgtgtgattccacacatgtgacattctggacacggacatgctggatggcaaaacgagcatcgggctgagaggactgctgagaaggggaacggggctgctgggatgtgggttgattgtagcagtagctcatggagatgtgacctcaaaagagtgatttttactatgtgcatactatacctccacaaacttgactttaaaaaaataaaatattcacagaaaaaaacaaaaacaaatgtaaaaccatcagactactttatcagaggtgttatttttagatagaggtctttgaactccatcctaggaacattgtacccatgtcctcccagaactgcatcttgcactgggtgtcggaagacagccctgcaagacctgtatgctctgtaccattcagtggtttttaaggttaactaccagaagtcatatctgaggcctcccagaagcattactctaaggaaagtagttaaatgtggacagtgacagcagaaacatttacacattaaaccagtttatagaacatgagaatgttcagagcataaagaagcttgtcagctcaatgacttacgaggcgtgggccattaaaaaaaaaggtctggagtttgggaaggagaaaggaatggggatgtgacctcaaaagagtgatttttactatgtgcatactatacctccacaaacttgactttaaaaaaataaaatattcacagaaaaa

SEQ ID NO: 367038 - DNA, 272 bp, Homo sapiens
aatgcagcggactcggcaggaggagatcagcaggctgatgcacatacagaaaaatgctgactgcacaagtttcagtgagctggtggagaactttaagaagaccttgagccacactgacccaatggtcttggatgattttggcactagcttacccttcatcgatatctacttttccactctggactaccaggacacaactgtccacaagcttcaagagctgtagtattagatcgtgcatgtgccgagtccgctgcattggggattctgttgtc

SEQ ID NO: 367039 - DNA, 755 bp, Homo sapiens
aatgcagcggactcggcaggaggagatcagcaggctgatgcacatacagaaaaatgctgactgcacaagtttcagtgagctggtggagaactttaagaagaccttgagccacactgacccaatggtcttggatgattttggcactagcttacccttcatcgatatctacttttccactctggactaccaggacacaactgtccacaagcttcaagagctgtactatgagatcgtgcatgtgctgagcctaatgctggaagacttgccccaggagaagccccagtccttggaaaaggtggatgagaagtagctgggcatggggcacccatgtgccgagagccttgcagaccatgacaggtccctattaaacacaggctttctgagttgtcctctccagagttgctgtgattatggcatttccccaccttttagagttgggcctggacaggtgctcatgaagtgtgattccccagagccaactccccgtcccccaccacaggacatgcagacctagggaatggggagagggaagctcaagacttgtcctggccagaggccagatccagggcccatgctggctctaggctccctggacctagcagcaaggacctggggaagctgcctgaggaccacagaccaagagggcctccagctaccccccaaagcacatggcccccttgagctggtgtggccctgttgatctgggtgtgggtgttctcatactgacagagtcacatctctctctgtgggcccac

SEQ ID NO: 367040 - DNA, 394 bp, Homo sapiens
aatgcagcggactcggcaggaggagatcagcaggctgatgcacatacagaaaaatgctgactgcacaagtttcagtgagctggtggagaactttaagaagaccttgagccacactgacccaatggtcttggatgattttggcactagcttacccttcatcgatatctacttttccactctggactaccaggacacaactgtccacaagcttcaagagctgtactatgagatcgtgcatgtgctgagcctaatgctggaagacttgccccaggagaagccccagtccttggaaaaggtggatgagaagtagctgggcatggggcacccatgtgccgagagccttgcagaccatgacaggtccctattaaacacaggctttctgagttgtcctctc

SEQ ID NO: 367041 - DNA, 2222 bp, Homo sapiens
cccctagagggcctgggaggaagtgggttttgcatacagtccctgttgactctagtgccccctgctggccccagacgcgagttccggcgaggcttcagggtacagctcccccgcagccagaagccgggcctgcagcgcctcagcaccgctccgggacaccccacccgcttcccaggcgtgacctgtcaacagcaacttcgcggtgtggtgaactctctgaggaaaaaccattttgattattactctcagacgtgcgtggcaacaagtgactgagacctagaaatccaagcgttggaggtcctgaggccagcctaagtcgcttcaaaatggaacgaaggcgtttgtggggttccattcagagccgatacatcagcatgagtgtgtggacaagcccacggagacttgtggagctggcagggcagagcctgctgaaggatgaggccctggccattgccgccctggagttgctgcccagggagctcttcccgccactcttcatggcagcctttgacgggagacacagccagaccctgaaggcaatggtgcaggcctggcccttcacctgcctccctctgggagtgctgatgaagggacaacatcttcacctggagaccttcaaagctgtgcttgatggacttgatgtgctccttgcccaggaggttcgccccaggaggtggaaacttcaagtgctggatttacggaagaactctcatcaggacttctggactgtatggtctggaaacagggccagtctgtactcatttccagagccagaagcagctcagcccatgacaaagaagcgaaaagtagatggtttgagcacagaggcagagcagcccttcattccagtagaggtgctcgtagacctgttcctcaaggaaggtgcctgtgatgaattgttctcctacctcattgagaaagtgaagcgaaagaaaaatgtactacgcctgtgctgtaagaagctgaagatttttgcaatgcccatgcaggatatcaagatgatcctgaaaatggtgcagctggactctattgaagatttggaagtgacttgtacctggaagctacccaccttggcgaaattttctccttacctgggccagatgattaatctgcgtagactcctcctctcccacatccatgcatcttcctacatttccccggagaaggaagagcagtatatcgcccagttcacctctcagttcctcagtctgcagtgcctgcaggctctctatgtggactctttatttttccttagaggccgcctggatcagttgctcaggcacgtgatgaaccccttggaaaccctctcaataactaactgccggctttcggaaggggatgtgatgcatctgtcccagagtcccagcgtcagtcagctaagtgtcctgagtctaagtggggtcatgctgaccgatgtaagtcccgagcccctccaagctctgctggagagagcctctgccaccctccaggacctggtctttgatgagtgtgggatcacggatgatcagctccttgccctcctgccttccctgagccactgctcccagcttacaaccttaagcttctacgggaattccatctccatatctgccttgcagagtctcctgcagcacctcatcgggctgagcaatctgacccacgtgctgtatcctgtccccctggagagttatgaggacatccatggtaccctccacctggagaggcttgcctatctgcatgccaggctcagggagttgctgtgtgagttggggcggcccagcatggtctggcttagtgccaacccctgtcctcactgtggggacagaaccttctatgacccggagcccatcctgtgcccctgtttcatgcctaactagctgggtgcacatatcaaatgcttcattctgcatacttggacactaaagccaggatgtgcatgcatcttgaagcaacaaagcagccacagtttcagacaaatgttcagtgtgagtgaggaaaacatgttcagtgaggaaaaaacattcagacaaatgttcagtgaggaaaaaaaggggaagttggggataggcagatgttgacttgaggagttaatgtgatctttggggagatacatcttatagagttagaaatagaatctgaatttctaaagggagattctggcttgggaagtacatgtaggagttaatccctgtgtagactgttgtaaagaaactgttgaaaataaagagaagcaatgtgaagca

SEQ ID NO: 367042 - DNA, 2094 bp, Homo sapiens
  misc_feature (11)..(11): n is a, c, g, or t
cgcgggcctcngcacgagggggaaaccgactcccgggagcagggaggaacgcgcgctccagagacaacttcgcggtgtggtgaactctctgaggaaaaaccattttgattattactctcagacgtgcgtggcaacaagtgactgagacctagaaatccaagcgttggaggtcctgaggccagcctaagtcgcttcaaaatggaacgaaggcgtttgtggggttccattcagagccgatacatcagcatgagtgtgtggacaagcccacggagacttgtggagctggcagggcagagcctgctgaaggatgaggccctggccattgccgccctggagttgctgcccagggagctcttcccgccactcttcatggcagcctttgacgggagacacagccagaccctgaaggcaatggtgcaggcctggcccttcacctgcctccctctgggagtgctgatgaagggacaacatcttcacctggagaccttcaaagctgtgcttgatggacttgatgtgctccttgcccaggaggttcgccccaggaggtggaaacttcaagtgctggatttacggaagaactctcatcaggacttctggactgtatggtctggaaacagggccagtctgtactcatttccagagccagaagcagctcagcccatgacaaagaagcgaaaagtagatggtttgagcacagaggcagagcagcccttcattccagtagaggtgctcgtagacctgttcctcaaggaaggtgcctgtgatgaattgttctcctacctcattgagaaagtgaagcgaaagaaaaatgtactacgcctgtgctgtaagaagctgaagatttttgcaatgcccatgcaggatatcaagatgatcctgaaaatggtgcagctggactctattgaagatttggaagtgacttgtacctggaagctacccaccttggcgaaattttctccttacctgggccagatgattaatctgcgtagactcctcctctcccacatccatgcatcttcctacatttccccggagaaggaagagcagtatatcgcccagttcacctctcagttcctcagtctgcagtgcctgcaggctctctatgtggactctttatttttccttagaggccgcctggatcagttgctcaggcacgtgatgaaccccttggaaaccctctcaataactaactgccggctttcggaaggggatgtgatgcatctgtcccagagtcccagcgtcagtcagctaagtgtcctgagtctaagtggggtcatgctgaccgatgtaagtcccgagcccctccaagctctgctggagagagcctctgccaccctccaggacctggtctttgatgagtgtgggatcacggatgatcagctccttgccctcctgccttccctgagccactgctcccagcttacaaccttaagcttctacgggaattccatctccatatctgccttgcagagtctcctgcagcacctcatcgggctgagcaatctgacccacgtgctgtatcctgtccccctggagagttatgaggacatccatggtaccctccacctggagaggcttgcctatctgcatgccaggctcagggagttgctgtgtgagttggggcggcccagcatggtctggcttagtgccaacccctgtcctcactgtggggacagaaccttctatgacccggagcccatcctgtgcccctgtttcatgcctaactagctgggtgcacatatcaaatgcttcattctgcatacttggacactaaagccaggatgtgcatgcatcttgaagcaacaaagcagccacagtttcagacaaatgttcagtgtgagtgaggaaaacatgttcagtgaggaaaaaacattcagacaaatgttcagtgaggaaaaaaaggggaagttggggataggcagatgttgacttgaggagttaatgtgatctttggggagatacatcttatagagttagaaatagaatctgaatttctaaagggagattctggcttgggaagtacatgtaggagttaatccctgtgtagactgttgtaaagaaactgttgaaaataaagagaagcaatgtgaagca

SEQ ID NO: 367043 - DNA, 2081 bp, Homo sapiens
cacgcagcggctagggcgcttagctgagccattgtctcgttctttccttcccaacttcgcggtgtggtgaactctctgaggaaaaaccattttgattattactctcagacgtgcgtggcaacaagtgactgagacctagaaatccaagcgttggaggtcctgaggccagcctaagtcgcttcaaaatggaacgaaggcgtttgtggggttccattcagagccgatacatcagcatgagtgtgtggacaagcccacggagacttgtggagctggcagggcagagcctgctgaaggatgaggccctggccattgccgccctggagttgctgcccagggagctcttcccgccactcttcatggcagcctttgacgggagacacagccagaccctgaaggcaatggtgcaggcctggcccttcacctgcctccctctgggagtgctgatgaagggacaacatcttcacctggagaccttcaaagctgtgcttgatggacttgatgtgctccttgcccaggaggttcgccccaggaggtggaaacttcaagtgctggatttacggaagaactctcatcaggacttctggactgtatggtctggaaacagggccagtctgtactcatttccagagccagaagcagctcagcccatgacaaagaagcgaaaagtagatggtttgagcacagaggcagagcagcccttcattccagtagaggtgctcgtagacctgttcctcaaggaaggtgcctgtgatgaattgttctcctacctcattgagaaagtgaagcgaaagaaaaatgtactacgcctgtgctgtaagaagctgaagatttttgcaatgcccatgcaggatatcaagatgatcctgaaaatggtgcagctggactctattgaagatttggaagtgacttgtacctggaagctacccaccttggcgaaattttctccttacctgggccagatgattaatctgcgtagactcctcctctcccacatccatgcatcttcctacatttccccggagaaggaagagcagtatatcgcccagttcacctctcagttcctcagtctgcagtgcctgcaggctctctatgtggactctttatttttccttagaggccgcctggatcagttgctcaggcacgtgatgaaccccttggaaaccctctcaataactaactgccggctttcggaaggggatgtgatgcatctgtcccagagtcccagcgtcagtcagctaagtgtcctgagtctaagtggggtcatgctgaccgatgtaagtcccgagcccctccaagctctgctggagagagcctctgccaccctccaggacctggtctttgatgagtgtgggatcacggatgatcagctccttgccctcctgccttccctgagccactgctcccagcttacaaccttaagcttctacgggaattccatctccatatctgccttgcagagtctcctgcagcacctcatcgggctgagcaatctgacccacgtgctgtatcctgtccccctggagagttatgaggacatccatggtaccctccacctggagaggcttgcctatctgcatgccaggctcagggagttgctgtgtgagttggggcggcccagcatggtctggcttagtgccaacccctgtcctcactgtggggacagaaccttctatgacccggagcccatcctgtgcccctgtttcatgcctaactagctgggtgcacatatcaaatgcttcattctgcatacttggacactaaagccaggatgtgcatgcatcttgaagcaacaaagcagccacagtttcagacaaatgttcagtgtgagtgaggaaaacatgttcagtgaggaaaaaacattcagacaaatgttcagtgaggaaaaaaaggggaagttggggataggcagatgttgacttgaggagttaatgtgatctttggggagatacatcttatagagttagaaatagaatctgaatttctaaagggagattctggcttgggaagtacatgtaggagttaatccctgtgtagactgttgtaaagaaactgttgaaaataaagagaagcaatgtgaagca

SEQ ID NO: 367044 - DNA, 2047 bp, Homo sapiens
  misc_feature (1)..(1): n is a, c, g, or t
  misc_feature (14)..(15): n is a, c, g, or t
nataaaaatactannggctaggtacgaggctgggtggtcaacttcgcggtgtggtgaactctctgaggaaaaacacgtgcgtggcaacaagtgactgagacctagaaatccaagcgttggaggtcctgaggccagcctaagtcgcttcaaaatggaacgaaggcgtttgtggggttccattcagagccgatacatcagcatgagtgtgtggacaagcccacggagacttgtggagctggcagggcagagcctgctgaaggatgaggccctggccattgccgccctggagttgctgcccagggagctcttcccgccactcttcatggcagcctttgacgggagacacagccagaccctgaaggcaatggtgcaggcctggcccttcacctgcctccctctgggagtgctgatgaagggacaacatcttcacctggagaccttcaaagctgtgcttgatggacttgatgtgctccttgcccaggaggttcgccccaggaggtggaaacttcaagtgctggatttacggaagaactctcatcaggacttctggactgtatggtctggaaacagggccagtctgtactcatttccagagccagaagcagctcagcccatgacaaagaagcgaaaagtagatggtttgagcacagaggcagagcagcccttcattccagtagaggtgctcgtagacctgttcctcaaggaaggtgcctgtgatgaattgttctcctacctcattgagaaagtgaagcgaaagaaaaatgtactacgcctgtgctgtaagaagctgaagatttttgcaatgcccatgcaggatatcaagatgatcctgaaaatggtgcagctggactctattgaagatttggaagtgacttgtacctggaagctacccaccttggcgaaattttctccttacctgggccagatgattaatctgcgtagactcctcctctcccacatccatgcatcttcctacatttccccggagaaggaagagcagtatatcgcccagttcacctctcagttcctcagtctgcagtgcctgcaggctctctatgtggactctttatttttccttagaggccgcctggatcagttgctcaggcacgtgatgaaccccttggaaaccctctcaataactaactgccggctttcggaaggggatgtgatgcatctgtcccagagtcccagcgtcagtcagctaagtgtcctgagtctaagtggggtcatgctgaccgatgtaagtcccgagcccctccaagctctgctggagagagcctctgccaccctccaggacctggtctttgatgagtgtgggatcacggatgatcagctccttgccctcctgccttccctgagccactgctcccagcttacaaccttaagcttctacgggaattccatctccatatctgccttgcagagtctcctgcagcacctcatcgggctgagcaatctgacccacgtgctgtatcctgtccccctggagagttatgaggacatccatggtaccctccacctggagaggcttgcctatctgcatgccaggctcagggagttgctgtgtgagttggggcggcccagcatggtctggcttagtgccaacccctgtcctcactgtggggacagaaccttctatgacccggagcccatcctgtgcccctgtttcatgcctaactagctgggtgcacatatcaaatgcttcattctgcatacttggacactaaagccaggatgtgcatgcatcttgaagcaacaaagcagccacagtttcagacaaatgttcagtgtgagtgaggaaaacatgttcagtgaggaaaaaacattcagacaaatgttcagtgaggaaaaaaaggggaagttggggataggcagatgttgacttgaggagttaatgtgatctttggggagatacatcttatagagttagaaatagaatctgaatttctaaagggagattctggcttgggaagtacatgtaggagttaatccctgtgtagactgttgtaaagaaactgttgaaaataaagagaagcaatgtgaagca

SEQ ID NO: 367045 - DNA, 2841 bp, Homo sapiens
cccctagagggcctgggaggaagtgggttttgcatacagtccctgttgactctagtgccccctgctggccccagacgcgagttccggcgaggcttcagggtacagctcccccgcagccagaagccgggcctgcagcgcctcagcaccgctccgggacaccccacccgcttcccaggcgtgacctgtcaacagcaacttcgcggtgtggtgaactctctgaggaaaaacgtaagttcgagccctgattcctccgcttccccgcagggtgaccttgggcttgtgcccccggcaccacccctgtcccgggtccctgttttctctctggaaatgggttgaagaccaaagaaaataatgtgcgccacttgggtcaccccgggccgcctgccccggaaaattggccccagttgaggagttgtggctgtaaggatgccttgaaccgaggcggcggtgctcgtggttggagctctccagggtgggtgcgcatttgtaatgcggtggatgctctgggactcggcccctctgaaggtgcttgggggttggggacggcccaggcagcagtggcgtaggcgtcctaggaaggcgggagcagaggcagaaatgtcgctgcaagaccgtagtcagggtccttgaccacaggggtcacttgtgaccaagcacatggtctgttgttcctcctgccccctggttcagcccaggaaacactggtgctcaggtttggagccagagatttgcactgaaagggcgggattgagtcgccagttgtcagtttcctcagcagtattcgcggaggttttcacaggaggccgttgcttcgtaaatattatacatgtattctttctttttggagcattttgattattactctcagacgtgcgtggcaacaagtgactgagacctagaaatccaagcgttggaggtcctgaggccagcctaagtcgcttcaaaatggaacgaaggcgtttgtggggttccattcagagccgatacatcagcatgagtgtgtggacaagcccacggagacttgtggagctggcagggcagagcctgctgaaggatgaggccctggccattgccgccctggagttgctgcccagggagctcttcccgccactcttcatggcagcctttgacgggagacacagccagaccctgaaggcaatggtgcaggcctggcccttcacctgcctccctctgggagtgctgatgaagggacaacatcttcacctggagaccttcaaagctgtgcttgatggacttgatgtgctccttgcccaggaggttcgccccaggaggtggaaacttcaagtgctggatttacggaagaactctcatcaggacttctggactgtatggtctggaaacagggccagtctgtactcatttccagagccagaagcagctcagcccatgacaaagaagcgaaaagtagatggtttgagcacagaggcagagcagcccttcattccagtagaggtgctcgtagacctgttcctcaaggaaggtgcctgtgatgaattgttctcctacctcattgagaaagtgaagcgaaagaaaaatgtactacgcctgtgctgtaagaagctgaagatttttgcaatgcccatgcaggatatcaagatgatcctgaaaatggtgcagctggactctattgaagatttggaagtgacttgtacctggaagctacccaccttggcgaaattttctccttacctgggccagatgattaatctgcgtagactcctcctctcccacatccatgcatcttcctacatttccccggagaaggaagagcagtatatcgcccagttcacctctcagttcctcagtctgcagtgcctgcaggctctctatgtggactctttatttttccttagaggccgcctggatcagttgctcaggcacgtgatgaaccccttggaaaccctctcaataactaactgccggctttcggaaggggatgtgatgcatctgtcccagagtcccagcgtcagtcagctaagtgtcctgagtctaagtggggtcatgctgaccgatgtaagtcccgagcccctccaagctctgctggagagagcctctgccaccctccaggacctggtctttgatgagtgtgggatcacggatgatcagctccttgccctcctgccttccctgagccactgctcccagcttacaaccttaagcttctacgggaattccatctccatatctgccttgcagagtctcctgcagcacctcatcgggctgagcaatctgacccacgtgctgtatcctgtccccctggagagttatgaggacatccatggtaccctccacctggagaggcttgcctatctgcatgccaggctcagggagttgctgtgtgagttggggcggcccagcatggtctggcttagtgccaacccctgtcctcactgtggggacagaaccttctatgacccggagcccatcctgtgcccctgtttcatgcctaactagctgggtgcacatatcaaatgcttcattctgcatacttggacactaaagccaggatgtgcatgcatcttgaagcaacaaagcagccacagtttcagacaaatgttcagtgtgagtgaggaaaacatgttcagtgaggaaaaaacattcagacaaatgttcagtgaggaaaaaaaggggaagttggggataggcagatgttgacttgaggagttaatgtgatctttggggagatacatcttatagagttagaaatagaatctgaatttctaaagggagattctggcttgggaagtacatgtaggagttaatccctgtgtagactgttgtaaagaaactgttgaaaataaagagaagcaatgtgaagca

SEQ ID NO: 367046 - DNA, 2379 bp, Homo sapiens
cccctagagggcctgggaggaagtgggttttgcatacagtccctgttgactctagtgccccctgctggccccagacgcgagttccggcgaggcttcagggtacagctcccccgcagccagaagccgggcctgcagcgcctcagcaccgctccgggacaccccacccgcttcccaggcgtgacctgtcaacagcaacttcgcggtgtggtgaactctctgaggaaaaaccccaggaaacactggtgctcaggtttggagccagagatttgcactgaaagggcgggattgagtcgccagttgtcagtttcctcagcagtattcgcggaggttttcacaggaggccgttgcttcgtaaatattatacatgtattctttctttttggagcattttgattattactctcagacgtgcgtggcaacaagtgactgagacctagaaatccaagcgttggaggtcctgaggccagcctaagtcgcttcaaaatggaacgaaggcgtttgtggggttccattcagagccgatacatcagcatgagtgtgtggacaagcccacggagacttgtggagctggcagggcagagcctgctgaaggatgaggccctggccattgccgccctggagttgctgcccagggagctcttcccgccactcttcatggcagcctttgacgggagacacagccagaccctgaaggcaatggtgcaggcctggcccttcacctgcctccctctgggagtgctgatgaagggacaacatcttcacctggagaccttcaaagctgtgcttgatggacttgatgtgctccttgcccaggaggttcgccccaggaggtggaaacttcaagtgctggatttacggaagaactctcatcaggacttctggactgtatggtctggaaacagggccagtctgtactcatttccagagccagaagcagctcagcccatgacaaagaagcgaaaagtagatggtttgagcacagaggcagagcagcccttcattccagtagaggtgctcgtagacctgttcctcaaggaaggtgcctgtgatgaattgttctcctacctcattgagaaagtgaagcgaaagaaaaatgtactacgcctgtgctgtaagaagctgaagatttttgcaatgcccatgcaggatatcaagatgatcctgaaaatggtgcagctggactctattgaagatttggaagtgacttgtacctggaagctacccaccttggcgaaattttctccttacctgggccagatgattaatctgcgtagactcctcctctcccacatccatgcatcttcctacatttccccggagaaggaagagcagtatatcgcccagttcacctctcagttcctcagtctgcagtgcctgcaggctctctatgtggactctttatttttccttagaggccgcctggatcagttgctcaggcacgtgatgaaccccttggaaaccctctcaataactaactgccggctttcggaaggggatgtgatgcatctgtcccagagtcccagcgtcagtcagctaagtgtcctgagtctaagtggggtcatgctgaccgatgtaagtcccgagcccctccaagctctgctggagagagcctctgccaccctccaggacctggtctttgatgagtgtgggatcacggatgatcagctccttgccctcctgccttccctgagccactgctcccagcttacaaccttaagcttctacgggaattccatctccatatctgccttgcagagtctcctgcagcacctcatcgggctgagcaatctgacccacgtgctgtatcctgtccccctggagagttatgaggacatccatggtaccctccacctggagaggcttgcctatctgcatgccaggctcagggagttgctgtgtgagttggggcggcccagcatggtctggcttagtgccaacccctgtcctcactgtggggacagaaccttctatgacccggagcccatcctgtgcccctgtttcatgcctaactagctgggtgcacatatcaaatgcttcattctgcatacttggacactaaagccaggatgtgcatgcatcttgaagcaacaaagcagccacagtttcagacaaatgttcagtgtgagtgaggaaaacatgttcagtgaggaaaaaacattcagacaaatgttcagtgaggaaaaaaaggggaagttggggataggcagatgttgacttgaggagttaatgtgatctttggggagatacatcttatagagttagaaatagaatctgaatttctaaagggagattctggcttgggaagtacatgtaggagttaatccctgtgtagactgttgtaaagaaactgttgaaaataaagagaagcaatgtgaagca

SEQ ID NO: 367047 - DNA, 2713 bp, Homo sapiens
  misc_feature (11)..(11): n is a, c, g, or t
cgcgggcctcngcacgagggggaaaccgactcccgggagcagggaggaacgcgcgctccagagacaacttcgcggtgtggtgaactctctgaggaaaaacgtaagttcgagccctgattcctccgcttccccgcagggtgaccttgggcttgtgcccccggcaccacccctgtcccgggtccctgttttctctctggaaatgggttgaagaccaaagaaaataatgtgcgccacttgggtcaccccgggccgcctgccccggaaaattggccccagttgaggagttgtggctgtaaggatgccttgaaccgaggcggcggtgctcgtggttggagctctccagggtgggtgcgcatttgtaatgcggtggatgctctgggactcggcccctctgaaggtgcttgggggttggggacggcccaggcagcagtggcgtaggcgtcctaggaaggcgggagcagaggcagaaatgtcgctgcaagaccgtagtcagggtccttgaccacaggggtcacttgtgaccaagcacatggtctgttgttcctcctgccccctggttcagcccaggaaacactggtgctcaggtttggagccagagatttgcactgaaagggcgggattgagtcgccagttgtcagtttcctcagcagtattcgcggaggttttcacaggaggccgttgcttcgtaaatattatacatgtattctttctttttggagcattttgattattactctcagacgtgcgtggcaacaagtgactgagacctagaaatccaagcgttggaggtcctgaggccagcctaagtcgcttcaaaatggaacgaaggcgtttgtggggttccattcagagccgatacatcagcatgagtgtgtggacaagcccacggagacttgtggagctggcagggcagagcctgctgaaggatgaggccctggccattgccgccctggagttgctgcccagggagctcttcccgccactcttcatggcagcctttgacgggagacacagccagaccctgaaggcaatggtgcaggcctggcccttcacctgcctccctctgggagtgctgatgaagggacaacatcttcacctggagaccttcaaagctgtgcttgatggacttgatgtgctccttgcccaggaggttcgccccaggaggtggaaacttcaagtgctggatttacggaagaactctcatcaggacttctggactgtatggtctggaaacagggccagtctgtactcatttccagagccagaagcagctcagcccatgacaaagaagcgaaaagtagatggtttgagcacagaggcagagcagcccttcattccagtagaggtgctcgtagacctgttcctcaaggaaggtgcctgtgatgaattgttctcctacctcattgagaaagtgaagcgaaagaaaaatgtactacgcctgtgctgtaagaagctgaagatttttgcaatgcccatgcaggatatcaagatgatcctgaaaatggtgcagctggactctattgaagatttggaagtgacttgtacctggaagctacccaccttggcgaaattttctccttacctgggccagatgattaatctgcgtagactcctcctctcccacatccatgcatcttcctacatttccccggagaaggaagagcagtatatcgcccagttcacctctcagttcctcagtctgcagtgcctgcaggctctctatgtggactctttatttttccttagaggccgcctggatcagttgctcaggcacgtgatgaaccccttggaaaccctctcaataactaactgccggctttcggaaggggatgtgatgcatctgtcccagagtcccagcgtcagtcagctaagtgtcctgagtctaagtggggtcatgctgaccgatgtaagtcccgagcccctccaagctctgctggagagagcctctgccaccctccaggacctggtctttgatgagtgtgggatcacggatgatcagctccttgccctcctgccttccctgagccactgctcccagcttacaaccttaagcttctacgggaattccatctccatatctgccttgcagagtctcctgcagcacctcatcgggctgagcaatctgacccacgtgctgtatcctgtccccctggagagttatgaggacatccatggtaccctccacctggagaggcttgcctatctgcatgccaggctcagggagttgctgtgtgagttggggcggcccagcatggtctggcttagtgccaacccctgtcctcactgtggggacagaaccttctatgacccggagcccatcctgtgcccctgtttcatgcctaactagctgggtgcacatatcaaatgcttcattctgcatacttggacactaaagccaggatgtgcatgcatcttgaagcaacaaagcagccacagtttcagacaaatgttcagtgtgagtgaggaaaacatgttcagtgaggaaaaaacattcagacaaatgttcagtgaggaaaaaaaggggaagttggggataggcagatgttgacttgaggagttaatgtgatctttggggagatacatcttatagagttagaaatagaatctgaatttctaaagggagattctggcttgggaagtacatgtaggagttaatccctgtgtagactgttgtaaagaaactgttgaaaataaagagaagcaatgtgaagca

SEQ ID NO: 367048 - DNA, 1949 bp, Homo sapiens
  misc_feature (1)..(1): n is a, c, g, or t
  misc_feature (14)..(15): n is a, c, g, or t
nataaaaatactannggctaggtacgaggctgggtggtcaacttcgcggtgtggtgaactctctgaggaaaaacggttccattcagagccgatacatcagcatgagtgtgtggacaagcccacggagacttgtggagctggcagggcagagcctgctgaaggatgaggccctggccattgccgccctggagttgctgcccagggagctcttcccgccactcttcatggcagcctttgacgggagacacagccagaccctgaaggcaatggtgcaggcctggcccttcacctgcctccctctgggagtgctgatgaagggacaacatcttcacctggagaccttcaaagctgtgcttgatggacttgatgtgctccttgcccaggaggttcgccccaggaggtggaaacttcaagtgctggatttacggaagaactctcatcaggacttctggactgtatggtctggaaacagggccagtctgtactcatttccagagccagaagcagctcagcccatgacaaagaagcgaaaagtagatggtttgagcacagaggcagagcagcccttcattccagtagaggtgctcgtagacctgttcctcaaggaaggtgcctgtgatgaattgttctcctacctcattgagaaagtgaagcgaaagaaaaatgtactacgcctgtgctgtaagaagctgaagatttttgcaatgcccatgcaggatatcaagatgatcctgaaaatggtgcagctggactctattgaagatttggaagtgacttgtacctggaagctacccaccttggcgaaattttctccttacctgggccagatgattaatctgcgtagactcctcctctcccacatccatgcatcttcctacatttccccggagaaggaagagcagtatatcgcccagttcacctctcagttcctcagtctgcagtgcctgcaggctctctatgtggactctttatttttccttagaggccgcctggatcagttgctcaggcacgtgatgaaccccttggaaaccctctcaataactaactgccggctttcggaaggggatgtgatgcatctgtcccagagtcccagcgtcagtcagctaagtgtcctgagtctaagtggggtcatgctgaccgatgtaagtcccgagcccctccaagctctgctggagagagcctctgccaccctccaggacctggtctttgatgagtgtgggatcacggatgatcagctccttgccctcctgccttccctgagccactgctcccagcttacaaccttaagcttctacgggaattccatctccatatctgccttgcagagtctcctgcagcacctcatcgggctgagcaatctgacccacgtgctgtatcctgtccccctggagagttatgaggacatccatggtaccctccacctggagaggcttgcctatctgcatgccaggctcagggagttgctgtgtgagttggggcggcccagcatggtctggcttagtgccaacccctgtcctcactgtggggacagaaccttctatgacccggagcccatcctgtgcccctgtttcatgcctaactagctgggtgcacatatcaaatgcttcattctgcatacttggacactaaagccaggatgtgcatgcatcttgaagcaacaaagcagccacagtttcagacaaatgttcagtgtgagtgaggaaaacatgttcagtgaggaaaaaacattcagacaaatgttcagtgaggaaaaaaaggggaagttggggataggcagatgttgacttgaggagttaatgtgatctttggggagatacatcttatagagttagaaatagaatctgaatttctaaagggagattctggcttgggaagtacatgtaggagttaatccctgtgtagactgttgtaaagaaactgttgaaaataaagagaagcaatgtgaagca

SEQ ID NO: 367049 - DNA, 2050 bp, Homo sapiens
aggggggaaaacgaattacggggctagtacgaggctgggtggtacttcgcggtgtggtgaactctctgaggaaaaacacgtgcgtggcaacaagtgactgagacctagaaatccaagcgttggaggtcctgaggccagcctaagtcgcttcaaaatggaacgaaggcgtttgtggggttccattcagagccgatacatcagcatgagtgtgtggacaagcccacggagacttgtggagctggcagggcagagcctgctgaaggatgaggccctggccattgccgccctggagttgctgcccagggagctcttcccgccactcttcatggcagcctttgacgggagacacagccagaccctgaaggcaatggtgcaggcctggcccttcacctgcctccctctgggagtgctgatgaagggacaacatcttcacctggagaccttcaaagctgtgcttgatggacttgatgtgctccttgcccaggaggttcgccccaggaggtggaaacttcaagtgctggatttacggaagaactctcatcaggacttctggactgtatggtctggaaacagggccagtctgtactcatttccagagccagaagcagctcagcccatgacaaagaagcgaaaagtagatggtttgagcacagaggcagagcagcccttcattccagtagaggtgctcgtagacctgttcctcaaggaaggtgcctgtgatgaattgttctcctacctcattgagaaagtgaagcgaaagaaaaatgtactacgcctgtgctgtaagaagctgaagatttttgcaatgcccatgcaggatatcaagatgatcctgaaaatggtgcagctggactctattgaagatttggaagtgacttgtacctggaagctacccaccttggcgaaattttctccttacctgggccagatgattaatctgcgtagactcctcctctcccacatccatgcatcttcctacatttccccggagaaggaagagcagtatatcgcccagttcacctctcagttcctcagtctgcagtgcctgcaggctctctatgtggactctttatttttccttagaggccgcctggatcagttgctcaggcacgtgatgaaccccttggaaaccctctcaataactaactgccggctttcggaaggggatgtgatgcatctgtcccagagtcccagcgtcagtcagctaagtgtcctgagtctaagtggggtcatgctgaccgatgtaagtcccgagcccctccaagctctgctggagagagcctctgccaccctccaggacctggtctttgatgagtgtgggatcacggatgatcagctccttgccctcctgccttccctgagccactgctcccagcttacaaccttaagcttctacgggaattccatctccatatctgccttgcagagtctcctgcagcacctcatcgggctgagcaatctgacccacgtgctgtatcctgtccccctggagagttatgaggacatccatggtaccctccacctggagaggcttgcctatctgcatgccaggctcagggagttgctgtgtgagttggggcggcccagcatggtctggcttagtgccaacccctgtcctcactgtggggacagaaccttctatgacccggagcccatcctgtgcccctgtttcatgcctaactagctgggtgcacatatcaaatgcttcattctgcatacttggacactaaagccaggatgtgcatgcatcttgaagcaacaaagcagccacagtttcagacaaatgttcagtgtgagtgaggaaaacatgttcagtgaggaaaaaacattcagacaaatgttcagtgaggaaaaaaaggggaagttggggataggcagatgttgacttgaggagttaatgtgatctttggggagatacatcttatagagttagaaatagaatctgaatttctaaagggagattctggcttgggaagtacatgtaggagttaatccctgtgtagactgttgtaaagaaactgttgaaaataaagagaagcaatgtgaagca

SEQ ID NO: 367050 - DNA, 2247 bp, Homo sapiens
  misc_feature (2226)..(2226): n is a, c, g, or t
cccctagagggcctgggaggaagtgggttttgcatacagtccctgttgactctagtgccccctgctggccccagacgcgagttccggcgaggcttcagggtacagctcccccgcagccagaagccgggcctgcagcgcctcagcaccgctccgggacaccccacccgcttcccaggcgtgacctgtcaacagcaacttcgcggtgtggtgaactctctgaggaaaaaccattttgattattactctcagacgtgcgtggcaacaagtgactgagacctagaaatccaagcgttggaggtcctgaggccagcctaagtcgcttcaaaatggaacgaaggcgtttgtggggttccattcagagccgatacatcagcatgagtgtgtggacaagcccacggagacttgtggagctggcagggcagagcctgctgaaggatgaggccctggccattgccgccctggagttgctgcccagggagctcttcccgccactcttcatggcagcctttgacgggagacacagccagaccctgaaggcaatggtgcaggcctggcccttcacctgcctccctctgggagtgctgatgaagggacaacatcttcacctggagaccttcaaagctgtgcttgatggacttgatgtgctccttgcccaggaggttcgccccaggaggtggaaacttcaagtgctggatttacggaagaactctcatcaggacttctggactgtatggtctggaaacagggccagtctgtactcatttccagagccagaagcagctcagcccatgacaaagaagcgaaaagtagatggtttgagcacagaggcagagcagcccttcattccagtagaggtgctcgtagacctgttcctcaaggaaggtgcctgtgatgaattgttctcctacctcattgagaaagtgaagcgaaagaaaaatgtactacgcctgtgctgtaagaagctgaagatttttgcaatgcccatgcaggatatcaagatgatcctgaaaatggtgcagctggactctattgaagatttggaagtgacttgtacctggaagctacccaccttggcgaaattttctccttacctgggccagatgattaatctgcgtagactcctcctctcccacatccatgcatcttcctacatttccccggagaaggaagagcagtatatcgcccagttcacctctcagttcctcagtctgcagtgcctgcaggctctctatgtggactctttatttttccttagaggccgcctggatcagttgctcaggcacgtgatgaaccccttggaaaccctctcaataactaactgccggctttcggaaggggatgtgatgcatctgtcccagagtcccagcgtcagtcagctaagtgtcctgagtctaagtggggtcatgctgaccgatgtaagtcccgagcccctccaagctctgctggagagagcctctgccaccctccaggacctggtctttgatgagtgtgggatcacggatgatcagctccttgccctcctgccttccctgagccactgctcccagcttacaaccttaagcttctacgggaattccatctccatatctgccttgcagagtctcctgcagcacctcatcgggctgagcaatctgacccacgtgctgtatcctgtccccctggagagttatgaggacatccatggtaccctccacctggagaggcttgcctatctgcatgccaggctcagggagttgctgtgtgagttggggcggcccagcatggtctggcttagtgccaacccctgtcctcactgtggggacagaaccttctatgacccggagcccatcctgtgcccctgtttcatgcctaactagctgggtgcacatatcaaatgcttcattctgcatacttggacactaaagccaggatgtgcatgcatcttgaagcaacaaagcagccacagtttcagacaaatgttcagtgtgagtgaggaaaacatgttcagtgaggaaaaaacattcagacaaatgttcagtgaggaaaaaaaggggaagttggggataggcagatgttgacttgaggagttaatgtgatctttggggagatacatcttatagagttagaaatagaatctgaatttctaaagggagattctggcttgggaagtacatgtaggagttaatccctgtgtagactgttgtaaagaaactgttgaaaataaagagaagcaatgtgaagcaaaanaaacacaaccgcagcaagaaa

SEQ ID NO: 367051 - DNA, 2073 bp, Homo sapiens
  misc_feature (11)..(11): n is a, c, g, or t
cgcgggcctcngcacgagggggaaaccgactcccgggagcagggaggaacgcgcgctccagagacaacttcgcggtgtggtgaactctctgaggaaaaacacgtgcgtggcaacaagtgactgagacctagaaatccaagcgttggaggtcctgaggccagcctaagtcgcttcaaaatggaacgaaggcgtttgtggggttccattcagagccgatacatcagcatgagtgtgtggacaagcccacggagacttgtggagctggcagggcagagcctgctgaaggatgaggccctggccattgccgccctggagttgctgcccagggagctcttcccgccactcttcatggcagcctttgacgggagacacagccagaccctgaaggcaatggtgcaggcctggcccttcacctgcctccctctgggagtgctgatgaagggacaacatcttcacctggagaccttcaaagctgtgcttgatggacttgatgtgctccttgcccaggaggttcgccccaggaggtggaaacttcaagtgctggatttacggaagaactctcatcaggacttctggactgtatggtctggaaacagggccagtctgtactcatttccagagccagaagcagctcagcccatgacaaagaagcgaaaagtagatggtttgagcacagaggcagagcagcccttcattccagtagaggtgctcgtagacctgttcctcaaggaaggtgcctgtgatgaattgttctcctacctcattgagaaagtgaagcgaaagaaaaatgtactacgcctgtgctgtaagaagctgaagatttttgcaatgcccatgcaggatatcaagatgatcctgaaaatggtgcagctggactctattgaagatttggaagtgacttgtacctggaagctacccaccttggcgaaattttctccttacctgggccagatgattaatctgcgtagactcctcctctcccacatccatgcatcttcctacatttccccggagaaggaagagcagtatatcgcccagttcacctctcagttcctcagtctgcagtgcctgcaggctctctatgtggactctttatttttccttagaggccgcctggatcagttgctcaggcacgtgatgaaccccttggaaaccctctcaataactaactgccggctttcggaaggggatgtgatgcatctgtcccagagtcccagcgtcagtcagctaagtgtcctgagtctaagtggggtcatgctgaccgatgtaagtcccgagcccctccaagctctgctggagagagcctctgccaccctccaggacctggtctttgatgagtgtgggatcacggatgatcagctccttgccctcctgccttccctgagccactgctcccagcttacaaccttaagcttctacgggaattccatctccatatctgccttgcagagtctcctgcagcacctcatcgggctgagcaatctgacccacgtgctgtatcctgtccccctggagagttatgaggacatccatggtaccctccacctggagaggcttgcctatctgcatgccaggctcagggagttgctgtgtgagttggggcggcccagcatggtctggcttagtgccaacccctgtcctcactgtggggacagaaccttctatgacccggagcccatcctgtgcccctgtttcatgcctaactagctgggtgcacatatcaaatgcttcattctgcatacttggacactaaagccaggatgtgcatgcatcttgaagcaacaaagcagccacagtttcagacaaatgttcagtgtgagtgaggaaaacatgttcagtgaggaaaaaacattcagacaaatgttcagtgaggaaaaaaaggggaagttggggataggcagatgttgacttgaggagttaatgtgatctttggggagatacatcttatagagttagaaatagaatctgaatttctaaagggagattctggcttgggaagtacatgtaggagttaatccctgtgtagactgttgtaaagaaactgttgaaaataaagagaagcaatgtgaagca

SEQ ID NO: 367052 - DNA, 2201 bp, Homo sapiens
cccctagagggcctgggaggaagtgggttttgcatacagtccctgttgactctagtgccccctgctggccccagacgcgagttccggcgaggcttcagggtacagctcccccgcagccagaagccgggcctgcagcgcctcagcaccgctccgggacaccccacccgcttcccaggcgtgacctgtcaacagcaacttcgcggtgtggtgaactctctgaggaaaaacacgtgcgtggcaacaagtgactgagacctagaaatccaagcgttggaggtcctgaggccagcctaagtcgcttcaaaatggaacgaaggcgtttgtggggttccattcagagccgatacatcagcatgagtgtgtggacaagcccacggagacttgtggagctggcagggcagagcctgctgaaggatgaggccctggccattgccgccctggagttgctgcccagggagctcttcccgccactcttcatggcagcctttgacgggagacacagccagaccctgaaggcaatggtgcaggcctggcccttcacctgcctccctctgggagtgctgatgaagggacaacatcttcacctggagaccttcaaagctgtgcttgatggacttgatgtgctccttgcccaggaggttcgccccaggaggtggaaacttcaagtgctggatttacggaagaactctcatcaggacttctggactgtatggtctggaaacagggccagtctgtactcatttccagagccagaagcagctcagcccatgacaaagaagcgaaaagtagatggtttgagcacagaggcagagcagcccttcattccagtagaggtgctcgtagacctgttcctcaaggaaggtgcctgtgatgaattgttctcctacctcattgagaaagtgaagcgaaagaaaaatgtactacgcctgtgctgtaagaagctgaagatttttgcaatgcccatgcaggatatcaagatgatcctgaaaatggtgcagctggactctattgaagatttggaagtgacttgtacctggaagctacccaccttggcgaaattttctccttacctgggccagatgattaatctgcgtagactcctcctctcccacatccatgcatcttcctacatttccccggagaaggaagagcagtatatcgcccagttcacctctcagttcctcagtctgcagtgcctgcaggctctctatgtggactctttatttttccttagaggccgcctggatcagttgctcaggcacgtgatgaaccccttggaaaccctctcaataactaactgccggctttcggaaggggatgtgatgcatctgtcccagagtcccagcgtcagtcagctaagtgtcctgagtctaagtggggtcatgctgaccgatgtaagtcccgagcccctccaagctctgctggagagagcctctgccaccctccaggacctggtctttgatgagtgtgggatcacggatgatcagctccttgccctcctgccttccctgagccactgctcccagcttacaaccttaagcttctacgggaattccatctccatatctgccttgcagagtctcctgcagcacctcatcgggctgagcaatctgacccacgtgctgtatcctgtccccctggagagttatgaggacatccatggtaccctccacctggagaggcttgcctatctgcatgccaggctcagggagttgctgtgtgagttggggcggcccagcatggtctggcttagtgccaacccctgtcctcactgtggggacagaaccttctatgacccggagcccatcctgtgcccctgtttcatgcctaactagctgggtgcacatatcaaatgcttcattctgcatacttggacactaaagccaggatgtgcatgcatcttgaagcaacaaagcagccacagtttcagacaaatgttcagtgtgagtgaggaaaacatgttcagtgaggaaaaaacattcagacaaatgttcagtgaggaaaaaaaggggaagttggggataggcagatgttgacttgaggagttaatgtgatctttggggagatacatcttatagagttagaaatagaatctgaatttctaaagggagattctggcttgggaagtacatgtaggagttaatccctgtgtagactgttgtaaagaaactgttgaaaataaagagaagcaatgtgaagca

SEQ ID NO: 367053 - DNA, 2060 bp, Homo sapiens
cacgcagcggctagggcgcttagctgagccattgtctcgttctttccttcccaacttcgcggtgtggtgaactctctgaggaaaaacacgtgcgtggcaacaagtgactgagacctagaaatccaagcgttggaggtcctgaggccagcctaagtcgcttcaaaatggaacgaaggcgtttgtggggttccattcagagccgatacatcagcatgagtgtgtggacaagcccacggagacttgtggagctggcagggcagagcctgctgaaggatgaggccctggccattgccgccctggagttgctgcccagggagctcttcccgccactcttcatggcagcctttgacgggagacacagccagaccctgaaggcaatggtgcaggcctggcccttcacctgcctccctctgggagtgctgatgaagggacaacatcttcacctggagaccttcaaagctgtgcttgatggacttgatgtgctccttgcccaggaggttcgccccaggaggtggaaacttcaagtgctggatttacggaagaactctcatcaggacttctggactgtatggtctggaaacagggccagtctgtactcatttccagagccagaagcagctcagcccatgacaaagaagcgaaaagtagatggtttgagcacagaggcagagcagcccttcattccagtagaggtgctcgtagacctgttcctcaaggaaggtgcctgtgatgaattgttctcctacctcattgagaaagtgaagcgaaagaaaaatgtactacgcctgtgctgtaagaagctgaagatttttgcaatgcccatgcaggatatcaagatgatcctgaaaatggtgcagctggactctattgaagatttggaagtgacttgtacctggaagctacccaccttggcgaaattttctccttacctgggccagatgattaatctgcgtagactcctcctctcccacatccatgcatcttcctacatttccccggagaaggaagagcagtatatcgcccagttcacctctcagttcctcagtctgcagtgcctgcaggctctctatgtggactctttatttttccttagaggccgcctggatcagttgctcaggcacgtgatgaaccccttggaaaccctctcaataactaactgccggctttcggaaggggatgtgatgcatctgtcccagagtcccagcgtcagtcagctaagtgtcctgagtctaagtggggtcatgctgaccgatgtaagtcccgagcccctccaagctctgctggagagagcctctgccaccctccaggacctggtctttgatgagtgtgggatcacggatgatcagctccttgccctcctgccttccctgagccactgctcccagcttacaaccttaagcttctacgggaattccatctccatatctgccttgcagagtctcctgcagcacctcatcgggctgagcaatctgacccacgtgctgtatcctgtccccctggagagttatgaggacatccatggtaccctccacctggagaggcttgcctatctgcatgccaggctcagggagttgctgtgtgagttggggcggcccagcatggtctggcttagtgccaacccctgtcctcactgtggggacagaaccttctatgacccggagcccatcctgtgcccctgtttcatgcctaactagctgggtgcacatatcaaatgcttcattctgcatacttggacactaaagccaggatgtgcatgcatcttgaagcaacaaagcagccacagtttcagacaaatgttcagtgtgagtgaggaaaacatgttcagtgaggaaaaaacattcagacaaatgttcagtgaggaaaaaaaggggaagttggggataggcagatgttgacttgaggagttaatgtgatctttggggagatacatcttatagagttagaaatagaatctgaatttctaaagggagattctggcttgggaagtacatgtaggagttaatccctgtgtagactgttgtaaagaaactgttgaaaataaagagaagcaatgtgaagca

SEQ ID NO: 367054 - DNA, 2086 bp, Homo sapiens
ctactataggctaggtacgaggctgggtttgcacacgctcgggacacccacccgcttccaggcgtgactgtcaacagcaacttcgcggtgtggtgaactctctgaggaaaaacacgtgcgtggcaacaagtgactgagacctagaaatccaagcgttggaggtcctgaggccagcctaagtcgcttcaaaatggaacgaaggcgtttgtggggttccattcagagccgatacatcagcatgagtgtgtggacaagcccacggagacttgtggagctggcagggcagagcctgctgaaggatgaggccctggccattgccgccctggagttgctgcccagggagctcttcccgccactcttcatggcagcctttgacgggagacacagccagaccctgaaggcaatggtgcaggcctggcccttcacctgcctccctctgggagtgctgatgaagggacaacatcttcacctggagaccttcaaagctgtgcttgatggacttgatgtgctccttgcccaggaggttcgccccaggaggtggaaacttcaagtgctggatttacggaagaactctcatcaggacttctggactgtatggtctggaaacagggccagtctgtactcatttccagagccagaagcagctcagcccatgacaaagaagcgaaaagtagatggtttgagcacagaggcagagcagcccttcattccagtagaggtgctcgtagacctgttcctcaaggaaggtgcctgtgatgaattgttctcctacctcattgagaaagtgaagcgaaagaaaaatgtactacgcctgtgctgtaagaagctgaagatttttgcaatgcccatgcaggatatcaagatgatcctgaaaatggtgcagctggactctattgaagatttggaagtgacttgtacctggaagctacccaccttggcgaaattttctccttacctgggccagatgattaatctgcgtagactcctcctctcccacatccatgcatcttcctacatttccccggagaaggaagagcagtatatcgcccagttcacctctcagttcctcagtctgcagtgcctgcaggctctctatgtggactctttatttttccttagaggccgcctggatcagttgctcaggcacgtgatgaaccccttggaaaccctctcaataactaactgccggctttcggaaggggatgtgatgcatctgtcccagagtcccagcgtcagtcagctaagtgtcctgagtctaagtggggtcatgctgaccgatgtaagtcccgagcccctccaagctctgctggagagagcctctgccaccctccaggacctggtctttgatgagtgtgggatcacggatgatcagctccttgccctcctgccttccctgagccactgctcccagcttacaaccttaagcttctacgggaattccatctccatatctgccttgcagagtctcctgcagcacctcatcgggctgagcaatctgacccacgtgctgtatcctgtccccctggagagttatgaggacatccatggtaccctccacctggagaggcttgcctatctgcatgccaggctcagggagttgctgtgtgagttggggcggcccagcatggtctggcttagtgccaacccctgtcctcactgtggggacagaaccttctatgacccggagcccatcctgtgcccctgtttcatgcctaactagctgggtgcacatatcaaatgcttcattctgcatacttggacactaaagccaggatgtgcatgcatcttgaagcaacaaagcagccacagtttcagacaaatgttcagtgtgagtgaggaaaacatgttcagtgaggaaaaaacattcagacaaatgttcagtgaggaaaaaaaggggaagttggggataggcagatgttgacttgaggagttaatgtgatctttggggagatacatcttatagagttagaaatagaatctgaatttctaaagggagattctggcttgggaagtacatgtaggagttaatccctgtgtagactgttgtaaagaaactgttgaaaataaagagaagcaatgtgaagca

SEQ ID NO: 367055 - DNA, 2119 bp, Homo sapiens
aggggggaaaacgaattacggggctagtacgaggctgggtggtacttcgcggtgtggtgaactctctgaggaaaaacgaggccgttgcttcgtaaatattatacatgtattctttctttttggagcattttgattattactctcagacgtgcgtggcaacaagtgactgagacctagaaatccaagcgttggaggtcctgaggccagcctaagtcgcttcaaaatggaacgaaggcgtttgtggggttccattcagagccgatacatcagcatgagtgtgtggacaagcccacggagacttgtggagctggcagggcagagcctgctgaaggatgaggccctggccattgccgccctggagttgctgcccagggagctcttcccgccactcttcatggcagcctttgacgggagacacagccagaccctgaaggcaatggtgcaggcctggcccttcacctgcctccctctgggagtgctgatgaagggacaacatcttcacctggagaccttcaaagctgtgcttgatggacttgatgtgctccttgcccaggaggttcgccccaggaggtggaaacttcaagtgctggatttacggaagaactctcatcaggacttctggactgtatggtctggaaacagggccagtctgtactcatttccagagccagaagcagctcagcccatgacaaagaagcgaaaagtagatggtttgagcacagaggcagagcagcccttcattccagtagaggtgctcgtagacctgttcctcaaggaaggtgcctgtgatgaattgttctcctacctcattgagaaagtgaagcgaaagaaaaatgtactacgcctgtgctgtaagaagctgaagatttttgcaatgcccatgcaggatatcaagatgatcctgaaaatggtgcagctggactctattgaagatttggaagtgacttgtacctggaagctacccaccttggcgaaattttctccttacctgggccagatgattaatctgcgtagactcctcctctcccacatccatgcatcttcctacatttccccggagaaggaagagcagtatatcgcccagttcacctctcagttcctcagtctgcagtgcctgcaggctctctatgtggactctttatttttccttagaggccgcctggatcagttgctcaggcacgtgatgaaccccttggaaaccctctcaataactaactgccggctttcggaaggggatgtgatgcatctgtcccagagtcccagcgtcagtcagctaagtgtcctgagtctaagtggggtcatgctgaccgatgtaagtcccgagcccctccaagctctgctggagagagcctctgccaccctccaggacctggtctttgatgagtgtgggatcacggatgatcagctccttgccctcctgccttccctgagccactgctcccagcttacaaccttaagcttctacgggaattccatctccatatctgccttgcagagtctcctgcagcacctcatcgggctgagcaatctgacccacgtgctgtatcctgtccccctggagagttatgaggacatccatggtaccctccacctggagaggcttgcctatctgcatgccaggctcagggagttgctgtgtgagttggggcggcccagcatggtctggcttagtgccaacccctgtcctcactgtggggacagaaccttctatgacccggagcccatcctgtgcccctgtttcatgcctaactagctgggtgcacatatcaaatgcttcattctgcatacttggacactaaagccaggatgtgcatgcatcttgaagcaacaaagcagccacagtttcagacaaatgttcagtgtgagtgaggaaaacatgttcagtgaggaaaaaacattcagacaaatgttcagtgaggaaaaaaaggggaagttggggataggcagatgttgacttgaggagttaatgtgatctttggggagatacatcttatagagttagaaatagaatctgaatttctaaagggagattctggcttgggaagtacatgtaggagttaatccctgtgtagactgttgtaaagaaactgttgaaaataaagagaagcaatgtgaagca

SEQ ID NO: 367056 - DNA, 2179 bp, Homo sapiens
ctactataggctaggtacgaggctgggtttgcacacgctcgggacacccacccgcttccaggcgtgactgtcaacagcaacttcgcggtgtggtgaactctctgaggaaaaaccagtattcgcggaggttttcacaggaggccgttgcttcgtaaatattatacatgtattctttctttttggagcattttgattattactctcagacgtgcgtggcaacaagtgactgagacctagaaatccaagcgttggaggtcctgaggccagcctaagtcgcttcaaaatggaacgaaggcgtttgtggggttccattcagagccgatacatcagcatgagtgtgtggacaagcccacggagacttgtggagctggcagggcagagcctgctgaaggatgaggccctggccattgccgccctggagttgctgcccagggagctcttcccgccactcttcatggcagcctttgacgggagacacagccagaccctgaaggcaatggtgcaggcctggcccttcacctgcctccctctgggagtgctgatgaagggacaacatcttcacctggagaccttcaaagctgtgcttgatggacttgatgtgctccttgcccaggaggttcgccccaggaggtggaaacttcaagtgctggatttacggaagaactctcatcaggacttctggactgtatggtctggaaacagggccagtctgtactcatttccagagccagaagcagctcagcccatgacaaagaagcgaaaagtagatggtttgagcacagaggcagagcagcccttcattccagtagaggtgctcgtagacctgttcctcaaggaaggtgcctgtgatgaattgttctcctacctcattgagaaagtgaagcgaaagaaaaatgtactacgcctgtgctgtaagaagctgaagatttttgcaatgcccatgcaggatatcaagatgatcctgaaaatggtgcagctggactctattgaagatttggaagtgacttgtacctggaagctacccaccttggcgaaattttctccttacctgggccagatgattaatctgcgtagactcctcctctcccacatccatgcatcttcctacatttccccggagaaggaagagcagtatatcgcccagttcacctctcagttcctcagtctgcagtgcctgcaggctctctatgtggactctttatttttccttagaggccgcctggatcagttgctcaggcacgtgatgaaccccttggaaaccctctcaataactaactgccggctttcggaaggggatgtgatgcatctgtcccagagtcccagcgtcagtcagctaagtgtcctgagtctaagtggggtcatgctgaccgatgtaagtcccgagcccctccaagctctgctggagagagcctctgccaccctccaggacctggtctttgatgagtgtgggatcacggatgatcagctccttgccctcctgccttccctgagccactgctcccagcttacaaccttaagcttctacgggaattccatctccatatctgccttgcagagtctcctgcagcacctcatcgggctgagcaatctgacccacgtgctgtatcctgtccccctggagagttatgaggacatccatggtaccctccacctggagaggcttgcctatctgcatgccaggctcagggagttgctgtgtgagttggggcggcccagcatggtctggcttagtgccaacccctgtcctcactgtggggacagaaccttctatgacccggagcccatcctgtgcccctgtttcatgcctaactagctgggtgcacatatcaaatgcttcattctgcatacttggacactaaagccaggatgtgcatgcatcttgaagcaacaaagcagccacagtttcagacaaatgttcagtgtgagtgaggaaaacatgttcagtgaggaaaaaacattcagacaaatgttcagtgaggaaaaaaaggggaagttggggataggcagatgttgacttgaggagttaatgtgatctttggggagatacatcttatagagttagaaatagaatctgaatttctaaagggagattctggcttgggaagtacatgtaggagttaatccctgtgtagactgttgtaaagaaactgttgaaaataaagagaagcaatgtgaagca

SEQ ID NO: 367057 - DNA, 2228 bp, Homo sapiens
aaaagcaccagtgggtgatcaggcccaggataggaatcatccctaagcagatccttaaatgccaaatataacttcaattttttgtgacggaaaatgtatttgtgcactgtgcctagcatggaaatagagaaaaactgagtctaattgataggcctgattgcatctcgctgaccagaatctctgtacctgagcagcttaggggcaagaaagaacagctgttttcttgaagtgtggaaacattagtaatacttaggaaggggctggccattggagattatgtttgtggtaaaggcctgacctgctgcttgtgaacagccccagtgtggaagaggacacctaaccataaagagaagggttccattcagagccgatacatcagcatgagtgtgtggacaagcccacggagacttgtggagctggcagggcagagcctgctgaaggatgaggccctggccattgccgccctggagttgctgcccagggagctcttcccgccactcttcatggcagcctttgacgggagacacagccagaccctgaaggcaatggtgcaggcctggcccttcacctgcctccctctgggagtgctgatgaagggacaacatcttcacctggagaccttcaaagctgtgcttgatggacttgatgtgctccttgcccaggaggttcgccccaggaggtggaaacttcaagtgctggatttacggaagaactctcatcaggacttctggactgtatggtctggaaacagggccagtctgtactcatttccagagccagaagcagctcagcccatgacaaagaagcgaaaagtagatggtttgagcacagaggcagagcagcccttcattccagtagaggtgctcgtagacctgttcctcaaggaaggtgcctgtgatgaattgttctcctacctcattgagaaagtgaagcgaaagaaaaatgtactacgcctgtgctgtaagaagctgaagatttttgcaatgcccatgcaggatatcaagatgatcctgaaaatggtgcagctggactctattgaagatttggaagtgacttgtacctggaagctacccaccttggcgaaattttctccttacctgggccagatgattaatctgcgtagactcctcctctcccacatccatgcatcttcctacatttccccggagaaggaagagcagtatatcgcccagttcacctctcagttcctcagtctgcagtgcctgcaggctctctatgtggactctttatttttccttagaggccgcctggatcagttgctcaggcacgtgatgaaccccttggaaaccctctcaataactaactgccggctttcggaaggggatgtgatgcatctgtcccagagtcccagcgtcagtcagctaagtgtcctgagtctaagtggggtcatgctgaccgatgtaagtcccgagcccctccaagctctgctggagagagcctctgccaccctccaggacctggtctttgatgagtgtgggatcacggatgatcagctccttgccctcctgccttccctgagccactgctcccagcttacaaccttaagcttctacgggaattccatctccatatctgccttgcagagtctcctgcagcacctcatcgggctgagcaatctgacccacgtgctgtatcctgtccccctggagagttatgaggacatccatggtaccctccacctggagaggcttgcctatctgcatgccaggctcagggagttgctgtgtgagttggggcggcccagcatggtctggcttagtgccaacccctgtcctcactgtggggacagaaccttctatgacccggagcccatcctgtgcccctgtttcatgcctaactagctgggtgcacatatcaaatgcttcattctgcatacttggacactaaagccaggatgtgcatgcatcttgaagcaacaaagcagccacagtttcagacaaatgttcagtgtgagtgaggaaaacatgttcagtgaggaaaaaacattcagacaaatgttcagtgaggaaaaaaaggggaagttggggataggcagatgttgacttgaggagttaatgtgatctttggggagatacatcttatagagttagaaatagaatctgaatttctaaagggagattctggcttgggaagtacatgtaggagttaatccctgtgtagactgttgtaaagaaactgttgaaaataaagagaagcaatgtgaagca

SEQ ID NO: 367058 - DNA, 796 bp, Homo sapiens
cccctagagggcctgggaggaagtgggttttgcatacagtccctgttgactctagtgccccctgctggccccagacgcgagttccggcgaggcttcagggtacagctcccccgcagccagaagccgggcctgcagcgcctcagcaccgctccgggacaccccacccgcttcccaggcgtgacctgtcaacagcaacttcgcggtgtggtgaactctctgaggaaaaacacgtgcgtggcaacaagtgactgagacctagaaatccaagcgttggaggtcctgaggccagcctaagtcgcttcaaaatggaacgaaggcgtttgtggggttccattcagagccgatacatcagcatgagtgtgtggacaagcccacggagacttgtggagctggcagggcagagcctgctgaaggatgaggccctggccattgccgccctggagttgctgcccagggagctcttcccgccactcttcatggcagcctttgacgggagacacagccagaccctgaaggcaatggtgcaggcctggcccttcacctgcctccctctgggagtgctgatgaagggacaacatcttcacctggagaccttcaaagctgtgcttgatggacttgatgtgctccttgcccaggaggttcgccccaggaggtggaaacttcaagtgctggatttacggaagaactctcatcaggacttctggactgtatggtctggaaacagggccagtctgtactcatttccagagccagaagcagctcagcccatgaacaataaatggcctctcatgctaaa

SEQ ID NO: 367059 - DNA, 2045 bp, Homo sapiens
  misc_feature (520)..(520): n is a, c, g, or t
  misc_feature (574)..(574): n is a, c, g, or t
  misc_feature (600)..(600): n is a, c, g, or t
  misc_feature (1469)..(1469): n is a, c, g, or t
aagaccctgtctcaaaaaaaaaaaaaaaaagcactagccaaggctccatctcagacagccttctcttctcactctgcatgttctctaggagatttacatccctgtccatgacttcaggtaccacctatattgtatcaggcttttttggttcttagccccttcagactgctataacagaatgccatagtctgggtggcttttaaacaacagaaattcatatcccacagtcctggaggctgggaagtgcaagatcaaggtgcgggaagattcagtatctggtcaggacccaccagagaggtggttcatagacagctgtcttcttgctttcctcatatgatggaagaggcaaggcagctctcctgagtctctctcttttctttttgagatagggtttcactctgttgcccaagctggagtgcagtggtgtgatgatagctcactgtagccataaacccctgggctcaagtgatcctcccacctcagcctccctagtagcagactgcaggtgtgtgccatcacncctggctaattttttttattttttgtagggatgagattttgctatgttgcccangctggtcttgaactcctggcctcaancgatcctcctgccttggcctctcaaagcgctgggattataggcatgagtcactgcacctggccctgagtcttataagggcactaatcccattcatgagagctctgccctcatgacctgatcacctccccaaaggcccccacctccaaattccattacattgggggttaggtttcagtatatgaattcatggggaggacataaacattcagtctacagcaggtttattccaactacctcaagtgattgggagttatttcaaggatatataaggcacttggaaatctcataggaagctagaaacagccttccagctgggcctcctgttgtctcggatagggttcaggagtgagaagctcattgtgggtctgggacagttctagaactgcctcaccatcaccgtggccccgaaagtcttccatccctgccatgcttcacgtgccttcttgctgctttgtccacagccagcgcccacttcagattgccctcacagcttttatcagcctcctggcttctacgtttacttatatctttggtcttttacaaatgccttttatgtaaactttatgtaaagttgtatgcagagggtgagagccatagacgtgggcgatggccaaatcgcaatgggctttctgtgccacggaaggagtttgcacattatttagaaggcagtggggagacatgggtgagtttgaggccttacattagcatgtagtggatcactgtggctgcagaatgaaggagagggggcgaggcaggaacagaacctagttgggagttgctgcactttgggcaagagatggtaactcctgaaccagatctttggctgagacaatgagaggtgatgagagaggcgatgagccagatcttnggctaaggcgattagtcagaggcaagaagtccaggctggaagtataaggtgatgagacagactcaagaaataggattttaactcagtaagacctagggattgccttggtgcaggaatgaggtagggcactgccttccctgcagccctctctgatggagtcttttcatttgcttccacctgccatatctccattgtccctccattacatgtaaaacctcactggctctgaggctcccagcatctgctgcactacactccctgtagagtgcttaagagtgtggcttcttggccgggcacagtagctcatgcctgtaatcccagcactttgggaagctgaggcgggtggatcacctggggtcaggagttcgagaccagcctggctaacatggtgaaaccccgtctctgctaaaaatacaaaaattagccaggcgtggtggtgcatgcctgtaatcccagctactccagaggctgaagcaggagaattgcttgagcccaggagggctcaagtggagattgcagtgagccaagatagctctactgcactctagcctgggtgacagaacaagactgtgtctc

SEQ ID NO: 367060 - DNA, 1624 bp, Homo sapiens
aagaaaggtaattttaagctcctctccttcaaaaaagttcttatttgctaatagtgtgtatcagggaagggtcaaatccattaaaactctcccaagtggaacaagtgacctgaattacttgtttgcttaagtcaaacaggaaagttcttcttcctttgaactgaaataattccaggaaatgcaataaagaagctgagggagaaagaatgcatcgaggagagactgcttttccagcccaacctgtcacctacagtcttcacagctccacaagctctggcagtacctgttacgtacagtttatgtgcttgataatattcggaagaggtgttaaattcattcacgttctataccttgattgtcttctacaaactggcgttttttagttttttatgttggagagctttaacttttcaacatagcccactgaaataggagttgttttttttaagtacatgaaataacttttaagattgtacttgccatttatgatcaatccattctacattaagttcaaaatgttaagtagcaatgaatgttctatttataatttactttttcttccctttccaaatatctttccaggaaatgacccattcatggccgcctcctttgacagcaatacatacgcctagtacagctgagccatccaagtttcctttccctacaaaggtaattccttaaaagtatggcaggcattgcatccaccttagtgaaaagcgtaaggcattgctgtgaggcagattgataaagtattacttgttcaaatctttggaaatgaggttaaaattatgattaatttagcttctacagtgcttcagaatgctttcaaacatttattctgcaacttagaacatcctagattttcataaagctttataatttataaaaagcattcaggattttccaatacgttctctcatttgaggatccttactttagagatgggagaacagaggggcagggaaattgagtgtgtgatttctcgttcagaattagatatatgcacatacatcttacatatctcacactccctacattttcttgagtttaatgtgatcagttacactagtgctggtttaataacaagcaaataaactgctgacttgtgtgtttctgttacagtatttatgaacaatgcgttaaaacactgccattctccttttttttaatttatacttttggataaccttcaaaatgtagaaatagcaccttcagatctgtgttttgttcaatctgatatgcatgttcattgttttatatacataatacatatattgagagagtgagagagctattcctttccatgatactgttgtgaaaagtagttctaggccaggtatggtggctcatgcctgtattcccagtactttgggaggccgaggtgggtggatcacttgagtccaggagtttaagaccagcctgggcaatgtggcaaaactttgtctctccaaaaaaatacaaaaactagccaggtgtggtggcatgcacctgtagtcccagctacttgggaggctgaggtgggagaatcacttgagcccaggaggttgaggctgcagtgagctgtaattaagccactacactccagcctagacaacggtgagaccccgtctctctaccaccaaaa

SEQ ID NO: 367061 - DNA, 794 bp, Homo sapiens
ttggtgcacgttgcggggtgtgactcaccacggggaaatcagactgatttaaaaccttcagtgcaaacttgtaaattaaggcgaagacccagtgttccctgggacagttgcaaagtgagaagagctcagaaactgaagcacagaaacgttaggtaggagtctgagaggcgtggagaattttgcttgtgcaagattatttcagagcaaggtcgtgcggtgtgtgtagaagatgaacagactagccactttgcattgactggaaacaatggcatttacagaaagagtcaacagcagtggcaacagcctcccgagtagctgggactacaggcgcttgcctccacgcctggctaattttttgtatttttagtagagactgggtttcaccgtgttagccaggatggtctggatctcctgacctcgtgatccacccgcctcggcctcccaaggtgtcgggattacagacggagtctccttcactcagtgctcaatggtgcccaggctggagtgcagtggcgtgatctcggctcgctacaacctccacctcccagcagcctgccttggctcccaaagtgccgagattgcagcctctgcccggcgccaccccgtctgggaagtgaggagcgtctctgccaggccgcccatcgtctgggatgtgaggagcccttctgcctggctgccagtctggcaaagtgaggagcgtctctgcctggcgcattcccatcttgggaagtgaggagcgtctctgcccggcggccatccgcttgagatgtggggagcacctctgccttgccgcc

SEQ ID NO: 367062 - DNA, 765 bp, Homo sapiens
  misc_feature (712)..(712): n is a, c, g, or t
ttggtgcacgttgcggggtgtgactcaccacggggaaatcagactgatttaaaaccttcagtgcaaacttgtaaattaaggcgaagacccagtgttccctgggacagttgcaaagtgagaagagctcagaaactgaagcacagaaacgttaggtaggagtctgagaggcgtggagaattttgcttgtgcaagattatttcagagcaaggtcgtgcggtgtgtgtagaagatgaacagactagccactttgcattgactggaaacaatggcatttacagaaagagtcaacagcagtggcaacagtcattgagaacgggccatgatgacaatggcggttttgtggaatagaaaggggggaaaggtggggaaaagattgagaaatcggatggttgctgtgtctgtgtagaaagaggtagacatgggagacttttcattttgttctgtactaagaaaaattcttctgccttgggatcctgttgatctgtgaccttacccccaaccctgtgctctctgaaacatgtgctgtatccactcagggttgaatggattaagggcggtgcaagatgtgcttgttaaacagatgcttgaaggcagcatgctcgttaagagtcatcaccactccctaatctcaagtacccaggacacaaacactgcggaaggcgcagggtcctctgctaggaaaaccagagacctttgttcacttgtttatctngtgacttccctccactattgtcctgtgacctgcaaatccccctctgtgagaac

SEQ ID NO: 367063 - DNA, 564 bp, Homo sapiens
agccagctagcgagcgacgggcgcgcgcggcccctgcgcactcggccgccgcctgcgcgcgttgcggccgcagctgcacctttgcctccgcggttccgcagccgagccccgggaggaggcgctcccctgcgtcgtccgcacttgcgccctttcccaccgcaacaggtcaggggagggcggaggtgacgagggcgcccgacccgggactagaggacggaagggtctggaaggtgagcgcagccctgcgccacccagggctgggggtcgatccgcccggcccccgacgccgccgccgcggacttctcggaagccgaggctctccccgcctctctgccggcttcccagcacgctgactcaagtcgctggcgttcccacttttccggtgggagccctcggggagaacgggctagggctcagagctctcaccgccctacttgcgatcccgcggcaggtagcgcgtagaaaaacaggggacggggacatgggaagagacccatgctcctccctcacgcgcagcccccaagtcagacgtttgcctgtgcaccccgcgttttgcggagagct

SEQ ID NO: 367064 - DNA, 798 bp, Homo sapiens
aagaaaggtaattttaagctcctctccttcaaaaaagttcttatttgctaatagtgtgtatcagggaagggtcaaatccattaaaactctcccaagtggaacaagtgacctgaattacttgtttgcttaagtcaaacaggaaagttcttcttcctttgaactgaaataattccaggaaatgcaataaagaagctgagggagaaagaatgcatcgaggagagactgcttttccagcccaacctgtcacctacagtcttcacagctccacaagctctggcagtacctgttacgtacagtttatgtgcttgataatattcggaagaggtgttaaattcattcacgttctataccttgattgtcttctacaaactggcgttttttagttttttatgttggagagctttaacttttcaacatagcccactgaaataggagttgttttttttaagtacatgaaataacttttaagattgtacttgccatttatgatcaatccattctacattaagttcaaaatgttaagtagcaatgaatgttctatttataatttactttttcttccctttccaaatatctttccaggaaatgacccattcatggccgcctcctttgacagcaatacatacgcctagtacagctgagccatccaagtttcctttccctacaaagcagaactactccaatgaagtccattgtgttgaagagattcctgaaaggtgaagttccctggttaatctttctcatttgaagaaatatttaagtaggaagggcgtacatccatttactttcagtttaaag

SEQ ID NO: 367065 - DNA, 476 bp, Homo sapiens
agccagctagcgagcgacgggcgcgcgcggcccctgcgcactcggccgccgcctgcgcgcgttgcggccgcagctgcacctttgcctccgcggttccgcagccgagccccgggaggaggcgctcccctgcgtcgtccgcacttgcgccctttcccaccgcaacaggtcaggggagggcggaggtgacgagggcgcccgacccgggactagaggacggaagggtctggaagatgaacagactagccactttgcattgactggaaacaatggcatttacagaaagagtcaacagcagtggcaacagaccttcttaagactgtgaactgtacctaggaatccaacttacaagggatgtgaaggacctcttcaaggagaattaaaaaccactgctcaaggaaataagagaggacacaaacaaatggaaaaacattccgtgctcatggataggaagaatcagtatcgtgaaaatggccata

SEQ ID NO: 367066 - DNA, 1486 bp, Homo sapiens
agccagctagcgagcgacgggcgcgcgcggcccctgcgcactcggccgccgcctgcgcgcgttgcggccgcagctgcacctttgcctccgcggttccgcagccgagccccgggaggaggcgctcccctgcgtcgtccgcacttgcgccctttcccaccgcaacaggtcaggggagggcggaggtgacgagggcgcccgacccgggactagaggacggaagggtctggaagatgaacagactagccactttgcattgactggaaacaatggcatttacagaaagagtcaacagcagtggcaacagtttgtacaatgacgacagaaacctgcttcgaattagagagaaggaaagacgcaaccaggaagcccaccaagagaaagaggcatttcctgaaaagattcccctttttggagagccctacaagacagcaaaaggtgatgagctgtctagtcgaatacagaacatgttgggaaactacgaagaagtgaaggagttccttagtactaagtctcacactcatcgcctggatgcttctgaaaataggttgggaaagccgaaatatcctttaattcctgacaaagggagcagcattccatccagctccttccacactagtgtccaccaccagtccattcacactcctgcgtctggaccactttctgttggcaacattagccacaatccaaagatggcgcagccaagaactgaaccaatgccaagtctccatgccaaaagctgcggcccaccggacagccagcacctgacccaggatcgccttggtcaggaggggttcggctctagtcatcacaagaaaggtgaccgaagagctgacggagaccactgtgcttcggtgacagattcggctccagagagggagctttctcccttaatctctttgccttccccagttccccctttgtcacctatacattccaaccagcaaactcttccccggacgcaaggaagcagcaaggttcatggcagcagcaataacagtaaaggctattgcccagccaaatctcccaaggacctagcagtgaaagtccatgataaagagacccctcaagacagtttggtggcccctgcccagccgccttctcagacatttccacctccctccctcccctcaaaaagtgttgcaatgcagcagaagcccacggcttatgtccggcccatggatggtcaagatcaggcccctagtgaatcccctgaactgaaaccactgccggaggactatcgacagcagacctttgaaaaaacagacttgaaagtgcctgccaaagccaagctcaccaaactgaagatgccttctcagtcagttgagcagacctactccaatgaagtccattgtgttgaagagattctgaaggaaaaaccacctccggtcaataagcaggagaatgcaggcactttgaacatcctcagcactctctccaatggcaatagttctaagcaaaaaattccagcagatggagtccacaggat

SEQ ID NO: 367067 - DNA, 1248 bp, Homo sapiens
cctgcagcagacaacagcacagagctagatatgacggactttgttttccaagctgcagtaccaaagacattccagctgcagctcatgtctcctagcagcagcattgtcccagcatttttacacgggggaccatcacacaagtcattaaagttctgaaccctcagaagcaacagcttgcgaatgcggatcaagcttacatataatcacaaggggctcagcaatgcaagatctagcagaggtgtacaactttcccctcagtcctggcaatgagggtttggcaccattctcattccgtacttccccaccggtggggagtacgaaatatcctttaattcctgacaaagggagcagcattccatccagctccttccacactagtgtccaccaccagtccattcacactcctgcgtctggaccactttctgttggcaacattagccacaatccaaagatggcgcagccaagaactgaaccaatgccaagtctccatgccaaaagctgcggcccaccggacagccagcacctgacccaggatcgccttggtcaggaggggttcggctctagtcatcacaagaaaggtgaccgaagagctgacggagaccactgtgcttcggtgacagattcggctccagagagggagctttctcccttaatctctttgccttccccagttccccctttgtcacctatacattccaaccagcaaactcttccccggacgcaaggaagcagcaaggttcatggcagcagcaataacagtaaaggctattgcccagccaaatctcccaaggacctagcagtgaaagtccatgataaagagacccctcaagacagtttggtggcccctgcccagccgccttctcagacatttccacctccctccctcccctcaaaaagtgttgcaatgcagcagaagcccacggcttatgtccggcccatggatggtcaagatcaggcccctagtgaatcccctgaactgaaaccactgccggaggactatcgacagcagacctttgaaaaaacagacttgaaagtgcctgccaaagccaagctcaccaaactgaagatgccttctcagtcagttgagcagacctactccaatgaagtccattgtgttgaagagattctgaaggaaaaaccacctccggtcaataagcaggagaatgcaggcactttgaacatcctcagcactctctccaatggcaatagttctaagcaaaaaattccagcagatggagtccacaggat

SEQ ID NO: 367068 - DNA, 1485 bp, Homo sapiens
ttggtgcacgttgcggggtgtgactcaccacggggaaatcagactgatttaaaaccttcagtgcaaacttgtaaattaaggcgaagacccagtgttccctgggacagttgcaaagtgagaagagctcagaaactgaagcacagaaacgttaggtaggagtctgagaggcgtggagaattttgcttgtgcaagattatttcagagcaaggtcgtgcggtgtgtgtagaagatgaacagactagccactttgcattgactggaaacaatggcatttacagaaagagtcaacagcagtggcaacagtttgtacaatgacgacagaaacctgcttcgaattagagagaaggaaagacgcaaccaggaagcccaccaagagaaagaggcatttcctgaaaagattcccctttttggagagccctacaagacagcaaaaggtgatgagctgtctagtcgaatacagaacatgttgggaaactacgaagaagtgaaggagttccttagtactaagtctcacactcatcgcctggatgcttctgaaaataggttgggaaagccgaaatatcctttaattcctgacaaagggagcagcattccatccagctccttccacactagtgtccaccaccagtccattcacactcctgcgtctggaccactttctgttggcaacattagccacaatccaaagatggcgcagccaagaactgaaccaatgccaagtctccatgccaaaagctgcggcccaccggacagccagcacctgacccaggatcgccttggtcaggaggggttcggctctagtcatcacaagaaaggtgaccgaagagctgacggagaccactgtgcttcggtgacagattcggctccagagagggagctttctcccttaatctctttgccttccccagttccccctttgtcacctatacattccaaccagcaaactcttccccggacgcaaggaagcagcaaggttcatggcagcagcaataacagtaaaggctattgcccagccaaatctcccaaggacctagcagtgaaagtccatgataaagagacccctcaagacagtttggtggcccctgcccagccgccttctcagacatttccacctccctccctcccctcaaaaagtgttgcaatgcagcagaagcccacggcttatgtccggcccatggatggtcaagatcaggcccctagtgaatcccctgaactgaaaccactgccggaggactatcgacagcagacctttgaaaaaacagacttgaaagtgcctgccaaagccaagctcaccaaactgaagatgccttctcagtcagttgagcagacctactccaatgaagtccattgtgttgaagagattctgaaggaaaaaccacctccggtcaataagcaggagaatgcaggcactttgaacatcctcagcactctctccaatggcaatagttctaagcaaaaaattccagcagatggagtccacaggat

SEQ ID NO: 367069 - DNA, 2412 bp, Homo sapiens
agccagctagcgagcgacgggcgcgcgcggcccctgcgcactcggccgccgcctgcgcgcgttgcggccgcagctgcacctttgcctccgcggttccgcagccgagccccgggaggaggcgctcccctgcgtcgtccgcacttgcgccctttcccaccgcaacaggtcaggggagggcggaggtgacgagggcgcccgacccgggactagaggacggaagggtctggaagatgaacagactagccactttgcattgactggaaacaatggcatttacagaaagagtcaacagcagtggcaacagtttgtacaatgacgacagaaacctgcttcgaattagagagaaggaaagacgcaaccaggaagcccaccaagagaaagaggcatttcctgaaaagattcccctttttggagagccctacaagacagcaaaaggtgatgagctgtctagtcgaatacagaacatgttgggaaactacgaagaagtgaaggagttccttagtactaagtctcacactcatcgcctggatgcttctgaaaataggttgggaaagccgaaatatcctttaattcctgacaaagggagcagcattccatccagctccttccacactagtgtccaccaccagtccattcacactcctgcgtctggaccactttctgttggcaacattagccacaatccaaagatggcgcagccaagaactgaaccaatgccaagtctccatgccaaaagctgcggcccaccggacagccagcacctgacccaggatcgccttggtcaggaggggttcggctctagtcatcacaagaaaggtgaccgaagagctgacggagaccactgtgcttcggtgacagattcggctccagagagggagctttctcccttaatctctttgccttccccagttccccctttgtcacctatacattccaaccagcaaactcttccccggacgcaaggaagcagcaaggttcatggcagcagcaataacagtaaaggctattgcccagccaaatctcccaaggacctagcagtgaaagtccatgataaagagacccctcaagacagtttggtggcccctgcccagccgccttctcagacatttccacctccctccctcccctcaaaaagtgttgcaatgcagcagaagcccacggcttatgtccggcccatggatggtcaagatcaggcccctagtgaatcccctgaactgaaaccactgccggaggactatcgacagcagacctttgaaaaaacagacttgaaagtgcctgccaaagccaagctcaccaaactgaagatgccttctcagtcagttgagcagacctactccaatgaagtccattgtgttgaagagattctgaaggaaatgacccattcatggccgcctcctttgacagcaatacatacgcctagtacagctgagccatccaagtttcctttccctacaaaggtaattccttaaaagtatggcaggcattgcatccaccttagtgaaaagcgtaaggcattgctgtgaggcagattgataaagtattacttgttcaaatctttggaaatgaggttaaaattatgattaatttagcttctacagtgcttcagaatgctttcaaacatttattctgcaacttagaacatcctagattttcataaagctttataatttataaaaagcattcaggattttccaatacgttctctcatttgaggatccttactttagagatgggagaacagaggggcagggaaattgagtgtgtgatttctcgttcagaattagatatatgcacatacatcttacatatctcacactccctacattttcttgagtttaatgtgatcagttacactagtgctggtttaataacaagcaaataaactgctgacttgtgtgtttctgttacagtatttatgaacaatgcgttaaaacactgccattctccttttttttaatttatacttttggataaccttcaaaatgtagaaatagcaccttcagatctgtgttttgttcaatctgatatgcatgttcattgttttatatacataatacatatattgagagagtgagagagctattcctttccatgatactgttgtgaaaagtagttctaggccaggtatggtggctcatgcctgtattcccagtactttgggaggccgaggtgggtggatcacttgagtccaggagtttaagaccagcctgggcaatgtggcaaaactttgtctctccaaaaaaatacaaaaactagccaggtgtggtggcatgcacctgtagtcccagctacttgggaggctgaggtgggagaatcacttgagcccaggaggttgaggctgcagtgagctgtaattaagccactacactccagcctagacaacggtgagaccccgtctctctaccaccaaaa

SEQ ID NO: 367070 - DNA, 449 bp, Homo sapiens
gaaacgttaggtaggagtctgagaggcgtggagaattttgcttgtgcaagattatttcagagcaaggtcgtgcggtgtgtgtagaaggtaggtggccgtgggttacctctctcagacctgcgtggtgttggcctctgggtggggataaaagtcacgaaaaagacctttggacccagagtctagttttttttctttggggccgaagaatacctaggcatggccctgtttcagtgtttacttcctctgtctaatgtatttccttagctcgcctttcatctttagtgggaaggattacttgagtggatattccggaagtagattcacaggagaatggaaaattctggatggtttgcttgctttaatttcaaggtgttgtctcttgtggatgttgggaagtattgtacttgaatatttgaagataaatatggagaaaagcagtggtgagaact

SEQ ID NO: 367071 - DNA, 737 bp, Homo sapiens
ggagaccactgtgcttcggtgacagattcggctccagagagggagctttctcccttaatctctttgccttccccagttccccctttgtcacctatacattccaaccagcaaactcttccccggacgcaaggaagcagcaaggttcatggcagcagcaataacagtaaaggctattgcccagccaaatctcccaaggacctagcagtgaaagtccatgataaagagacccctcaagacagtttggtggcccctgcccagccgccttctcagacatttccacctccctccctcccctcaaaaagtgttgcaatgcagcagaagcccacggcttatgtccggcccatggatggtcaagatcaggcccctagtgaatcccctgaactgaaaccactgccggaggactatcgacagcagacctttgaaaaaacagacttgaaagtgcctgccaaagccaagctcaccaaactgaagatgccttctcagtcagttgaggtgtgtggaatttcttatcttggggaattccaattcgaagacggatttgagatgaaaatgtccggaggatgtggggcaaggtggggaggttagtccatggcttttgggtagggggaattctttttggctttaggatcttgttaataacccgcgaaaaactcagatctgagatggacgactgattatagatattgaaatgcagtttgcagaaaggtttagagaacctttttatggagccaaaattt

SEQ ID NO: 367072 - DNA, 719 bp, Homo sapiens
agccagctagcgagcgacgggcgcgcgcggcccctgcgcactcggccgccgcctgcgcgcgttgcggccgcagctgcacctttgcctccgcggttccgcagccgagccccgggaggaggcgctcccctgcgtcgtccgcacttgcgccctttcccaccgcaacaggtcaggggagggcggaggtgacgagggcgcccgacccgggactagaggacggaagggtctggaagatgaacagactagccactttgcattgactggaaacaatggcatttacagaaagagtcaacagcagtggcaacagatacttattgaagatctgctgtcagatgatgccttaaaatctgatagatcaaagatgacctatgggagagaatacgagaatagaaaaatgggagtccctgttctgtttaacctggcagataagcacacagccagattgtgaaacaatgtgataaacgctctagcagaagagcaaataaagtgttaaaggatcatagaaaacagcaaagtgtcacggatgaaatctttctaatgagaaccgtggaccttcttaagactgtgaactgtacctaggaatccaacttacaagggatgtgaaggacctcttcaaggagaattaaaaaccactgctcaaggaaataagagaggacacaaacaaatggaaaaacattccgtgctcatggataggaagaatcagtatcgtgaaaatggccata

SEQ ID NO: 367073 - DNA, 1324 bp, Homo sapiens
tcggggcgccgcgccgggacgcgtccccgcccggctccgccaaatggtgagcgcggcgctggcagcagggcccgcggggtgaaggcgctcatggacggaagacccctggctctataagctgaattatggcagcccagtcaagtttgtacaatgacgacagaaacctgcttcgaattagagagaaggaaagacgcaaccaggaagcccaccaagagaaagaggcatttcctgaaaagattcccctttttggagagccctacaagacagcaaaaggtgatgagctgtctagtcgaatacagaacatgttgggaaactacgaagaagtgaaggagttccttagtactaagtctcacactcatcgcctggatgcttctgaaaataggttgggaaagccgaaatatcctttaattcctgacaaagggagcagcattccatccagctccttccacactagtgtccaccaccagtccattcacactcctgcgtctggaccactttctgttggcaacattagccacaatccaaagatggcgcagccaagaactgaaccaatgccaagtctccatgccaaaagctgcggcccaccggacagccagcacctgacccaggatcgccttggtcaggaggggttcggctctagtcatcacaagaaaggtgaccgaagagctgacggagaccactgtgcttcggtgacagattcggctccagagagggagctttctcccttaatctctttgccttccccagttccccctttgtcacctatacattccaaccagcaaactcttccccggacgcaaggaagcagcaaggttcatggcagcagcaataacagtaaaggctattgcccagccaaatctcccaaggacctagcagtgaaagtccatgataaagagacccctcaagacagtttggtggcccctgcccagccgccttctcagacatttccacctccctccctcccctcaaaaagtgttgcaatgcagcagaagcccacggcttatgtccggcccatggatggtcaagatcaggcccctagtgaatcccctgaactgaaaccactgccggaggactatcgacagcagacctttgaaaaaacagacttgaaagtgcctgccaaagccaagctcaccaaactgaagatgccttctcagtcagttgagcagacctactccaatgaagtccattgtgttgaagagattctgaaggaaaaaccacctccggtcaataagcaggagaatgcaggcactttgaacatcctcagcactctctccaatggcaatagttctaagcaaaaaattccagcagatggagtccacaggat

SEQ ID NO: 367074 - DNA, 1481 bp, Homo sapiens
ctccggagtagctgggaatacaggcatgctccaccaagcccggctaattttgtatttttagtagagatggggtttctccatgttggtcaggatggtctcgaactccagacctcaggtgatcctcccgcctcggcctcccaaagtgctgggattacaggcgtgagccaccctgtccggctgaactgctatcaagttcttaaggctattgctgggagcagtaatttggtgacagatttaatatattaagagaaaatcccaggggtaaacatcttatctaaaggaactcaagcagacaaaggtttgtacaatgacgacagaaacctgcttcgaattagagagaaggaaagacgcaaccaggaagcccaccaagagaaagaggcatttcctgaaaagattcccctttttggagagccctacaagacagcaaaaggtgatgagctgtctagtcgaatacagaacatgttgggaaactacgaagaagtgaaggagttccttagtactaagtctcacactcatcgcctggatgcttctgaaaataggttgggaaagccgaaatatcctttaattcctgacaaagggagcagcattccatccagctccttccacactagtgtccaccaccagtccattcacactcctgcgtctggaccactttctgttggcaacattagccacaatccaaagatggcgcagccaagaactgaaccaatgccaagtctccatgccaaaagctgcggcccaccggacagccagcacctgacccaggatcgccttggtcaggaggggttcggctctagtcatcacaagaaaggtgaccgaagagctgacggagaccactgtgcttcggtgacagattcggctccagagagggagctttctcccttaatctctttgccttccccagttccccctttgtcacctatacattccaaccagcaaactcttccccggacgcaaggaagcagcaaggttcatggcagcagcaataacagtaaaggctattgcccagccaaatctcccaaggacctagcagtgaaagtccatgataaagagacccctcaagacagtttggtggcccctgcccagccgccttctcagacatttccacctccctccctcccctcaaaaagtgttgcaatgcagcagaagcccacggcttatgtccggcccatggatggtcaagatcaggcccctagtgaatcccctgaactgaaaccactgccggaggactatcgacagcagacctttgaaaaaacagacttgaaagtgcctgccaaagccaagctcaccaaactgaagatgccttctcagtcagttgagcagacctactccaatgaagtccattgtgttgaagagattctgaaggaaaaaccacctccggtcaataagcaggagaatgcaggcactttgaacatcctcagcactctctccaatggcaatagttctaagcaaaaaattccagcagatggagtccacaggat

SEQ ID NO: 367075 - DNA, 1628 bp, Homo sapiens
  misc_feature (1616)..(1616): n is a, c, g, or t
agccagctagcgagcgacgggcgcgcgcggcccctgcgcactcggccgccgcctgcgcgcgttgcggccgcagctgcacctttgcctccgcggttccgcagccgagccccgggaggaggcgctcccctgcgtcgtccgcacttgcgccctttcccaccgcaacaggtcaggggagggcggaggtgacgagggcgcccgacccgggactagaggacggaagggtctggaagatgaacagactagccactttgcattgactggaaacaatggcatttacagaaagagtcaacagcagtggcaacagtttgtacaatgacgacagaaacctgcttcgaattagagagaaggaaagacgcaaccaggaagcccaccaagagaaagaggcatttcctgaaaagattcccctttttggagagccctacaagacagcaaaaggtgatgagctgtctagtcgaatacagaacatgttgggaaactacgaagaagtgaaggagttccttagtactaagtctcacactcatcgcctggatgcttctgaaaataggttgggaaagccgaaatatcctttaattcctgacaaagggagcagcattccatccagctccttccacactagtgtccaccaccagtccattcacactcctgcgtctggaccactttctgttggcaacattagccacaatccaaagatggcgcagccaagaactgaaccaatgccaagtctccatgccaaaagctgcggcccaccggacagccagcacctgacccaggatcgccttggtcaggaggggttcggctctagtcatcacaagaaaggtgaccgaagagctgacggagaccactgtgcttcggtgacagattcggctccagagagggagctttctcccttaatctctttgccttccccagttccccctttgtcacctatacattccaaccagcaaactcttccccggacgcaaggaagcagcaaggttcatggcagcagcaataacagtaaaggctattgcccagccaaatctcccaaggacctagcagtgaaagtccatgataaagagacccctcaagacagtttggtggcccctgcccagccgccttctcagacatttccacctccctccctcccctcaaaaagtgttgcaatgcagcagaagcccacggcttatgtccggcccatggatggtcaagatcaggcccctagtgaatcccctgaactgaaaccactgccggaggactatcgacagcagacctttgaaaaaacagacttgaaagtgcctgccaaagccaagctcaccaaactgaagatgccttctcagtcagttgagcagacctactccaatgaagtccattgtgttgaagagattctgaaggaaatgacccattcatggccgcctcctttgacagcaatacatacgcctagtacagctgagccatccaagtttcctttccctacaaaggactctcagcatgtcagttctgtaacccaaaaccaaaaacaatatgatacatcttcaaaaactcactcaaattctcagcaaggaacgtcatccatgctcgaagacgaccttcagctcagtgacagtgaggacagtgacagtgaacaaaccccagagaancctctaaatcac

SEQ ID NO: 367076 - DNA, 1460 bp, Homo sapiens
taagttcacagtcgagtggatcatagctggcgggtaaggctgaaggtgagatcaggatgagggtttggaagcccttgcctagaaggaggcagttttttgagacagcataggagagcgcaaacctccagggtcacagggctgcagtcttctcctttcggagaccccattgcagagaagagcgaaagcaggggcggggtgggggtgggagtggtctcttccggttcttgaagatagcgtcccttaggcaggaggggtgggtcactcagtctccaggctcgggaggcccccagcaaatcggacgctgtgggctaggccgccaccgcgagcccactcgcccgatacgcgccttggggtccgggtcggctttccccgggacccctggccggaaactgagccgttcacttccgccaccagccggaagttttctgtcactggacgccaaggagttttcggtggctcagctgggtaaccggggatcaccatggcggcctcattggtggggaagaagatcgtgtttgtaacggggaacgccaagaagctggaggaggtcgttcagattctaggagataagtttccatgcactttggtggcacagaaaattgacctgccggagtaccagggggagccggatgagatttccatacagaaatgtcaggaggcagttcgccaggtacaggggcccgtgctggttgaggacacttgtctgtgcttcaatgcccttggagggctccccggcccctacataaagtggtttctggagaagttaaagcctgaaggtctccaccagctcctggccgggttcgaggacaagtcagcctatgcgctctgcacgtttgcactcagcaccggggacccaagccagcccgtgcgcctgttcaggggccggacctcgggccggatcgtggcacccagaggctgccaggactttggctgggacccctgctttcagcctgatggatatgagcagacgtacgcagagatgcctaaggcggagaagaacgctgtctcccatcgcttccgggccctgctggagctgcaggagtactttggcagtttggcagcttgacttctgcagctggaggaggcccctcaggccggggatctggggagggctagcccaaaacctcccgcatcgggcaggcaccccctgaagtacttccttcagggtttcccctttgtgagggtgtcgagtagcctcaccggcctgtctggaggagcagctggctctgctctgagaaactctggcaagtggacgccattctcttgcccttaggattcactgctctctcctacagccgccaggcctggggtcctgaaaggaccttgggtggtaaagctgtacttggtgggagtgagggcgtggggaggaaccatgcaaatcgccttccatggtttttaaatgcagtaaataacatttctggatgagacttgtttccaaaataaaccagctatatctgttt

SEQ ID NO: 367077 - DNA, 1481 bp, Homo sapiens
taagttcacagtcgagtggatcatagctggcgggtaaggctgaaggtgagatcaggatgagggtttggaagcccttgcctagaaggaggcagttttttgagacagcataggagagcgcaaacctccagggtcacagggctgcagtcttctcctttcggagaccccattgcagagaagagcgaaagcaggggcggggtgggggtgggagtggtctcttccggttcttgaagatagcgtcccttaggcaggaggggtgggtcactcagtctccaggctcgggaggcccccagcaaatcggacgctgtgggctaggccgccaccgcgagcccactcgcccgatacgcgccttggggtccgggtcggctttccccgggacccctggccggaaactgagccgttcacttccgccaccagccggaagttttctgtcactggacgccaaggagttttcggtggctcagctgggtaaccggggatcaccatggcggcctcattggtggggaagaagatcgtgtttgtaacggggaacgccaagaagctggaggaggtcgttcagattctaggagataagtttccatgcactttggtggcacagaaaattgacctgccggagtaccagggggagccggatgagatttccatacagaaatgtcaggaggcagttcgccaggtacaggggcccgtgctggttgaggacacttgtctgtgcttcaatgcccttggagggctccccggcccctacataaagtggtttctggagaagttaaagcctgaaggtctccaccagctcctggccgggttcgaggacaagtcagcctatgcgctctgcacgtttgcactcagcaccggggacccaagccagcccgtgcgcctgttcaggggccggacctcgggccggatcgtggcacccagaggctgccaggactttggctgggacccctgctttcagcctgatggatatgagcagacgtacgcagagatgcctaaggcggagaagaacgctgtctcccatcgcttccgggccctgctggagctgcaggagtactttggcagtttggcagcttgacttctgcagctggaggaggcccctcaggccggggatctggggagggctagcccaaaacctcccgcatcgggcaggcaccccctgaagtacttccttcagggtttcccctttgtgagggtgtcgagtagcctcaccggcctgtctggaggagcagctggctctgctctgagaaactctggcaagtggacgccattctcttgcccttaggattcactgctctctcctacagccgccaggcctggggtcctgaaaggaccttgggtggtaaagctgtacttggtgggagtgagggcgtggggaggaaccatgcaaatcgccttccatggtttttaaatgcagtaaataacatttctggatgagacttgtttccaaaataaaccagctatatctgtttgaaaaaaaaaacacaaaggcg

SEQ ID NO: 367078 - DNA, 1533 bp, Homo sapiens
taagttcacagtcgagtggatcatagctggcgggtaaggctgaaggtgagatcaggatgagggtttggaagcccttgcctagaaggaggcagttttttgagacagcataggagagcgcaaacctccagggtcacagggctgcagtcttctcctttcggagaccccattgcagagaagagcgaaagcaggggcggggtgggggtgggagtggtctcttccggttcttgaagatagcgtcccttaggcaggaggggtgggtcactcagtctccaggctcgggaggcccccagcaaatcggacgctgtgggctaggccgccaccgcgagcccactcgcccgatacgcgccttggggtccgggtcggctttccccgggacccctggccggaaactgagccgttcacttccgccaccagccggaagttttctgtcactggacgccaaggagttttcggtggctcagctgggtaaccggggatcaccatggcggcctcattggtggggaagaagatcgtgtttgtaacggggaacgccaagaagctggaggaggtcgttcagattctaggagataagtttccatgcactttggtggcacagaaaattgacctgccggagtaccagggggagccggatgagatttccatacagaaatgtcaggaggcagttcgccaggtacaggggcccgtgctggttgaggacacttgtctgtgcttcaatgcccttggagggctccccggcccctacataaagtggtttctggagaagttaaagcctgaaggtctccaccagctcctggccgggttcgaggacaagtcagcctatgcgctctgcacgtttgcactcagcaccggggacccaagccagcccgtgcgcctgttcaggggccggacctcgggccggatcgtggcacccagaggctgccaggactttggctgggacccctgctttcagcctgatggatatgagcagacgtacgcagagatgcctaaggcggagaagaacgctgtctcccatcgcttccgggccctgctggagctgcaggagtactttggcagtttggcagcttgacttctgcagctggaggaggcccctcaggccggggatctggggagggctagcccaaaacctcccgcatcgggcaggcaccccctgaagtacttccttcagggtttcccctttgtgagggtgtcgagtagcctcaccggcctgtctggaggagcagctggctctgctctgagaaactctggcaagtggacgccattctcttgcccttaggattcactgctctctcctacagccgccaggcctggggtcctgaaaggaccttgggtggtaaagctgtacttggtgggagtgagggcgtggggaggaaccatgcaaatcgccttccatggtttttaaatgcagtaaataacatttctggatgagacttgtttccaaaataaaccagctatatctgtttaaaaaataaataaaaacttgcggcacgaaggggggcccggtaccaatttgcccttaatggagcggtttacaaa

SEQ ID NO: 367079 - DNA, 1407 bp, Homo sapiens
taagttcacagtcgagtggatcatagctggcgggtaaggctgaaggtgagatcaggatgagggtttggaagcccttgcctagaaggaggcagttttttgagacagcataggagagcgcaaacctccagggtcacagggctgcagtcttctcctttcggagaccccattgcagagaagagcgaaagcaggggcggggtgggggtgggagtggtctcttccggttcttgaagatagcgtcccttaggcaggaggggtgggtcactcagtctccaggctcgggaggcccccagcaaatcggacgctgtgggctaggccgccaccgcgagcccactcgcccgatacgcgccttggggtccgggtcggctttccccgggacccctggccggaaactgagccgttcacttccgccaccagccggaagttttctgtcactggacgccaaggagttttcggtggctcagctgggtaaccggggatcaccatggcggcctcatgtcgttcagattctaggagataagtttccatgcactttggtggcacagaaaattgacctgccggagtaccagggggagccggatgagatttccatacagaaatgtcaggaggcagttcgccaggtacaggggcccgtgctggttgaggacacttgtctgtgcttcaatgcccttggagggctccccggcccctacataaagtggtttctggagaagttaaagcctgaaggtctccaccagctcctggccgggttcgaggacaagtcagcctatgcgctctgcacgtttgcactcagcaccggggacccaagccagcccgtgcgcctgttcaggggccggacctcgggccggatcgtggcacccagaggctgccaggactttggctgggacccctgctttcagcctgatggatatgagcagacgtacgcagagatgcctaaggcggagaagaacgctgtctcccatcgcttccgggccctgctggagctgcaggagtactttggcagtttggcagcttgacttctgcagctggaggaggcccctcaggccggggatctggggagggctagcccaaaacctcccgcatcgggcaggcaccccctgaagtacttccttcagggtttcccctttgtgagggtgtcgagtagcctcaccggcctgtctggaggagcagctggctctgctctgagaaactctggcaagtggacgccattctcttgcccttaggattcactgctctctcctacagccgccaggcctggggtcctgaaaggaccttgggtggtaaagctgtacttggtgggagtgagggcgtggggaggaaccatgcaaatcgccttccatggtttttaaatgcagtaaataacatttctggatgagacttgtttccaaaataaaccagctatatctgttt

SEQ ID NO: 367080 - DNA, 1397 bp, Homo sapiens
tgggggacaggcagaaaatattcagatgcccccttcctggcacctgctctggagccaggctgggaggaatggaaaacccctgcggcctccctaacaggtgcagagggaaagggccccgacggtgacggatgggagtgtgcgccggccagggcctcaggcctttggagacgcagttttgctcttgttgcccaggctggagtccgatggcacgatctccgctcactgcaacccccacctcccgaattcaggcgattctcctgaatcctgaattctctgaactgggattacaggcatgcaccaccatgcccagctaattttgtactttttggtagagatggggtttctccatgttggtcaggctggtttcaaactcctgacctcgggtgatccactcgcctcagcctcccaaagtgctgggattacaggcgtgagccaccgggctttcccacactttgatgagcatcagaatggcctgaggagcttggtcgttcagattctaggagataagtttccatgcactttggtggcacagaaaattgacctgccggagtaccagggggagccggatgagatttccatacagaaatgtcaggaggcagttcgccaggtacaggggcccgtgctggttgaggacacttgtctgtgcttcaatgcccttggagggctccccggcccctacataaagtggtttctggagaagttaaagcctgaaggtctccaccagctcctggccgggttcgaggacaagtcagcctatgcgctctgcacgtttgcactcagcaccggggacccaagccagcccgtgcgcctgttcaggggccggacctcgggccggatcgtggcacccagaggctgccaggactttggctgggacccctgctttcagcctgatggatatgagcagacgtacgcagagatgcctaaggcggagaagaacgctgtctcccatcgcttccgggccctgctggagctgcaggagtactttggcagtttggcagcttgacttctgcagctggaggaggcccctcaggccggggatctggggagggctagcccaaaacctcccgcatcgggcaggcaccccctgaagtacttccttcagggtttcccctttgtgagggtgtcgagtagcctcaccggcctgtctggaggagcagctggctctgctctgagaaactctggcaagtggacgccattctcttgcccttaggattcactgctctctcctacagccgccaggcctggggtcctgaaaggaccttgggtggtaaagctgtacttggtgggagtgagggcgtggggaggaaccatgcaaatcgccttccatggtttttaaatgcagtaaataacatttctggatgagacttgtttccaaaataaaccagctatatctgttt

SEQ ID NO: 367081 - DNA, 1463 bp, Homo sapiens
taagttcacagtcgagtggatcatagctggcgggtaaggctgaaggtgagatcaggatgagggtttggaagcccttgcctagaaggaggcagttttttgagacagcataggagagcgcaaacctccagggtcacagggctgcagtcttctcctttcggagaccccattgcagagaagagcgaaagcaggggcggggtgggggtgggagtggtctcttccggttcttgaagatagcgtcccttaggcaggaggggtgggtcactcagtctccaggctcgggaggcccccagcaaatcggacgctgtgggctaggccgccaccgcgagcccactcgcccgatacgcgccttggggtccgggtcggctttccccgggacccctggccggaaactgagccgttcacttccgccaccagccggaagttttctgtcactggacgccaaggagttttcggtggctcagctgggtaaccggggatcaccatggcggcctcattggtggggaagaagatcgtgtttgtaacggggaacgccaagaagctggaggagatggttggatttctctgtcttcctgtgacctgactttctgtgtgtctgtttccctgataagtgccggagtaccagggggagccggatgagatttccatacagaaatgtcaggaggcagttcgccaggtacaggggcccgtgctggttgaggacacttgtctgtgcttcaatgcccttggagggctccccggcccctacataaagtggtttctggagaagttaaagcctgaaggtctccaccagctcctggccgggttcgaggacaagtcagcctatgcgctctgcacgtttgcactcagcaccggggacccaagccagcccgtgcgcctgttcaggggccggacctcgggccggatcgtggcacccagaggctgccaggactttggctgggacccctgctttcagcctgatggatatgagcagacgtacgcagagatgcctaaggcggagaagaacgctgtctcccatcgcttccgggccctgctggagctgcaggagtactttggcagtttggcagcttgacttctgcagctggaggaggcccctcaggccggggatctggggagggctagcccaaaacctcccgcatcgggcaggcaccccctgaagtacttccttcagggtttcccctttgtgagggtgtcgagtagcctcaccggcctgtctggaggagcagctggctctgctctgagaaactctggcaagtggacgccattctcttgcccttaggattcactgctctctcctacagccgccaggcctggggtcctgaaaggaccttgggtggtaaagctgtacttggtgggagtgagggcgtggggaggaaccatgcaaatcgccttccatggtttttaaatgcagtaaataacatttctggatgagacttgtttccaaaataaaccagctatatctgttt

SEQ ID NO: 367082 - DNA, 1381 bp, Homo sapiens
taagttcacagtcgagtggatcatagctggcgggtaaggctgaaggtgagatcaggatgagggtttggaagcccttgcctagaaggaggcagttttttgagacagcataggagagcgcaaacctccagggtcacagggctgcagtcttctcctttcggagaccccattgcagagaagagcgaaagcaggggcggggtgggggtgggagtggtctcttccggttcttgaagatagcgtcccttaggcaggaggggtgggtcactcagtctccaggctcgggaggcccccagcaaatcggacgctgtgggctaggccgccaccgcgagcccactcgcccgatacgcgccttggggtccgggtcggctttccccgggacccctggccggaaactgagccgttcacttccgccaccagccggaagttttctgtcactggacgccaaggagttttcggtggctcagctggatggttggatttctctgtcttcctgtgacctgactttctgtgtgtctgtttccctgataagtgccggagtaccagggggagccggatgagatttccatacagaaatgtcaggaggcagttcgccaggtacaggggcccgtgctggttgaggacacttgtctgtgcttcaatgcccttggagggctccccggcccctacataaagtggtttctggagaagttaaagcctgaaggtctccaccagctcctggccgggttcgaggacaagtcagcctatgcgctctgcacgtttgcactcagcaccggggacccaagccagcccgtgcgcctgttcaggggccggacctcgggccggatcgtggcacccagaggctgccaggactttggctgggacccctgctttcagcctgatggatatgagcagacgtacgcagagatgcctaaggcggagaagaacgctgtctcccatcgcttccgggccctgctggagctgcaggagtactttggcagtttggcagcttgacttctgcagctggaggaggcccctcaggccggggatctggggagggctagcccaaaacctcccgcatcgggcaggcaccccctgaagtacttccttcagggtttcccctttgtgagggtgtcgagtagcctcaccggcctgtctggaggagcagctggctctgctctgagaaactctggcaagtggacgccattctcttgcccttaggattcactgctctctcctacagccgccaggcctggggtcctgaaaggaccttgggtggtaaagctgtacttggtgggagtgagggcgtggggaggaaccatgcaaatcgccttccatggtttttaaatgcagtaaataacatttctggatgagacttgtttccaaaataaaccagctatatctgttt

SEQ ID NO: 367083 - DNA, 1263 bp, Homo sapiens
taagttcacagtcgagtggatcatagctggcgggtaaggctgaaggtgagatcaggatgagggtttggaagcccttgcctagaaggaggcagttttttgagacagcataggagagcgcaaacctccagggtcacagggctgcagtcttctcctttcggagaccccattgcagagaagagcgaaagcaggggcggggtgggggtgggagtggtctcttccggttcttgaagatagcgtcccttaggcaggaggggtgggtcactcagtctccaggctcgggaggcccccagcaaatcggacgctgtgggctaggccgccaccgcgagcccactcgcccgatacgcgccttggggtccgggtcggctttccccgggacccctggccggaaactgagccgttcacttccgccaccagccggaagttttctgtcactggacgccaaggagttttcggtggctcagctgggtaaccggggatcaccatggcggcctcattggtggggaagaagatcgtgtttgtaacggggaacgccaagaagctggaggagaaagtggtttctggagaagttaaagcctgaaggtctccaccagctcctggccgggttcgaggacaagtcagcctatgcgctctgcacgtttgcactcagcaccggggacccaagccagcccgtgcgcctgttcaggggccggacctcgggccggatcgtggcacccagaggctgccaggactttggctgggacccctgctttcagcctgatggatatgagcagacgtacgcagagatgcctaaggcggagaagaacgctgtctcccatcgcttccgggccctgctggagctgcaggagtactttggcagtttggcagcttgacttctgcagctggaggaggcccctcaggccggggatctggggagggctagcccaaaacctcccgcatcgggcaggcaccccctgaagtacttccttcagggtttcccctttgtgagggtgtcgagtagcctcaccggcctgtctggaggagcagctggctctgctctgagaaactctggcaagtggacgccattctcttgcccttaggattcactgctctctcctacagccgccaggcctggggtcctgaaaggaccttgggtggtaaagctgtacttggtgggagtgagggcgtggggaggaaccatgcaaatcgccttccatggtttttaaatgcagtaaataacatttctggatgagacttgtttccaaaataaaccagctatatctgttt

SEQ ID NO: 367084 - DNA, 792 bp, Homo sapiens
gacaaagctgatcaacatgcagctatcccccctgtcccagcttcccttaatgacttttgggcacactagagcaagtttaatacccctccatgctcattcatgggggtttctgcctacaggggaattgaaaactttatccgatttttaaaaattcactggctgccaggagctgctgggccccactcccctttccttggggtctgtgagctttggtctccagggatgagatgaggtagggtagggagggggtgcacttccttcctgaatctgggctccctgagctgctactgtcacccctcaggtacgcagagatgcctaaggcggagaagaacgctgtctcccatcgcttccgggccctgctggagctgcaggagtactttggcagtttggcagcttgacttctgcagctggaggaggcccctcaggccggggatctggggagggctagcccaaaacctcccgcatcgggcaggcaccccctgaagtacttccttcagggtttcccctttgtgagggtgtcgagtagcctcaccggcctgtctggaggagcagctggctctgctctgagaaactctggcaagtggacgccattctcttgcccttaggattcactgctctctcctacagccgccaggcctggggtcctgaaaggaccttgggtggtaaagctgtacttggtgggagtgagggcgtggggaggaaccatgcaaatcgccttccatggtttttaaatgcagtaaataacatttctggatgagacttgtttccaaaataaaccagctatatctgttt

SEQ ID NO: 367085 - DNA, 660 bp, Homo sapiens
tcacagactcaccaaactcatactggccactgccctcctcgtgcttgtcctctggacccagttacacacctgtcccccctttcctgtggcagggccggatcgtggcacccagaggctgccaggactttggctgggacccctgctttcagcctgatggatatgagcagacgtacgcagagatgcctaaggcggagaagaacgctgtctcccatcgcttccgggccctgctggagctgcaggagtactttggcagtttggcagcttgacttctgcagctggaggaggcccctcaggccggggatctggggagggctagcccaaaacctcccgcatcgggcaggcaccccctgaagtacttccttcagggtttcccctttgtgagggtgtcgagtagcctcaccggcctgtctggaggagcagctggctctgctctgagaaactctggcaagtggacgccattctcttgcccttaggattcactgctctctcctacagccgccaggcctggggtcctgaaaggaccttgggtggtaaagctgtacttggtgggagtgagggcgtggggaggaaccatgcaaatcgccttccatggtttttaaatgcagtaaataacatttctggatgagacttgtttccaaaataaaccagctatatctgttt

SEQ ID NO: 367086 - DNA, 1478 bp, Homo sapiens
taagttcacagtcgagtggatcatagctggcgggtaaggctgaaggtgagatcaggatgagggtttggaagcccttgcctagaaggaggcagttttttgagacagcataggagagcgcaaacctccagggtcacagggctgcagtcttctcctttcggagaccccattgcagagaagagcgaaagcaggggcggggtgggggtgggagtggtctcttccggttcttgaagatagcgtcccttaggcaggaggggtgggtcactcagtctccaggctcgggaggcccccagcaaatcggacgctgtgggctaggccgccaccgcgagcccactcgcccgatacgcgccttggggtccgggtcggctttccccgggacccctggccggaaactgagccgttcacttccgccaccagccggaagttttctgtcactggacgccaaggagttttcggtggctcagctgggtaaccggggatcaccatggcggcctcattggtggggaagaagatcgtgtttgtaacggggaacgccaagaagctggaggaggtcgttcagattctaggagataagtttccatgcactttggtggcacagaaaattgacctgccggagtaccagggggagccggatgagatttccatacagaaatgtcaggaggcagttcgccaggtacaggggcccgtgctggttgaggacacttgtctgtgcttcaatgcccttggagggctccccggcccctacataaagtggtttctggagaagttaaagcctgaaggtctccaccagctcctggccgggttcgaggacaagtcagcctatgcgctctgcacgtttgcactcagcaccggggacccaagccagcccgtgcgcctgttcaggggccggacctcgggccggatcgtggcacccagaggctgccaggactttggctgggacccctgctttcagcctgatggatatgagcagacgtacgcagagatgcctaaggcggagaagaacgctgtctcccatcgcttccgggccctgctggagctgcaggagtactttggcagtttggcagcttgacttctgcagctggaggaggcccctcaggccggggatctggggagggctagcccaaaacctcccgcatcgggcaggcaccccctgaagtacttccttcagggtttcccctttgtgagggtgtcgagtagcctcaccggcctgtctggaggagcagctggctctgctctgagaaactctggcaagtggacgccattctcttgcccttaggattcactgctctctcctacagccgccaggcctggggtcctgaaaggaccttgggtggtaaagctgtacttggtgggagtgagggcgtggggaggaaccatgcaaatcgccttccatggtttttaaatgcagtaaataacatttctggatgagacttgtttccaaaataaaccagctatatctgtttaaccctgccccaggcagg

SEQ ID NO: 367087 - DNA, 1378 bp, Homo sapiens
taagttcacagtcgagtggatcatagctggcgggtaaggctgaaggtgagatcaggatgagggtttggaagcccttgcctagaaggaggcagttttttgagacagcataggagagcgcaaacctccagggtcacagggctgcagtcttctcctttcggagaccccattgcagagaagagcgaaagcaggggcggggtgggggtgggagtggtctcttccggttcttgaagatagcgtcccttaggcaggaggggtgggtcactcagtctccaggctcgggaggcccccagcaaatcggacgctgtgggctaggccgccaccgcgagcccactcgcccgatacgcgccttggggtccgggtcggctttccccgggacccctggccggaaactgagccgttcacttccgccaccagccggaagttttctgtcactggacgccaaggagttttcggtggctcagctgggtcgttcagattctaggagataagtttccatgcactttggtggcacagaaaattgacctgccggagtaccagggggagccggatgagatttccatacagaaatgtcaggaggcagttcgccaggtacaggggcccgtgctggttgaggacacttgtctgtgcttcaatgcccttggagggctccccggcccctacataaagtggtttctggagaagttaaagcctgaaggtctccaccagctcctggccgggttcgaggacaagtcagcctatgcgctctgcacgtttgcactcagcaccggggacccaagccagcccgtgcgcctgttcaggggccggacctcgggccggatcgtggcacccagaggctgccaggactttggctgggacccctgctttcagcctgatggatatgagcagacgtacgcagagatgcctaaggcggagaagaacgctgtctcccatcgcttccgggccctgctggagctgcaggagtactttggcagtttggcagcttgacttctgcagctggaggaggcccctcaggccggggatctggggagggctagcccaaaacctcccgcatcgggcaggcaccccctgaagtacttccttcagggtttcccctttgtgagggtgtcgagtagcctcaccggcctgtctggaggagcagctggctctgctctgagaaactctggcaagtggacgccattctcttgcccttaggattcactgctctctcctacagccgccaggcctggggtcctgaaaggaccttgggtggtaaagctgtacttggtgggagtgagggcgtggggaggaaccatgcaaatcgccttccatggtttttaaatgcagtaaataacatttctggatgagacttgtttccaaaataaaccagctatatctgttt

SEQ ID NO: 367088 - DNA, 1014 bp, Homo sapiens
cagacccacctttgagagggcacttcctactttctgttgtgtttggaatgcaaagatctggctgaaacggtggccacggagaaggggtgatagatttgagaggctggagggatgaggaagtgaggaactctacatactgagctctcaagcctaggagtgaaaacgggtcgttcagattctaggagataagtttccatgcactttggtggcacagaaaattgaccgtacaggggcccgtgctggttgaggacacttgtctgtgcttcaatgcccttggagggctccccggcccctacataaagtggtttctggagaagttaaagcctgaaggtctccaccagctcctggccgggttcgaggacaagtcagcctatgcgctctgcacgtttgcactcagcaccggggacccaagccagcccgtgcgcctgttcaggggccggacctcgggccggatcgtggcacccagaggctgccaggactttggctgggacccctgctttcagcctgatggatatgagcagacgtacgcagagatgcctaaggcggagaagaacgctgtctcccatcgcttccgggccctgctggagctgcaggagtactttggcagtttggcagcttgacttctgcagctggaggaggcccctcaggccggggatctggggagggctagcccaaaacctcccgcatcgggcaggcaccccctgaagtacttccttcagggtttcccctttgtgagggtgtcgagtagcctcaccggcctgtctggaggagcagctggctctgctctgagaaactctggcaagtggacgccattctcttgcccttaggattcactgctctctcctacagccgccaggcctggggtcctgaaaggaccttgggtggtaaagctgtacttggtgggagtgagggcgtggggaggaaccatgcaaatcgccttccatggtttttaaatgcagtaaataacatttctggatgagacttgtttccaaaataaaccagctatatctgttt

SEQ ID NO: 367089 - DNA, 1337 bp, Homo sapiens
taagttcacagtcgagtggatcatagctggcgggtaaggctgaaggtgagatcaggatgagggtttggaagcccttgcctagaaggaggcagttttttgagacagcataggagagcgcaaacctccagggtcacagggctgcagtcttctcctttcggagaccccattgcagagaagagcgaaagcaggggcggggtgggggtgggagtggtctcttccggttcttgaagatagcgtcccttaggcaggaggggtgggtcactcagtctccaggctcgggaggcccccagcaaatcggacgctgtgggctaggccgccaccgcgagcccactcgcccgatacgcgccttggggtccgggtcggctttccccgggacccctggccggaaactgagccgttcacttccgccaccagccggaagttttctgtcactggacgccaaggagttttcggtggctcagctgggtaaccggggatcaccatggcggcctcattggtggggaagaagatcgtgtttgtaacggggaacgccaagaagctggaggaggtacaggggcccgtgctggttgaggacacttgtctgtgcttcaatgcccttggagggctccccggcccctacataaagtggtttctggagaagttaaagcctgaaggtctccaccagctcctggccgggttcgaggacaagtcagcctatgcgctctgcacgtttgcactcagcaccggggacccaagccagcccgtgcgcctgttcaggggccggacctcgggccggatcgtggcacccagaggctgccaggactttggctgggacccctgctttcagcctgatggatatgagcagacgtacgcagagatgcctaaggcggagaagaacgctgtctcccatcgcttccgggccctgctggagctgcaggagtactttggcagtttggcagcttgacttctgcagctggaggaggcccctcaggccggggatctggggagggctagcccaaaacctcccgcatcgggcaggcaccccctgaagtacttccttcagggtttcccctttgtgagggtgtcgagtagcctcaccggcctgtctggaggagcagctggctctgctctgagaaactctggcaagtggacgccattctcttgcccttaggattcactgctctctcctacagccgccaggcctggggtcctgaaaggaccttgggtggtaaagctgtacttggtgggagtgagggcgtggggaggaaccatgcaaatcgccttccatggtttttaaatgcagtaaataacatttctggatgagacttgtttccaaaataaaccagctatatctgttt

SEQ ID NO: 367090 - DNA, 414 bp, Homo sapiens
aagggaaatctacttgcccacaggaaatacgaaaccccaagcattcctagatataatgtatttccgcctttggagaaaaatatatccctcaaatacttcagtacaaaatacccacagtgaaaagttttaaaacatggtatgcttttaaacaaaatgagctccctgaagaagctgcagtatcctaagctcacacttgtttcttcttgaatttgtgatttagcagttttgggattaggcatcacgtgctttacaaagatgttgatctgtaattgctagtactgactcttttgctttcatgatggattatataccatttgcaattgatagtctctgaatctttattttctttgcaaaagtagcatgtcatctccaaaaaccggacagcagtgcttgctaaataaagtgtagtatcga

SEQ ID NO: 367091 - DNA, 452 bp, Homo sapiens
aagggaaatctacttgcccacaggaaatacgaaaccccaagcattcctagatataatgtatttccgcctttggagaaaaatatatccctcaaatacttcagtacaaaatacccacagtgaaaagttttaaaacatggtatgcttttaaacaaaatgagctccctgaagaagctgcagtatcctaagctcacacttgtttcttcttgaatttgtgatttagcagttttgggattaggcatcacgtgctttacaaagatgttgatctgtaattgctagtactgactcttttgctttcatgatggattatataccatttgcaattgatagtctctgaatctttattttctttgcaaaagtagcatgtcatctccaaaaaccggacagcagtgcttgctaaataaagtgtagtatcgatcaacgtgttaaactatcatgcctttcacaaaaaaaaa

SEQ ID NO: 367092 - DNA, 324 bp, Homo sapiens
gtgcctggcctggtggggtgcactgcccctgtggtccttctcacagctggccacatacccctcagatgcagtgagcggcccaccagacacctggcttacagagaacaggggtgaaggagagctgcaagccttctctcaaagcctcccttccttcctggtgtctgtgggctgagtgtgtctccctctggcttgattcatggtttttgctctctctttggtgcattcattctttccagattttttactttctttccattcgctcacaagggaagacctgctgagggcggaaacatcatgcatgagttaaaggagaacaatgggtga

SEQ ID NO: 367093 - DNA, 1040 bp, Homo sapiens
agcggaggcgactagcgcaggcggacgggagagaatgggggaggggtgggatgggagcaggggcagagacgggcagagggcagagggcggagcggcgccggagcgggcgtcatggcgcggctcctctggttgctccggggcctgaccctcggaactgcgcctcggcgggcggtgcggggccaagcgggcggcggcgggcccggcaccgggccgggactgggggaggcagggtctcttgcaacgtgtgagctgcctcttgccaagagtgagtggcaaaagaaactaaccccggagcagttctacgtcacaagagaaaagggaacggaaccgcctttcagtgggatctacctgaataacaaggaagcaggaatgtatcattgcgtgtgctgcgacagtccactcttcagttctgagaaaaagtactgctctggcactgggtggccttcgttttccgaggctcatggtacgtctggctctgatgaaagccacacagggatcctgagacgtctggatacctcgttaggatcagctcgcacagaggttgtctgcaagcagtgtgaagctcatctaggtcacgtgtttcctgatggacctgggcccaatggtcagaggttttgcatcaacagtgtggctttgaagttcaaaccaaggaaacactgaccatcttcaagagtcccgttcccttgccaccccttcacgtgcaccctcaatttccacaattcacttgaatgacttgttttatttgcaataaaactgggctgaatttgctgctgtctccagcgagtcattgcttctcttaatttatttacctggaatcaacttaatcctgtgtgttaggctgttcttgtgttgctataaagaagtacctgatcaggatctgggagaatttgaaaaaaaaagaaaaactagaaaaataaacaaatttaaaaggaaaaaaaatacctgagactgagtactataaagaaaagaggtttaattgactcacagttctgcagggtgtacagaaagcatggtgccagcatttgctcggattctgggga

SEQ ID NO: 367094 - DNA, 455 bp, Homo sapiens
tatctaatttactttcagcctttcagtgggatctacctgaataacaaggaagcaggaatgtatcattgcgtgtgctgcgacagtccactcttcagttctgagaaaaagtactgctctggcactgggtggccttcgttttccgaggctcatggtacgtctggctctgatgaaagccacacagggatcctgagacgtctggatacctcgttaggatcagctcgcacagaggttgtctgcaagcagtgtgaagctcatctaggtcacgtgtttcctgatggacctgggcccaatggtcagaggttttgcatcaacagtgtggctttgaagttcaaaccaaggaaacactgaccatcttcaagagtcccgttcccttgccaccccttcacgtgcaccctcaatttccacaattcacttgaatgacttgttttatttgcaataaaactgggctgaatttg

SEQ ID NO: 367095 - DNA, 270 bp, Homo sapiens
ggactggattattctgctgggtgacagtacacttagggaaaaaggtcaaggaagaaaagtccatcaggcatttttgttttaatttttaaaattcctgtttaacaatacagggtctcttgcaacgtgtgagctgcctcttgccaagagtgagtggcaaaagaaactaaccccggagcagttctacgtcacaagagaaaagggaacggaaccggtaagctaagctggtttacagttttctgattgcatgtgttggcagtgaggggccagttg

SEQ ID NO: 367096 - DNA, 1173 bp, Homo sapiens
  misc_feature (801)..(801): n is a, c, g, or t
  misc_feature (993)..(993): n is a, c, g, or t
agcggaggcgactagcgcaggcggacgggagagaatgggggaggggtgggatgggagcaggggcagagacgggcagagggcagagggcggagcggcgccggagcgggcgtcatggcgcggctcctctggttgctccggggcctgaccctcggaactgcgcctcggcgggcggtgcggggccaagcgggcggcggcgggcccggcaccgggccgggactgggggaggcagggtctcttgcaacgtgtgagctgcctcttgccaagagtgagtggcaaaagaaactaaccccggagcagttctacgtcacaagagaaaagggaacggaaccgcctttcagtgggatctacctgaataacaaggaagcaggaatgtatcattgcgtgtgctgcgacagtccactcttcagttctgagaaaaagtactgctctggcactgggtggccttcgttttccgaggctcatggtacgtctggctctgatgaaagccacacagggatcctgagacgtctggatacctcgttaggatcagctcgcacagaggttgtctgcaagcagtgtgaagctcatctaggtcacgtgtttcctgatggacctgggcccaatggtcagaggttttgcatcaacagtgtggctttgaagttcaaaccaaggaaacactgaccatcttcaagagtcccgttcccttgccaccccttcacgtgcaccctcaatttccacaattcacttgaatgacttgttttatttgcaataaaactgggctgaatttgaaaaaaaaaaaaaaaaaaaaaaaaaaaaaaaaanaaaaaagggggggggcctaaaaaataccccggggggccccaattacgggacccgagttttttggtaccacagggggccccctaaagggaggtgccggaattaaaaacgatagggcaggggggccgcgtacaaaaaacagtgctgtagtcgggaaaacacctgcttagtgggacaccttaggaaaagagagcncctactctcgtggggggggaacaaaattgggtgcacaaccatacctagcaagaggatttaaggctcccgagggaaattattaaatacaggtggtaatatggtggtacacaacggggaatagcgttcgtggtgagaaagttgtgggctgccggaatgtgattcagaaatattataccaggt

SEQ ID NO: 367097 - DNA, 801 bp, Homo sapiens
gcgtcgacggacgattccggggggactgactgtcgaataactgggcatgggatctggcagaggagagtgggaacggatcctgctgcctggaacaacacatcggggcacctcttggcatgttaatgacagtgtcattagcagctgtagtatcgtttatgtcttccacagttctgagaaaaagtactgctctggcactgggtggccttcgttttccgaggctcatggtacgtctggctctgatgaaagccacacagggatcctgagacgtctggatacctcgttaggatcagctcgcacagaggttgtctgcaagcagtgtgaagctcatctaggtcacgtgtttcctgatggacctgggcccaatggtcagaggttttgcatcaacagtgtggctttgaagttcaaaccaaggaaacactgaccatcttcaagagtcccgttcccttgccaccccttcacgtgcaccctcaatttccacaattcacttgaatgacttgttttatttgcaataaaactgggctgaatttgctgctgtctccagcgagtcattgcttctcttaatttatttacctggaatcaacttaatcctgtgtgttaggctgttcttgtgttgctataaagaagtacctgatcaggatctgggagaatttgaaaaaaaaagaaaaactagaaaaataaacaaatttaaaaggaaaaaaaatacctgagactgagtactataaagaaaagaggtttaattgactcacagttctgcagggtgtacagaaagcatggtgccagcatttgctcggattctgggga

SEQ ID NO: 367098 - DNA, 1129 bp, Homo sapiens
agcggaggcgactagcgcaggcggacgggagagaatgggggaggggtgggatgggagcaggggcagagacgggcagagggcagagggcggagcggcgccggagcgggcgtcatggcgcggctcctctggttgctccggggcctgaccctcggaactgcgcctcggcgggcggtgcggggccaagcgggcggcggcgggcccggcaccgggccgggactgggggaggcagggtctcttgcaacgtgtgagctgcctcttgccaagagtgagtggcaaaagaaactaaccccggagcagttctacgtcacaagagaaaagggaacggaaccgcctttcagtgggatctacctgaataacaaggaagcaggaatgtatcattgcgtgtgctgcgacagtccactcttcagatccttgttggatatccagaaagaagtctttagcatcaaaggatcaagaagtccttccacttcgagaggcaatggcttcgatagtgaagttctgagaaaaagtactgctctggcactgggtggccttcgttttccgaggctcatggtacgtctggctctgatgaaagccacacagggatcctgagacgtctggatacctcgttaggatcagctcgcacagaggttgtctgcaagcagtgtgaagctcatctaggtcacgtgtttcctgatggacctgggcccaatggtcagaggttttgcatcaacagtgtggctttgaagttcaaaccaaggaaacactgaccatcttcaagagtcccgttcccttgccaccccttcacgtgcaccctcaatttccacaattcacttgaatgacttgttttatttgcaataaaactgggctgaatttgctgctgtctccagcgagtcattgcttctcttaatttatttacctggaatcaacttaatcctgtgtgttaggctgttcttgtgttgctataaagaagtacctgatcaggatctgggagaatttgaaaaaaaaagaaaaactagaaaaataaacaaatttaaaaggaaaaaaaatacctgagactgagtactataaagaaaagaggtttaattgactcacagttctgcagggtgtacagaaagcatggtgccagcatttgctcggattctgggga

SEQ ID NO: 367099 - DNA, 470 bp, Homo sapiens
agcggaggcgactagcgcaggcggacgggagagaatgggggaggggtgggatgggagcaggggcagagacgggcagagggcagagggcggagcggcgccggagcgggcgtcatggcgcggctcctctggttgctccggggcctgaccctcggaactgcgcctcggcgggcggtgcggggccaagcgggcggcggcgggcccggcaccgggccgggactgggggaggcaggtaggacgcgggtcccgcaggccccgccgccgcctacggctttcggcttcatttcaccggctgcacccgggagcctagggccggtccaggccgggcgctgccctcctactaagccctcctcggcgcgcccctccccccccccagcccgaggatctgggacagtggattgtaaacttggtggcggcagggtggggactgacccctgtgagaatccgaggaaatgaacaaatgatccccctaa

SEQ ID NO: 367100 - DNA, 767 bp, Homo sapiens
agcggaggcgactagcgcaggcggacgggagagaatgggggaggggtgggatgggagcaggggcagagacgggcagagggcagagggcggagcggcgccggagcgggcgtcatggcgcggctcctctggttgctccggggcctgaccctcggaactgcgcctcggcgggcggtgcggggccaagcgggcggcggcgggcccggcaccgggccgggactgggggaggcagggtctcttgcaacgtgtgagctgcctcttgccaagagtgagtggcaaaagaaactaaccccggagcagttctacgtcacaagagaaaagggaacggaaccgcctttcagtgggatctacctgaataacaaggaagcaggaatgtatcattgcgtgtgctgcgacagtccactcttcagttctgagaaaaagtactgctctggcactgggtggccttcgttttccgaggctcatggtacgtctggctctgatgaaagccacacagggatcctgagacgtctggatacctcgttaggatcagctcgcacagaggttgtctgcaagcagtgtgaagctcatctaggtcacgtgtttcctgatggacctgggcccaatggtcagaggttttgcatcaacagtgtggctttgaagttcaaaccaaggaaacactgaccatcttcaagagtcccgttcccttgccaccccttcacgtgcaccctcaatttccacaattcacttgaatgacttgttttatttgcaataaaactgggctgaatttg

SEQ ID NO: 367101 - DNA, 619 bp, Homo sapiens
agcggaggcgactagcgcaggcggacgggagagaatgggggaggggtgggatgggagcaggggcagagacgggcagagggcagagggcggagcggcgccggagcgggcgtcatggcgcggctcctctggttgctccggggcctgaccctcggaactgcgcctcggcgggcggtgcggggccaagcgggcggcggcgggcccggcaccgggccgggactgggggaggcagggtctcttgcaacgtgtgagctgcctcttgccaagagtgagtggcaaaagaaactaaccccggagcagttctacgtcacaagagaaaagggaacggaaccgcctttcagtgggatctacctgaataacaaggaagcaggaatgtatcattgcgtgtgctgcgacagtccactcttcagtgtgaagctcatctaggtcacgtgtttcctgatggacctgggcccaatggtcagaggttttgcatcaacagtgtggctttgaagttcaaaccaaggaaacactgaccatcttcaagagtcccgttcccttgccaccccttcacgtgcaccctcaatttccacaattcacttgaatgacttgttttatttgcaataaaactgggctgaatttg

SEQ ID NO: 367102 - DNA, 1080 bp, Homo sapiens
  misc_feature (801)..(801): n is a, c, g, or t
agcggaggcgactagcgcaggcggacgggagagaatgggggaggggtgggatgggagcaggggcagagacgggcagagggcagagggcggagcggcgccggagcgggcgtcatggcgcggctcctctggttgctccggggcctgaccctcggaactgcgcctcggcgggcggtgcggggccaagcgggcggcggcgggcccggcaccgggccgggactgggggaggcagggtctcttgcaacgtgtgagctgcctcttgccaagagtgagtggcaaaagaaactaaccccggagcagttctacgtcacaagagaaaagggaacggaaccgcctttcagtgggatctacctgaataacaaggaagcaggaatgtatcattgcgtgtgctgcgacagtccactcttcagttctgagaaaaagtactgctctggcactgggtggccttcgttttccgaggctcatggtacgtctggctctgatgaaagccacacagggatcctgagacgtctggatacctcgttaggatcagctcgcacagaggttgtctgcaagcagtgtgaagctcatctaggtcacgtgtttcctgatggacctgggcccaatggtcagaggttttgcatcaacagtgtggctttgaagttcaaaccaaggaaacactgaccatcttcaagagtcccgttcccttgccaccccttcacgtgcaccctcaatttccacaattcacttgaatgacttgttttatttgcaataaaactgggctgaatttgaaaaaaaaaaaaaaaaaaaaaaaaaaaaaaaaanaaaaaaacagggggggcgccgccatcaaaaagataccccccgcgaggggcccccagaggtttaagcgggtaatcacccggtgttgttgtgtaaccagagggggtccccataaaggaggagcacgcgtagaatataacagccaacagcacgggcgccgccggtactaaacaccggcccgcgcagtgcgcaaacagcggcccagcgcgggcaaccctggggagaacagcaccctcactcgcgcgggggggccgcactctattggggacacactcgcttaag

SEQ ID NO: 367103 - DNA, 856 bp, Homo sapiens
agcggaggcgactagcgcaggcggacgggagagaatgggggaggggtgggatgggagcaggggcagagacgggcagagggcagagggcggagcggcgccggagcgggcgtcatggcgcggctcctctggttgctccggggcctgaccctcggaactgcgcctcggcgggcggtgcggggccaagcgggcggcggcgggcccggcaccgggccgggactgggggaggcagggtctcttgcaacgtgtgagctgcctcttgccaagagtgagtggcaaaagaaactaaccccggagcagttctacgtcacaagagaaaagggaacggaaccgcctttcagtgggatctacctgaataacaaggaagcaggaatgtatcattgcgtgtgctgcgacagtccactcttcagatccttgttggatatccagaaagaagtctttagcatcaaaggatcaagaagtccttccacttcgagaggcaatggcttcgatagtgaagttctgagaaaaagtactgctctggcactgggtggccttcgttttccgaggctcatggtacgtctggctctgatgaaagccacacagggatcctgagacgtctggatacctcgttaggatcagctcgcacagaggttgtctgcaagcagtgtgaagctcatctaggtcacgtgtttcctgatggacctgggcccaatggtcagaggttttgcatcaacagtgtggctttgaagttcaaaccaaggaaacactgaccatcttcaagagtcccgttcccttgccaccccttcacgtgcaccctcaatttccacaattcacttgaatgacttgttttatttgcaataaaactgggctgaatttg

SEQ ID NO: 367104 - DNA, 773 bp, Homo sapiens
tgaacctttgaagatcttttatggaatagagagtatatgataaaaactgtggtttggctattgaaaaaccaataatatctaccttcttctttgactacttatactattaaggctaaaaaaaccaaagtacctaatttctccagttcctttgcaactagtcaaaagtgctcaaggagggcttccctttatggaaaaaggcaaagtcttcttgagactttttaatcctttttgtccttttcaccctctaccttcttcctgcctagaatgtagaagcgaggcctggaggtgaagcagccatcttccattcatgccacagctagcatgagggtgaatgtctatataataaggatggcagagcagaaagatgaaaagagactggaactctggaagcagtttgaagccactgtacctacccctaccttgtaatggatgagacaaataaacccctatttgtttaagccactgtagtacagttctctgttatttacagatgaatgcattactgatataggttacatggtacaaagatcaaatttctcttctagaagataagttgacctgaggaaaagtcctgcaatgcacagagagaagccagtcagaaggctccaggaccccaggaaaaagacagtgaggccttgaaggatttagtatgagaaaaaggtaaattatcacaaatttttgtcatttgtaaattttttccataattcttatgatgaaaataattatataaccacacacttaccaaatattaaattaaaaattatttccagata

SEQ ID NO: 367105 - DNA, 335 bp, Homo sapiens
  misc_feature (27)..(27): n is a, c, g, or t
cgcggccgcgcgacacggctgcgagangacgacagagggctggaaaaatatccattgtccaagcggttaacccaactcctaacaacattttcgggggatctgaccttttttttccagttgaaatgtattaacacaccttccacaatcattttataagagtcagcataacatagtggataagaaatgtgagatgtttaacctctcagtaactcggttctctcattataaaataggaataaaatcagtacctgtttcatatgaaggtcgtttctgagaattaaatggactaatgtatgcaaaaagcctggcaaacaataaacactcatctgacttta

SEQ ID NO: 367106 - DNA, 1864 bp, Homo sapiens
aaaaaacacccctcatccagtctcttccagcctagagatcctggcctacccctccgccaaagcgcgcactgagtgcaaaccccagagtcaatccctgtcccggctccgccccccgcgtccgaatcccgcccagccgggccctcaagcccagtcgggactcgagcctagggaggcgaggttcccgcaccggatagaaaatgtcactgaaattcacaaatgcaaaacggattgaaggacttgatagtaatgtgtggattgaatttaccaaattggctgcagacccttctgttgtgaatcttggccaaggctttccagatatatcccctcctacatatgtaaaagaagaattatcaaagattgcagcaatcgatagcctgaatcagtatacacgaggctttggccatccatcacttgtgaaagctctgtcctatctgtatgaaaagctttatcaaaagcaaattgattcaaataaagaaatccttgtgacagtaggagcatatggatctctttttaacaccattcaagcattaattgatgagggagatgaagtcatactaatagtgcctttctatgactgctatgagcccatggtgagaatggctggagcaacacctgtttttattcccctgagatctaaacctgtttatggaaaaagatggtctagttctgactggacattagatcctcaagaactggaaagtaaatttaattccaaaaccaaagctattatactaaatactccacataacccacttggcaaggtgtataacagagaggaactgcaagtaattgctgacctttgcatcaaatatgacacactctgcatcagcgatgaggtttatgaatggcttgtatattctggaaataagcacttaaaaatagctacttttccaggtatgtgggagagaacaataacaataggaagtgctggaaagactttcagtgtaactggctggaagcttggctggtccattggtccaaatcatttgataaaacatttacagacagttcaacaaaacacgatttatacttgtgcaactcctttacaggaagccttggctcaagctttctggattgacatcaagcgcatggatgacccagaatgttactttaattctttgccaaaagagttagaagtaaaaagagatcggatggtacgtttacttgaaagtgttggcctaaaacccatagttcctgatggaggatacttcatcatcgctgatgtgtctttgctagatccagacctctctgatatgaagaataatgagccttatgactataagtttgtgaaatggatgactaaacataagaaactatcagccatccccgtttcagcattctgtaactcagagactaaatcacagtttgagaagtttgtgcgtttttgcttcattaaaaaagacagcacactggatgctgctgaagaaatcatcaaggcatggagtgtacagaagtcttgatttgtgcagaatggattaatgtttctgttagatgacctagtatggaattgttacttagtgctgccacctgctggatgttaaaaggtatttcagtacaactggaatttaaatatttccattgtttttccaaagcagttaacccaactcctaacaacattttcgggggatctgaccttttttttccagttgaaatgtattaacacaccttccacaatcattttataagagtcagcataacatagtggataagaaatgtgagatgtttaacctctcagtaactcggttctctcattataaaataggaataaaatcagtacctgtttcatatgaaggtcgtttctgagaattaaatggactaatgtatgcaaaaagcctggcaaacaataaacactcatctgacttta

SEQ ID NO: 367107 - DNA, 1964 bp, Homo sapiens
aaaaaacacccctcatccagtctcttccagcctagagatcctggcctacccctccgccaaagcgcgcactgagtgcaaaccccagagtcaatccctgtcccggctccgccccccgcgtccgaatcccgcccagccgggccctcaagcccagtcgggactcgagcctagggaggcgaggttcccgcaccggatagcatgtttttggcccagaggagcctctgctctcttagcggtagagcaaaattcctgaagacaatttcttcttccaaaatcctcggattctctacttctgctaaaatgtcactgaaattcacaaatgcaaaacggattgaaggacttgatagtaatgtgtggattgaatttaccaaattggctgcagacccttctgttgtgaatcttggccaaggctttccagatatatcccctcctacatatgtaaaagaagaattatcaaagattgcagcaatcgatagcctgaatcagtatacacgaggctttggccatccatcacttgtgaaagctctgtcctatctgtatgaaaagctttatcaaaagcaaattgattcaaataaagaaatccttgtgacagtaggagcatatggatctctttttaacaccattcaagcattaattgatgagggagatgaagtcatactaatagtgcctttctatgactgctatgagcccatggtgagaatggctggagcaacacctgtttttattcccctgagatctaaacctgtttatggaaaaagatggtctagttctgactggacattagatcctcaagaactggaaagtaaatttaattccaaaaccaaagctattatactaaatactccacataacccacttggcaaggtgtataacagagaggaactgcaagtaattgctgacctttgcatcaaatatgacacactctgcatcagcgatgaggtttatgaatggcttgtatattctggaaataagcacttaaaaatagctacttttccaggtatgtgggagagaacaataacaataggaagtgctggaaagactttcagtgtaactggctggaagcttggctggtccattggtccaaatcatttgataaaacatttacagacagttcaacaaaacacgatttatacttgtgcaactcctttacaggaagccttggctcaagctttctggattgacatcaagcgcatggatgacccagaatgttactttaattctttgccaaaagagttagaagtaaaaagagatcggatggtacgtttacttgaaagtgttggcctaaaacccatagttcctgatggaggatacttcatcatcgctgatgtgtctttgctagatccagacctctctgatatgaagaataatgagccttatgactataagtttgtgaaatggatgactaaacataagaaactatcagccatccccgtttcagcattctgtaactcagagactaaatcacagtttgagaagtttgtgcgtttttgcttcattaaaaaagacagcacactggatgctgctgaagaaatcatcaaggcatggagtgtacagaagtcttgatttgtgcagaatggattaatgtttctgttagatgacctagtatggaattgttacttagtgctgccacctgctggatgttaaaaggtatttcagtacaactggaatttaaatatttccattgtttttccaaagcagttaacccaactcctaacaacattttcgggggatctgaccttttttttccagttgaaatgtattaacacaccttccacaatcattttataagagtcagcataacatagtggataagaaatgtgagatgtttaacctctcagtaactcggttctctcattataaaataggaataaaatcagtacctgtttcatatgaaggtcgtttctgagaattaaatggactaatgtatgcaaaaagcctggcaaacaataaacactcatctgacttta

SEQ ID NO: 367108 - DNA, 1810 bp, Homo sapiens
aaaaaacacccctcatccagtctcttccagcctagagatcctggcctacccctccgccaaagcgcgcactgagtgcaaaccccagagtcaatccctgtcccggctccgccccccgcgtccgaatcccgcccagccgggccctcaagcccagtcgggactcgagcctagggaggcgaggttcccgcaccggatagaaaatgtcactgaaattcacaaatgcaaaacggattgaaggacttgatagtaatgtgtggattgaatttaccaaattggctgcagacccttctgttgtgaatcttggccaaggctttccagatatatcccctcctacatatgtaaaagaagaattatcaaagattgcagcaatcgatagcctgaatcagtatacacgaggctttggccatccatcacttgtgaaagctctgtcctatctgtatgaaaagctttatcctctttttaacaccattcaagcattaattgatgagggagatgaagtcatactaatagtgcctttctatgactgctatgagcccatggtgagaatggctggagcaacacctgtttttattcccctgagatctaaacctgtttatggaaaaagatggtctagttctgactggacattagatcctcaagaactggaaagtaaatttaattccaaaaccaaagctattatactaaatactccacataacccacttggcaaggtgtataacagagaggaactgcaagtaattgctgacctttgcatcaaatatgacacactctgcatcagcgatgaggtttatgaatggcttgtatattctggaaataagcacttaaaaatagctacttttccaggtatgtgggagagaacaataacaataggaagtgctggaaagactttcagtgtaactggctggaagcttggctggtccattggtccaaatcatttgataaaacatttacagacagttcaacaaaacacgatttatacttgtgcaactcctttacaggaagccttggctcaagctttctggattgacatcaagcgcatggatgacccagaatgttactttaattctttgccaaaagagttagaagtaaaaagagatcggatggtacgtttacttgaaagtgttggcctaaaacccatagttcctgatggaggatacttcatcatcgctgatgtgtctttgctagatccagacctctctgatatgaagaataatgagccttatgactataagtttgtgaaatggatgactaaacataagaaactatcagccatccccgtttcagcattctgtaactcagagactaaatcacagtttgagaagtttgtgcgtttttgcttcattaaaaaagacagcacactggatgctgctgaagaaatcatcaaggcatggagtgtacagaagtcttgatttgtgcagaatggattaatgtttctgttagatgacctagtatggaattgttacttagtgctgccacctgctggatgttaaaaggtatttcagtacaactggaatttaaatatttccattgtttttccaaagcagttaacccaactcctaacaacattttcgggggatctgaccttttttttccagttgaaatgtattaacacaccttccacaatcattttataagagtcagcataacatagtggataagaaatgtgagatgtttaacctctcagtaactcggttctctcattataaaataggaataaaatcagtacctgtttcatatgaaggtcgtttctgagaattaaatggactaatgtatgcaaaaagcctggcaaacaataaacactcatctgacttta

SEQ ID NO: 367109 - DNA, 1789 bp, Homo sapiens
aaaaaacacccctcatccagtctcttccagcctagagatcctggcctacccctccgccaaagcgcgcactgagtgcaaaccccagagtcaatccctgtcccggctccgccccccgcgtccgaatcccgcccagccgggccctcaagcccagtcgggactcgagcctagggaggcgaggttcccgcaccggatagaaaatgtcactgaaattcacaaatgcaaaacggattgaaggacttgatagtaatgtgtggattgaatttaccaaattggctgcagacccttctgttgtgaatcttggccaaggctttccagatatatcccctcctacatatgtaaaagaagaattatcaaagattgcagcaatcgatagcctgaatcagtatacacgaggctttggccatccatcacttgtgaaagctctgtcctatctgtatgaaaagctttatcaaaagcaaattgattcaaataaagaaatccttgtgacagtaggagcatatggatctctttttaacaccattcaagcattaattgatgagggagatgaagtcatactaatagtgcctttctatgactgctatgagcccatggtgagaatggctggagcaacacctgtttttattcccctgagatctaaacctgtttatggaaaaagatggtctagttctgactggacattagatcctcaagaactggaaagtaaatttaattccaaaaccaaagctattatactaaatactccacataacccacttggcaaggtgtataacagagaggaactgcaagtaattgctgacctttgcatcaaatatgacacactctgcatcagcgatgaggtttatgaatggcttgtatattctggaaataagcacttaaaaatagctacttttccaggtatgtgggagagaacaataacaataggaagtgctggaaagactttcagtgtaactggctggaagcttggctggtccattggtccaaatcatttgataaaacatttacagacagttcaacaaaacacgatttatacttgtgcaactcctttacaggaagccttggctcaagctttctggattgacatcaagcgcatggatgacccagaatgttactttaattctttgccaaaagagttagaagtaaaaagagatcggatggtacgtttacttgaaagtgttggcctaaaacccatagttcctgatggaggatacttcatcatcgctgatgtgtctttgctagatccagacctctctgatatgaagaataatgagccttatgactataagtttgtgaaatggatgactaaacataagaaactatcagccatccccgtttcagcattctgtaactcagagactaaatcacagtttgagaagtttgtgcgtttttgcttcattaaaaaagacagcacactggatgctgctgaagaaatcatcaaggcatggagtgtacagaagtcttgatttgtgcagaatggattaatgtttctgttagatgacctagtatggaattgttacttagtgctgccacctgctggatgttaaaaggtatttcagtacaactggaatttaaatatttccattgtttttccaaagcagttaacccaactcctaacaacattttcgggggatctgaccttttttttccagttgaaatgtattaacacaccttccacaatcattttataagagtcagcataacatagtggataagaaatgtgagatgtttaacctctcagtaactcggttctctcattataaaataggaataaaatcagtacctgtttcatatg

SEQ ID NO: 367110 - DNA, 1819 bp, Homo sapiens
aaaaaacacccctcatccagtctcttccagcctagagatcctggcctacccctccgccaaagcgcgcactgagtgcaaaccccagagtcaatccctgtcccggctccgccccccgcgtccgaatcccgcccagccgggccctcaagcccagtcgggactcgagcctagggaggcgaggttcccgcaccggatagaaaatgtcactgaaattcacaaatgcaaaacggattgaaggacttgatagtaatgtgtggattgaatttaccaaattggctgcagacccttctgttgtgaatcttggccaaggctttccagatatatcccctcctacatatgtaaaagaagaattatcaaagattgcagcaatcgatagcctgaatcagtatacacgaggctttggccatccatcacttgtgaaagctctgtcctatctgtatgaaaagctttatcaaaagcaaattgattcaaataaagaaatccttgtgacagtaggagcatatggatctctttttaacaccattcaagcattaattgatgagggagatgaagtcatactaatagtgcctttctatgactgctatgagcccatgaaacctgtttatggaaaaagatggtctagttctgactggacattagatcctcaagaactggaaagtaaatttaattccaaaaccaaagctattatactaaatactccacataacccacttggcaaggtgtataacagagaggaactgcaagtaattgctgacctttgcatcaaatatgacacactctgcatcagcgatgaggtttatgaatggcttgtatattctggaaataagcacttaaaaatagctacttttccaggtatgtgggagagaacaataacaataggaagtgctggaaagactttcagtgtaactggctggaagcttggctggtccattggtccaaatcatttgataaaacatttacagacagttcaacaaaacacgatttatacttgtgcaactcctttacaggaagccttggctcaagctttctggattgacatcaagcgcatggatgacccagaatgttactttaattctttgccaaaagagttagaagtaaaaagagatcggatggtacgtttacttgaaagtgttggcctaaaacccatagttcctgatggaggatacttcatcatcgctgatgtgtctttgctagatccagacctctctgatatgaagaataatgagccttatgactataagtttgtgaaatggatgactaaacataagaaactatcagccatccccgtttcagcattctgtaactcagagactaaatcacagtttgagaagtttgtgcgtttttgcttcattaaaaaagacagcacactggatgctgctgaagaaatcatcaaggcatggagtgtacagaagtcttgatttgtgcagaatggattaatgtttctgttagatgacctagtatggaattgttacttagtgctgccacctgctggatgttaaaaggtatttcagtacaactggaatttaaatatttccattgtttttccaaagcagttaacccaactcctaacaacattttcgggggatctgaccttttttttccagttgaaatgtattaacacaccttccacaatcattttataagagtcagcataacatagtggataagaaatgtgagatgtttaacctctcagtaactcggttctctcattataaaataggaataaaatcagtacctgtttcatatgaaggtcgtttctgagaattaaatggactaatgtatgcaaaaagcctggcaaacaataaacactcatctgacttta

SEQ ID NO: 367111 - DNA, 2054 bp, Homo sapiens
aaaaaacacccctcatccagtctcttccagcctagagatcctggcctacccctccgccaaagcgcgcactgagtgcaaaccccagagtcaatccctgtcccggctccgccccccgcgtccgaatcccgcccagccgggccctcaagcccagtcgggactcgagcctagggaggcgaggttcccgcaccggatagaaaatgtcactgaaattcacaaatgcaaaacggattgaaggacttgatagtaatgtgtggattgaatttaccaaattggctgcagacccttctgttgtgaatcttggccaaggctttccagatatatcccctcctacatatgtaaaagaagaattatcaaagattgcagcaatcgatagcctgaatcagtatacacgaggctttggccatccatcacttgtgaaagctctgtcctatctgtatgaaaagctttatcaaaagcaaattgattcaaataaagaaatccttgtgacagtaggagcatatggatctctttttaacaccattcaagcattaattgatgagggagatgaagtcatactaatagtgcctttctatgactgctatgagcccatggtgagaatggctggagcaacacctgtttttattcccctgagatctaaacctgtttatggaaaaagatggtctagttctgactggacattagatcctcaagaactggaaagtaaatttaattccaaaaccaaagctattatactaaatactccacataacccacttggcaaggtgtataacagagaggaactgcaagtaattgctgacctttgcatcaaatatgacacactctgcatcagcgatgaggtttatgaatggcttgtatattctggaaataagcacttaaaaatagctacttttccaggtatgtgggagagaacaataacaataggaagtgctggaaagactttcagtgtaactggctggaagcttggctggtccattggtccaaatcatttgataaaacatttacagacagttcaacaaaacacgatttatacttgtgcaactcctttacaggaagccttggctcaagctttctggattgacatcaagcgcatggatgacccagaatgttactttaattctttgccaaaagagttagaagtaaaaagagatcggatggtacgtttacttgaaagtgttggcctaaaacccatagttcctgatggaggatacttcatcatcgctgatgtgtctttgctagatccagacctctctgatatgaagaataatgagccttatgactataagtttgtgaaatggatgactaaacataagaaactatcagccatccccgtttcagcattctgtaactcagagactaaatcacagtttgagaagtttgtgcgtttttgcttcattaaaaaagacagcacactggatgctgctgaagaaatcatcaaggcatggagtgtacagaagtcttgatttgtgcagaatggattaatgtttctgttagatgacctagtatggaattgttacttagtgctgccacctgctggatgttaaaagaatgtagaagcgaggcctggaggtgaagcagccatcttccattcatgccacagctagcatgagggtgaatgtctatataataaggatggcagagcagaaagatgaaaagagactggaactctggaagcagtttgaagccactgtacctacccctaccttgtaatggatgagacaaataaacccctatttgtttaagccactgtagtacagttctctgttatttacagatgaatgcattactgatataggttacatggtacaaagatcaaatttctcttctagaagataagttgacctgaggaaaagtcctgcaatgcacagagagaagccagtcagaaggctccaggaccccaggaaaaagacagtgaggccttgaaggatttagtatgagaaaaaggtaaattatcacaaatttttgtcatttgtaaattttttccataattcttatgatgaaaataattatataaccacacacttaccaaatattaaattaaaaattatttccagata

SEQ ID NO: 367112 - DNA, 217 bp, Homo sapiens
ctttctggattgacatcaagcgcatggatgacccagaatgttactttaattctttgccaaaagagttagaagtaaaaagagatcggatggtacgtttacttgaaagtgttggcctaaaacccatagttcctgatggaggatacttcatcatcgctgatgtgtctttgctaggtttgtaaaggcttttattatttcaactatacggaaacttatgtgt

SEQ ID NO: 367113 - DNA, 678 bp, Homo sapiens
gattgcatttggagatttcctgtatatctctatttgtctagttgtctttttaaaatatttttaacataagtaatacactaaggtgagtcacaaaatcttcagctagccttacaatatcagacatgttaaccatagttatagctagttcctgtgaagtaatattagcagcagttaatgttgacagggcttatttttccatttaacaggtgtgagcataagacttaggttttcttaggctcttaagcagaactacagcccagttatttctgtttatcttctttgttagtctttttctagttttttttctgttcctactgcaggaaagcatttgttggtaatttattcagtttcctttgccatgactttctttgatgtttttttccttattaggttattcgtttgtaagacagtaaacatgacttaattgaattaaattatatcttcattcttcatgcttagaaacctgtttatggaaaaagatggtctagttctgactggacattagatcctcaagaactggaaagtaaatttaattccaaaaccaaagctattatactaaatactccacataacccacttggcaaggtaagcaagtctcatctccttatacagtcttctgacctatcattttctcacatgttgaataattggctgtgctctttcctttattatgtgtag

SEQ ID NO: 367114 - DNA, 1041 bp, Homo sapiens
  misc_feature (849)..(849): n is a, c, g, or t
  misc_feature (851)..(852): n is a, c, g, or t
  misc_feature (856)..(856): n is a, c, g, or t
  misc_feature (861)..(861): n is a, c, g, or t
  misc_feature (870)..(870): n is a, c, g, or t
aaaaaacacccctcatccagtctcttccagcctagagatcctggcctacccctccgccaaagcgcgcactgagtgcaaaccccagagtcaatccctgtcccggctccgccccccgcgtccgaatcccgcccagccgggccctcaagcccagtcgggactcgagcctagggaggcgaggttcccgcaccggatagaaaatgtcactgaaattcacaaatgcaaaacggattgaaggacttgatagtaatgtgtggattgaatttaccaaattggctgcagacccttctgttgtgaatcttggccaaggctttccagatatatcccctcctacatatgtaaaagaagaattatcaaagattgcagcaatcgatagcctgaatcagtatacacgaggctttggccatccatcacttgtgaaagctctgtcctatctgtatgaaaagctttatcaaaagcaaattgattcaaataaagaaatccttgtgacagtaggagcatatggatctctttttaacaccattcaagcattaattgatgagggagatgaagtcatactaatagtgcctttctatgactgctatgagcccatggtgagaatggctggagcaacacctgtttttattcccctgagatctaaacctgtttatggaaaaagatggtctagttctgactggacattagatcctcaagaactggaaagtaaatttaattccaaaaccaaagctattatactaaatactccacataacccacttggcaaggtgtataacagagaggaactgcaagtaattgctgacctttgcatcaaatatgacacactctgcatcagcgatgaggtttatgaatggngnnttcnggaanagctaaaangtactccaggtggggcgaacaacaggcatcgggaaataggagcgaactgtgcaggccaatggaaattcagggaaaacgtatgtgacacttagaacgtaagtggaaaggggaagttttaaagagagaggcagaagcaggatccgctcaacttggtcacctggtattctgtgg

SEQ ID NO: 367115 - DNA, 1891 bp, Homo sapiens
cagctgctaccgctcggagtacgggatgatcgcggcggacacaccgtcatcgcgcgccctagagatcctggcctacccctccgccaaagcgcgcactgagtgcaaaccccagagtcaatccctgtcccggctccgccccccgcgtccgaatcccgcccagccgggccctcaagcccagtcgggactcgagcctagggaggcgaggttcccgcaccggatagaaaatgtcactgaaattcacaaatgcaaaacggattgaaggacttgatagtaatgtgtggattgaatttaccaaattggctgcagacccttctgttgtgaatcttggccaaggctttccagatatatcccctcctacatatgtaaaagaagaattatcaaagattgcagcaatcgatagcctgaatcagtatacacgaggctttggccatccatcacttgtgaaagctctgtcctatctgtatgaaaagctttatcaaaagcaaattgattcaaataaagaaatccttgtgacagtaggagcatatggatctctttttaacaccattcaagcattaattgatgagggagatgaagtcatactaatagtgcctttctatgactgctatgagcccatggtgagaatggctggagcaacacctgtttttattcccctgagatctaaacctgtttatggaaaaagatggtctagttctgactggacattagatcctcaagaactggaaagtaaatttaattccaaaaccaaagctattatactaaatactccacataacccacttggcaaggtgtataacagagaggaactgcaagtaattgctgacctttgcatcaaatatgacacactctgcatcagcgatgaggtttatgaatggcttgtatattctggaaataagcacttaaaaatagctacttttccaggtatgtgggagagaacaataacaataggaagtgctggaaagactttcagtgtaactggctggaagcttggctggtccattggtccaaatcatttgataaaacatttacagacagttcaacaaaacacgatttatacttgtgcaactcctttacaggaagccttggctcaagctttctggattgacatcaagcgcatggatgacccagaatgttactttaattctttgccaaaagagttagaagtaaaaagagatcggatggtacgtttacttgaaagtgttggcctaaaacccatagttcctgatggaggatacttcatcatcgctgatgtgtctttgctagatccagacctctctgatatgaagaataatgagccttatgactataagtttgtgaaatggatgactaaacataagaaactatcagccatccccgtttcagcattctgtaactcagagactaaatcacagtttgagaagtttgtgcgtttttgcttcattaaaaaagacagcacactggatgctgctgaagaaatcatcaaggcatggagtgtacagaagtcttgatttgtgcagaatggattaatgtttctgttagatgacctagtatggaattgttacttagtgctgccacctgctggatgttaaaaggtatttcagtacaactggaatttaaatatttccattgtttttccaaagcagttaacccaactcctaacaacattttcgggggatctgaccttttttttccagttgaaatgtattaacacaccttccacaatcattttataagagtcagcataacatagtggataagaaatgtgagatgtttaacctctcagtaactcggttctctcattataaaataggaataaaatcagtacctgtttcatatgaaggtcgtttctgagaattaaatggactaatgtatgcaaaaagcctggcaaacaataaacactcatctgacttta

SEQ ID NO: 367116 - DNA, 1790 bp, Homo sapiens
aaaaaacacccctcatccagtctcttccagcctagagatcctggcctacccctccgccaaagcgcgcactgagtgcaaaccccagagtcaatccctgtcccggctccgccccccgcgtccgaatcccgcccagccgggccctcaagcccagtcgggactcgagcctagggaggcgaggttcccgcaccggatagcatgtttttggcccagaggagcctctgctctcttagcggtagagcaaaattcctgaagacaatttcttcttccaaaatcctcggattctctacttctgctaaaatgtcactgaaattcacaaatgcaaaacggattgaaggacttgatagtaatgtgtggattgaatttaccaaattggctgcagacccttctgttgtgaatcttggccaaggctttccagatatatcccctcctacatatgtaaaagaagaattatcaaagattgcagcaatcgatagcgtcatactaatagtgcctttctatgactgctatgagcccatggtgagaatggctggagcaacacctgtttttattcccctgagatctaaacctgtttatggaaaaagatggtctagttctgactggacattagatcctcaagaactggaaagtaaatttaattccaaaaccaaagctattatactaaatactccacataacccacttggcaaggtgtataacagagaggaactgcaagtaattgctgacctttgcatcaaatatgacacactctgcatcagcgatgaggtttatgaatggcttgtatattctggaaataagcacttaaaaatagctacttttccaggtatgtgggagagaacaataacaataggaagtgctggaaagactttcagtgtaactggctggaagcttggctggtccattggtccaaatcatttgataaaacatttacagacagttcaacaaaacacgatttatacttgtgcaactcctttacaggaagccttggctcaagctttctggattgacatcaagcgcatggatgacccagaatgttactttaattctttgccaaaagagttagaagtaaaaagagatcggatggtacgtttacttgaaagtgttggcctaaaacccatagttcctgatggaggatacttcatcatcgctgatgtgtctttgctagatccagacctctctgatatgaagaataatgagccttatgactataagtttgtgaaatggatgactaaacataagaaactatcagccatccccgtttcagcattctgtaactcagagactaaatcacagtttgagaagtttgtgcgtttttgcttcattaaaaaagacagcacactggatgctgctgaagaaatcatcaaggcatggagtgtacagaagtcttgatttgtgcagaatggattaatgtttctgttagatgacctagtatggaattgttacttagtgctgccacctgctggatgttaaaaggtatttcagtacaactggaatttaaatatttccattgtttttccaaagcagttaacccaactcctaacaacattttcgggggatctgaccttttttttccagttgaaatgtattaacacaccttccacaatcattttataagagtcagcataacatagtggataagaaatgtgagatgtttaacctctcagtaactcggttctctcattataaaataggaataaaatcagtacctgtttcatatgaaggtcgtttctgagaattaaatggactaatgtatgcaaaaagcctggcaaacaataaacactcatctgacttta

SEQ ID NO: 367117 - DNA, 2275 bp, Homo sapiens
aaaaaacacccctcatccagtctcttccagcctagagatcctggcctacccctccgccaaagcgcgcactgagtgcaaaccccagagtcaatccctgtcccggctccgccccccgcgtccgaatcccgcccagccgggccctcaagcccagtcgggactcgagcctagggaggcgaggttcccgcaccggatagaaaatgtcactgaaattcacaaatgcaaaacggattgaaggacttgatagtaatgtgtggattgaatttaccaaattggctgcagacccttctgttgtgaatcttggccaaggctttccagatatatcccctcctacatatgtaaaagaagaattatcaaagattgcagcaatcgatagcctgaatcagtatacacgaggctttggccatccatcacttgtgaaagctctgtcctatctgtatgaaaagctttatcaaaagcaaattgattcaaataaagaaatccttgtgacagtaggagcatatggatctctttttaacaccattcaagcattaattgatgagggagatgaagtcatactaatagtgcctttctatgactgctatgagcccatggtgagaatggctggagcaacacctgtttttattcccctgagatctaaacctgtttatggaaaaagatggtctagttctgactggacattagatcctcaagaactggaaagtaaatttaattccaaaaccaaagctattatactaaatactccacataacccacttggcaaggtgtataacagagaggaactgcaagtaattgctgacctttgcatcaaatatgacacactctgcatcagcgatgaggtttatgaatggcttgtatattctggaaataagcacttaaaaatagctacttttccaggtatgtgggagagaacaataacaataggaagtgctggaaagactttcagtgtaactggctggaagcttggctggtccattggtccaaatcatttgataaaacatttacagacagttcaacaaaacacgatttatacttgtgcaactcctttacaggaagccttggctcaagctttctggattgacatcaagcgcatggatgacccagaatgttactttaattctttgccaaaagagttagaagtaaaaagagatcggatggtacgtttacttgaaagtgttggcctaaaacccatagttcctgatggaggatacttcatcatcgctgatgtgtctttgctagatccagacctctctgatatgaagaataatgagccttatgactataagtttgtgaaatggatgactaaacataagaaactatcagccatccccgtttcagcattctgtaactcagagactaaatcacagtttgagaagtttgtgcgtttttgcttcattaaaaaagacagcacactggatgctgctgaagaaatcatcaaggcatggagtgtacagaagtcttgatttgtgcagaatggattaatgtttctgttagatgacctagtatggaattgttacttagtgctgccacctgctggatgttaaaaggtatttcagtacaactggaatttaaatatttccattgtttttccaaagcagttaacccaactcctaacaacattttcgggggatctgaccttttttttccagttgaaatgtattaacacaccttccacaatcattttataagagtcagcataacatagtggataagaaatgtgagatgtttaacctctcagtaactcggttctctcattataaaataggaataaaatcagtacctgtttcatatgaaggtcgtttctgagaattaaatggactaatgtatgcaaaaagcctggcaaacaataaacactcatctgactttaaaacaaaaaaagaaaaaaccaaaaaaaaaaaacaaaaaagaaaaaaaacagaaacaaagaaaaaaaacaagaaccgaacacaggacagggcagaaaaaaagggggggggcccaaaagataatgctcacagcagagggcaacaaaataatgccgccacaacaagatttgaacgaaaaaggagccccccacaaaagagaggacataacaacaaagggaggaggcaggcgtaaaaaacaggcagggagaggaaaaacacgtataggcgaatcactcgtggaagaacaccattctcgggggagagaaaaaagaggacaacaccccgccagagattagcgccagcgggataaacaagagagagataggggtacaacccggtcatacgcgagaaaaaaagggacgagaactatacaa

SEQ ID NO: 367118 - DNA, 425 bp, Homo sapiens
aaaaaacacccctcatccagtctcttccagcctagagatcctggcctacccctccgccaaagcgcgcactgagtgcaaaccccagagtcaatccctgtcccggctccgccccccgcgtccgaatcccgcccagccgggccctcaagcccagtcgggactcgagcctagggaggcgaggttcccgcaccggatagcatgtttttggcccagaggagcctctgctctcttagcggtagagcaaaattcctgaagacaatttcttcttccaaaatcctcggattctctacttctgctatgtatatgccatgaagccactgtcaccatcaacatgcagaacacttccatcgcccccaaaagattcctcaagttcctttgcagtccatccctcacgctgctgatttgtctttgtcaccatatattagttt

SEQ ID NO: 367119 - DNA, 329 bp, Homo sapiens
agttttcctgctcttcttttcgtggtccgaaagaaccagtaaatctacccttaggctggggcgcggttctcacgcttgtaatcccagcactttgggatgccgaggcgggcagaatgcttgagtccaggagttcgagaccagcctggatgacatggtaaaacctcatctccacaaaaaaatacaaaaattagctaggtgtggtagtgtgcacctgttatcccagctgaggtaggaggattgctagagcccaagagttgaggctgtagtgagccctgattgcaccacggcactccagcctgggcgacagagtaagaccctgtctaaaaaaa

SEQ ID NO: 367120 - DNA, 763 bp, Homo sapiens
gggtcttctggatccaaatgtgcatattttctcatttgttctcatagtctttttagaaagtttttagggctttcatcttttttctgttttatctaaaatgctcggggaagattctgagcacagggcactgactcctgaattcctttaattatcatttcccttatatctttcatgaatttttagtggactgtgtcgttatcccattgaggatcttgggtcgggaatttctggtctacaatgggaacgttttggctggataggtatttacgttcccaaactctcatagcagtcctgcaaatcaactgccttatatataatactccaatattacctgtaaagttgtcagatgtgtcataccggctcatacaagatcttttgtatcattttataaaacgatacaaaagctgcaaagccaccagcctgcctgcttcccttggagaagttgggacttcctgacaactgcacaaactcacgtgggggatttcaatatcccaaagcatgcagattcctggtgtggctggaattggtgctggggtgctgcgaaagccaggtttgaagcaggaagacaaaaaaaccactcacctgtgtcagcctcgagtgctgaagaacaaccgtgtgtgggccttcaaccctgtctgggtgggttctggacagtgggtggggacccggcgggagaagggaaaggtcgttgagggggcagggcatgaaaactgtcgctggagctgggcaagagggtggaggctgctttggaagctgggcctgg

SEQ ID NO: 367121 - DNA, 407 bp, Homo sapiens
aatgacagcaatgacagccttttcttgaatccgttagtaattgactgaacccttgcccctggcttaggggactcagaaataaactagatggctgaggtccctggccttgtggagcgttgttctagtaacggaaacagttataagtgagcaaaaacgtaacttggggtagttataagtaccagacagaaaaaaaggaaagcataaagagttaaaggatgcttgcaggagaggggagctgcttttctagctggctgccttgcccctgtgtctctgggctgcctgccattcctgcaatccagcatggctcagtatcataatcctcttttataaacgaaaataaggatctcaaagaggcttaaagacctctccatagtcactcagctatgaagcacagagctggggtttgg

SEQ ID NO: 367122 - DNA, 4605 bp, Homo sapiens
cccttccgctcccggagcgcgtgcgccctcttactcggctccccttggtttcctggggtcctgccccttcaagctggggcgggagcggaggaccccgctctcaggggttgccggaccatgcgttgggggctgcgccctcgcgggccgggcgcggccgccctggccactgcccgaagtttgtgggggacgccccgccttccctgcagcccgggatggcaaggggcgacgaagaggcttctggtgcggtcggtctccggggccagtaaccaccagccgaactcgaatagtggcagataccgggacacggtgctgctgccgcagacgagcttccccatgaagctgctgggccgccagcagccggacacggagctggagatccagcagaaatgtggattttcagaactttattcatggcaaagagaaagaaaagtaaagacagaattttgccttcatgatggacctccttatgcaaacggtgaccctcatgttggacatgctttaaataagattttgaaagacatagccaatcgattccatatgatgaatggctccaaaatacattttgtgcccggctgggattgtcatgggttgcccattgaaataaaagtattatcagaacttggtagagaagctcagaatctttcagctatggaaattagaaagaaagctagatcatttgctaaagcagccattgagaaacagaaatcagcatttattcgttggggaataatggcagattggaataattgctactatacatttgatgggaagtatgaagccaaacagttgagaactttttaccaaatgtatgataagggcttggtttatcgatcttacaaacctgtgttttggtctccgtcatctaggactgcattggctgaagcagaacttgaatataatcctgagcatgtcagtcgttcaatatatgtaaaatttcctctcttaaagccttctccaaaattggcatctcttatagatggttcatctcctgttagtattttggtctggaccacacaaccttggacgattccagccaatgaagctgtttgctatatgcctgaatcaaagtatgctgttgtgaaatgttctaagtctggagacctctacgtactggcggcagataaagtagcatctgttgcttctactttggaaacaacatttgagactatttcaacactttcaggtgtagatttggaaaatggtacttgcagtcatccattaattcctgataaagcctctcctcttttacctgcaaatcatgtgaccatggcaaaaggaacgggattggttcacacagccccagctcatggtatggaagactacggtgtagcgtctcagcacaacctgcccatggattgtctagtggacgaagatggagttttcacagatgttgcaggtcctgaacttcaaaacaaggctgtccttgaagagggaactgatgtggttataaagatgcttcagactgcaaagaatttgttgaaagaggagaaattggtgcatagctatccgtatgactggaggaccaagaaacctgtggttattcgtgccagcaagcagtggtttataaacatcacggatattaagactgcagccaaggaattgttaaaaaaggtgaaatttattcctggatcagcactgaatggcatggttgaaatgatggacaggcggccatattggtgtatatcaaggcaaagagtttggggtgttccaattcctgtgtttcatcataagaccaaggatgaatacttgatcaacagccaaaccactgagcatattgttaaactagtggaacaacacggcagtgatatctggtggactcttccccctgaacaacttcttccaaaagaagtcttatctgaggttggtggccctgatgccttggaatatgtgccaggtcaggatattttggacatctggtttgatagcggaacttcatggtcttatgttcttccaggtcctgaccaaagagcagatttgtacttggaaggaaaagaccagctcgggggttggtttcagtcatccttattaacaagtgtggcagcaaggaagagagcaccttataagacagtgattgttcatggatttacccttggagaaaagggagaaaagatgtccaagtctcttgggaatgtcattcatcctgatgttgtcgttaatggaggacaagatcaaagcaaagagcctccgtatggtgctgatgtccttcgctggtgggtagctgattccaatgtcttcaccgaagttgcaattggcccatccgtgctcaatgctgccagagatgatattagcaagcttaggaatacacttcgctttcttttgggaaatgtggctgatttcaacccagaaacagattccatccctgtaaacgatatgtatgtcatagaccagtacatgctacacttactgcaggatttggcaaacaagattaccgaattatacaaacaatatgattttggaaaagttgttcggctgttacggacgttttataccagagagctctctaacttttatttcagtataatcaaagataggctctattgtgaaaaggaaaatgaccccaaacgacgctcttgtcagactgcattagttgaaattttggatgtaatagttcgttcttttgctcccattcttcctcacctggctgaagaggtgttccagcacataccttatattaaagagcccaagagtgttttccgtactgggtggattagtactagttctatctggaaaaagcccgggttggaagaagctgtggagagtgcgtgtgcaatgcgagactcatttcttggaagcatccctggcaaaaatgcagctgagtacaaggttatcactgtgatagaacctggactgctttttgagataatagagatgctgcagtctgaagagacttccagcacctctcagttgaatgaattaatgatggcttctgagtcaactttactggctcaggaaccacgagagatgactgcagatgtaatcgagcttaaagggaaattcctcatcaacttagaaggtggtgatattcgtgaagagtcttcctataaagtaattgtcatgccgactacgaaagaaaaatgcccccgttgttggaagtatacagcggagtcttcagatacactgtgtcctcgatgtgcagaagttgtcagtggaaaatagtattaacagctcactcgagcaagaaccctcctgacagtactggctagaagtttggatggattatttacaatataggaaagaaagccaagatttaggtaatgagtggatgagtaaatggtggaggatgggagtcaaaatcagaattatagaagaagtatttcctgtaactatagaaagaattatgtatatatacatgcagaaatatatatgtgtgtgtgtatctgtggatggatatatgtatatctcttcctatatatatccatagtggacttattcagaacatagatatgtattcagcttgtcttcaaatacggccaagcagaaaatgttttatattttataaatcatcttttgactctgtatttaaattctatgatactgaaaataaaggcattctggaaaaatactgactgattttggtgcagaagttttgagtatcaagtaaaagaagtatagttttgaaagggaatggcggaggcctgtttcccttaagaggtgaagggtcatttcattcttcccattagtgaacatcagccttttcagaatagctagtttttggggttggatcagaaagaatataatcaccaaatttgttactcaagaaaggaagaaatctcttaatagttagttatacttatgaatgtttaggaaacaacatgaaagctgaaaatttatttcactaatatacataagaagttcacaacaatgaacagacagaaaatagcagtatatacagaatttcactacttacagtacattacaatagagaaagcattttataaacagttcagtattggattaaaatcttttaaggatggctaattctattcagcaggaatctaacttctagacacccagcaaacccattcctatcagggtgagagagggcttttgctgttgctatagtgtactgtaaaaatatttgttccttataaatgaagtggaccacagcaacttctaaatgaacattatattcagtgtaagtctcatattattaaatttcagatttttgactttttagatcgcaattgtttttaaaaagcaatttaaatgtaacagtgtttactttgaccatagatgaagttttataataaaagtaaaactttttttttctgtttgcaaaagtatgaagcattaagaagcatggtgctatatatctctttatctacatttaccctggcccctctagttctgcatctaaacagaacctgtaatgtagaagttatgattatttgaacactttttgttttccttcagcattatacaatataatttaataagatacaaatgcatatttaatgtttgttaatgaagaaagttgtgtgagggtgggcatatatctaggaaaacactactggttactggcttctcatcaataactacaaagtaccacatacctttgtttcagaaaccacccattctacattaaaatctaattcctttatcatc

SEQ ID NO: 367123 - DNA, 1205 bp, Homo sapiens
cgaaggaatcttttttttttgtgcaggaaataaagtcctttttgcgggggattattcagaacagccccgtcagtcaaaaaggagtgtaaccctcctgtagggcattcccaatttcccctaactttttcaaccttcgctctgcgtgtgggaatgtgccgataacaaaaggggggaaataaccctttgcccctacccgtgcccccttttttcgaaaccaattggcctttggaaggtatggccccatccccccggtctacgcagggggcacttggtgtttttttgtgcttgtcccaattaaaaaccggcgaagagtgttccgcacaccttaaaaaaagtgcccaagagggtttccgtatgggggtagaggatttttttttctgtaaaagcccgggtgtaagaatctttgtagtttgcgggtgttttgttattttcaggttttgaagcagcccgggcaaaaaggcagctgtgtataaggtatcactgtttaagaacccggacggccaattgagaaaaaagagatgctgcagtctgaagagacttccagcacctctcagttgaatgaattaatgatggcttctgagtcaactttactggctcaggaaccacgagagatgactgcagatgtaatcgagcttaaagggaaattcctcatcaacttagaaggtggtgatattcgtgaagagtcttcctataaagtaattgtcatgccgactacgaaagaaaaatgcccccgttgttggaagtatacagcggagtcttcagatacactgtgtcctcgatgtgcagaagttgtcagtggaaaatagtattaacagctcactcgagcaagaaccctcctgacagtactggctagaagtttggatggattatttacaatataggaaagaaagccaagatttaggtaatgagtggatgagtaaatggtggaggatgggagtcaaaatcagaattatagaagaagtatttcctgtaactatagaaagaattatgtatatatacatgcagaaatatatatgtgtgtgtgtatctgtggatggatatatgtatatctcttcctatatatatccatagtggacttattcagaacatagatatgtattcagcttgtcttcaaatacggccaagcagaaaatgttttatattttataaatcatcttttgactctgtatttaaattctatgatactgaaaataaaggcattctgg

SEQ ID NO: 367124 - DNA, 3555 bp, Homo sapiens
cccttccgctcccggagcgcgtgcgccctcttactcggctccccttggtttcctggggtcctgccccttcaagctggggcgggagcggaggaccccgctctcaggggttgccggaccatgcgttgggggctgcgccctcgcgggccgggcgcggccgccctggccactgcccgaagtttgtgggggacgccccgccttccctgcagcccgggatggcaaggggcgacgaagaggcttctggtgcggtcggtctccggggccagtaaccaccagccgaactcgaatagtggcagataccgggacacggtgctgctgccgcagacgagcttccccatgaagctgctgggccgccagcagccggacacggagctggagatccagcagaaatgtggattttcagaactttattcatggcaaagagaaagaaaagtaaagacagaattttgccttcatgatggacctccttatgcaaacggtgaccctcatgttggacatgctttaaataagattttgaaagacatagccaatcgattccatatgatgaatggctccaaaatacattttgtgcccggctgggattgtcatgggttgcccattgaaataaaagtattatcagaacttggtagagaagctcagaatctttcagctatggaaattagaaagaaagctagatcatttgctaaagcagccattgagaaacagaaatcagcatttattcgttggggaataatggcagattggaataattgctactatacatttgatgggaagtatgaagccaaacagttgagaactttttaccaaatgtatgataagggcttggtttatcgatcttacaaacctgtgttttggtctccgtcatctaggactgcattggctgaagcagaacttgaatataatcctgagcatgtcagtcgttcaatatatgtaaaatttcctctcttaaagccttctccaaaattggcatctcttatagatggttcatctcctgttagtattttggtctggaccacacaaccttggacgattccagccaatgaagctgtttgctatatgcctgaatcaaagtatgctgttgtgaaatgttctaagtctggagacctctacgtactggcggcagataaagtagcatctgttgcttctactttggaaacaacatttgagactatttcaacactttcaggtgtagatttggaaaatggtacttgcagtcatccattaattcctgataaagcctctcctcttttacctgcaaatcatgtgaccatggcaaaaggaacgggattggttcacacagccccagctcatggtatggaagactacggtgtagcgtctcagcacaacctgcccatggattgtctagtggacgaagatggagttttcacagatgttgcaggtcctgaacttcaaaacaaggctgtccttgaagagggaactgatgtggttataaagatgcttcagactgcaaagaatttgttgaaagaggagaaattggtgcatagctatccgtatgactggaggaccaagaaacctgtggttattcgtgccagcaagcagtggtttataaacatcacggatattaagactgcagccaaggaattgttaaaaaaggtgaaatttattcctggatcagcactgaatggcatggttgaaatgatggacaggcggccatattggtgtatatcaaggcaaagagtttggggtgttccaattcctgtgtttcatcataagaccaaggatgaatacttgatcaacagccaaaccactgagcatattgttaaactagtggaacaacacggcagtgatatctggtggactcttccccctgaacaacttcttccaaaagaagtcttatctgaggttggtggccctgatgccttggaatatgtgccaggtcaggatattttggacatctggtttgatagcggaacttcatggtcttatgttcttccaggtcctgaccaaagagcagatttgtacttggaaggaaaagaccagctcgggggttggtttcagtcatccttattaacaagtgtggcagcaaggaagagagcaccttataagacagtgattgttcatggatttacccttggagaaaagggagaaaagatgtccaagtctcttgggaatgtcattcatcctgatgttgtcgttaatggaggacaagatcaaagcaaagagcctccgtatggtgctgatgtccttcgctggtgggtagctgattccaatgtcttcaccgaagttgcaattggcccatccgtgctcaatgctgccagagatgatattagcaagcttaggaatacacttcgctttcttttgggaaatgtggctgatttcaacccagaaacagattccatccctgtaaacgatatgtatgtcatagaccagtacatgctacacttactgcaggatttggcaaacaagattaccgaattatacaaacaatatgattttggaaaagttgttcggctgttacggacgttttataccagagagctctctaacttttatttcagtataatcaaagataggctctattgtgaaaaggaaaatgaccccaaacgacgctcttgtcagactgcattagttgaaattttggatgtaatagttcgttcttttgctcccattcttcctcacctggctgaagaggtgttccagcacataccttatattaaagagcccaagagtgttttccgtactgggtggattagtactagttctatctggaaaaagcccgggttggaagaagctgtggagagtgcgtgtgcaatgcgagactcatttcttggaagcatccctggcaaaaatgcagctgagtacaaggttatcactgtgatagaacctggactgctttttgagataatagagatgctgcagtctgaagagacttccagcacctctcagttgaatgaattaatgatggcttctgagtcaactttactggctcaggaaccacgagagatgactgcagatgtaatcgagcttaaagggaaattcctcatcaacttagaaggtggtgatattcgtgaagagtcttcctataaagtaattgtcatgccgactacgaaagaaaaatgcccccgttgttggaagtatacagcggagtcttcagatacactgtgtcctcgatgtgcagaagttgtcagtggaaaatagtattaacagctcactcgagcaagaaccctcctgacagtactggctagaagtttggatggattatttacaatataggaaagaaagccaagatttaggtaatgagtggatgagtaaatggtggaggatgggagtcaaaatcagaattatagaagaagtatttcctgtaactatagaaagaattatgtatatatacatgcagaaatatatatgtgtgtgtgtatctgtggatggatatatgtatatctcttcctatatatatccatagtggacttattcagaacatagatatgtattcagcttgtcttcaaatacggccaagcagaaaatgttttatattttataaatcatcttttgactctgtatttaaattctatgatactgaaaataaaggcattctgg

SEQ ID NO: 367125 - DNA, 4527 bp, Homo sapiens
cccttccgctcccggagcgcgtgcgccctcttactcggctccccttggtttcctggggtcctgccccttcaagctggggcgggagcggaggaccccgctctcaggggttgccggaccatgcgttgggggctgcgccctcgcgggccgggcgcggccgccctggccactgcccgaagtttgtgggggacgccccgccttccctgcagcccgggatggcaaggggcgacgaagaggcttctggtgcggtcggtctccggggccagtaaccaccagccgaactcgaatagtggcagataccgggacacggtgctgctgccgcagacgagcttccccatgaagctgctgggccgccagcagccggacacggagctggagatccagcagaaatgtggattttcagaactttattcatggcaaagagaaagaaaagtaaagacagaattttgccttcatgatggacctccttatgcaaacggtgaccctcatgttggacatgctttaaataagattttgaaagacatagccaatcgattccatatgatgaatggctccaaaatacattttgtgcccggctgggattgtcatgggttgcccattgaaataaaagtattatcagaacttggtagagaagctcagaatctttcagctatggaaattagaaagaaagctagatcatttgctaaagcagccattgagaaacagaaatcagcatttattcgttggggaataatggcagattggaataattgctactatacatttgatgggaagtatgaagccaaacagttgagaactttttaccaaatgtatgataagggcttggtttatcgatcttacaaacctgtgttttggtctccgtcatctaggactgcattggctgaagcagaacttgaatataatcctgagcatgtcagtcgttcaatatatgtaaaatttcctctcttaaagccttctccaaaattggcatctcttatagatggttcatctcctgttagtattttggtctggaccacacaaccttggacgattccagccaatgaagctgtttgctatatgcctgaatcaaagtatgctgttgtgaaatgttctaagtctggagacctctacgtactggcggcagataaagtagcatctgttgcttctactttggaaacaacatttgagactatttcaacactttcaggtgtagatttggaaaatggtacttgcagtcatccattaattcctgataaagcctctcctcttttacctgcaaatcatgtgaccatggcaaaaggaacgggattggttcacacagccccagctcatggtatggaagactacggtgtagcgtctcagcacaacctgcccatggattgtctagtggacgaagatggagttttcacagatgttgcaggtcctgaacttcaaaacaaggctgtccttgaagagggaactgatgtggttataaagatgcttcagactgcaaagaatttgttgaaagaggagaaattggtgcatagctatccgtatgactggaggaccaagaaacctgtggttattcgtgccagcaagcagtggtttataaacatcacggatattaagactgcagccaagtggtgtatatcaaggcaaagagtttggggtgttccaattcctgtgtttcatcataagaccaaggatgaatacttgatcaacagccaaaccactgagcatattgttaaactagtggaacaacacggcagtgatatctggtggactcttccccctgaacaacttcttccaaaagaagtcttatctgaggttggtggccctgatgccttggaatatgtgccaggtcaggatattttggacatctggtttgatagcggaacttcatggtcttatgttcttccaggtcctgaccaaagagcagatttgtacttggaaggaaaagaccagctcgggggttggtttcagtcatccttattaacaagtgtggcagcaaggaagagagcaccttataagacagtgattgttcatggatttacccttggagaaaagggagaaaagatgtccaagtctcttgggaatgtcattcatcctgatgttgtcgttaatggaggacaagatcaaagcaaagagcctccgtatggtgctgatgtccttcgctggtgggtagctgattccaatgtcttcaccgaagttgcaattggcccatccgtgctcaatgctgccagagatgatattagcaagcttaggaatacacttcgctttcttttgggaaatgtggctgatttcaacccagaaacagattccatccctgtaaacgatatgtatgtcatagaccagtacatgctacacttactgcaggatttggcaaacaagattaccgaattatacaaacaatatgattttggaaaagttgttcggctgttacggacgttttataccagagagctctctaacttttatttcagtataatcaaagataggctctattgtgaaaaggaaaatgaccccaaacgacgctcttgtcagactgcattagttgaaattttggatgtaatagttcgttcttttgctcccattcttcctcacctggctgaagaggtgttccagcacataccttatattaaagagcccaagagtgttttccgtactgggtggattagtactagttctatctggaaaaagcccgggttggaagaagctgtggagagtgcgtgtgcaatgcgagactcatttcttggaagcatccctggcaaaaatgcagctgagtacaaggttatcactgtgatagaacctggactgctttttgagataatagagatgctgcagtctgaagagacttccagcacctctcagttgaatgaattaatgatggcttctgagtcaactttactggctcaggaaccacgagagatgactgcagatgtaatcgagcttaaagggaaattcctcatcaacttagaaggtggtgatattcgtgaagagtcttcctataaagtaattgtcatgccgactacgaaagaaaaatgcccccgttgttggaagtatacagcggagtcttcagatacactgtgtcctcgatgtgcagaagttgtcagtggaaaatagtattaacagctcactcgagcaagaaccctcctgacagtactggctagaagtttggatggattatttacaatataggaaagaaagccaagatttaggtaatgagtggatgagtaaatggtggaggatgggagtcaaaatcagaattatagaagaagtatttcctgtaactatagaaagaattatgtatatatacatgcagaaatatatatgtgtgtgtgtatctgtggatggatatatgtatatctcttcctatatatatccatagtggacttattcagaacatagatatgtattcagcttgtcttcaaatacggccaagcagaaaatgttttatattttataaatcatcttttgactctgtatttaaattctatgatactgaaaataaaggcattctggaaaaatactgactgattttggtgcagaagttttgagtatcaagtaaaagaagtatagttttgaaagggaatggcggaggcctgtttcccttaagaggtgaagggtcatttcattcttcccattagtgaacatcagccttttcagaatagctagtttttggggttggatcagaaagaatataatcaccaaatttgttactcaagaaaggaagaaatctcttaatagttagttatacttatgaatgtttaggaaacaacatgaaagctgaaaatttatttcactaatatacataagaagttcacaacaatgaacagacagaaaatagcagtatatacagaatttcactacttacagtacattacaatagagaaagcattttataaacagttcagtattggattaaaatcttttaaggatggctaattctattcagcaggaatctaacttctagacacccagcaaacccattcctatcagggtgagagagggcttttgctgttgctatagtgtactgtaaaaatatttgttccttataaatgaagtggaccacagcaacttctaaatgaacattatattcagtgtaagtctcatattattaaatttcagatttttgactttttagatcgcaattgtttttaaaaagcaatttaaatgtaacagtgtttactttgaccatagatgaagttttataataaaagtaaaactttttttttctgtttgcaaaagtatgaagcattaagaagcatggtgctatatatctctttatctacatttaccctggcccctctagttctgcatctaaacagaacctgtaatgtagaagttatgattatttgaacactttttgttttccttcagcattatacaatataatttaataagatacaaatgcatatttaatgtttgttaatgaagaaagttgtgtgagggtgggcatatatctaggaaaacactactggttactggcttctcatcaataactacaaagtaccacatacctttgtttcagaaaccacccattctacattaaaatctaattcctttatcatc

SEQ ID NO: 367126 - DNA, 2715 bp, Homo sapiens
agctgtaatagaggaaacagacatgaccagggaagagattaggtatgagcatttgtgcattgaacaagattgcagagcacgctctttctttttccagttttgtttttagatacagtctaatttgagattgttagcccgcatttcattacagtgctagtatagtttgtacttacattgtgctcaaaaatatctgaataggagctttacctaaaacatttgttcggctaattggaattgaaagccattgtgtttatatatttttttctcaatgaaaaggatcaaagcaaagagcctccgtatggtgctgatgtccttcgctggtgggtagctgattccaatgtcttcaccgaagttgcaattggcccatccgtgctcaatgctgccagagatgatattagcaagcttaggaatacacttcgctttcttttgggaaatgtggctgatttcaacccagaaacagattccatccctgtaaacgatatgtatgtcatagaccagtacatgctacacttactgcaggatttggcaaacaagattaccgaattatacaaacaatatgattttggaaaagttgttcggctgttacggacgttttataccagagagctctctaacttttatttcagtataatcaaagataggctctattgtgaaaaggaaaatgaccccaaacgacgctcttgtcagactgcattagttgaaattttggatgtaatagttcgttcttttgctcccattcttcctcacctggctgaagaggtgttccagcacataccttatattaaagagcccaagagtgttttccgtactgggtggattagtactagttctatctggaaaaagcccgggttggaagaagctgtggagagtgcgtgtgcaatgcgagactcatttcttggaagcatccctggcaaaaatgcagctgagtacaaggttatcactgtgatagaacctggactgctttttgagataatagagatgctgcagtctgaagagacttccagcacctctcagttgaatgaattaatgatggcttctgagtcaactttactggctcaggaaccacgagagatgactgcagatgtaatcgagcttaaagggaaattcctcatcaacttagaaggtggtgatattcgtgaagagtcttcctataaagtaattgtcatgccgactacgaaagaaaaatgcccccgttgttggaagtatacagcggagtcttcagatacactgtgtcctcgatgtgcagaagttgtcagtggaaaatagtattaacagctcactcgagcaagaaccctcctgacagtactggctagaagtttggatggattatttacaatataggaaagaaagccaagatttaggtaatgagtggatgagtaaatggtggaggatgggagtcaaaatcagaattatagaagaagtatttcctgtaactatagaaagaattatgtatatatacatgcagaaatatatatgtgtgtgtgtatctgtggatggatatatgtatatctcttcctatatatatccatagtggacttattcagaacatagatatgtattcagcttgtcttcaaatacggccaagcagaaaatgttttatattttataaatcatcttttgactctgtatttaaattctatgatactgaaaataaaggcattctggaaaaatactgactgattttggtgcagaagttttgagtatcaagtaaaagaagtatagttttgaaagggaatggcggaggcctgtttcccttaagaggtgaagggtcatttcattcttcccattagtgaacatcagccttttcagaatagctagtttttggggttggatcagaaagaatataatcaccaaatttgttactcaagaaaggaagaaatctcttaatagttagttatacttatgaatgtttaggaaacaacatgaaagctgaaaatttatttcactaatatacataagaagttcacaacaatgaacagacagaaaatagcagtatatacagaatttcactacttacagtacattacaatagagaaagcattttataaacagttcagtattggattaaaatcttttaaggatggctaattctattcagcaggaatctaacttctagacacccagcaaacccattcctatcagggtgagagagggcttttgctgttgctatagtgtactgtaaaaatatttgttccttataaatgaagtggaccacagcaacttctaaatgaacattatattcagtgtaagtctcatattattaaatttcagatttttgactttttagatcgcaattgtttttaaaaagcaatttaaatgtaacagtgtttactttgaccatagatgaagttttataataaaagtaaaactttttttttctgtttgcaaaagtatgaagcattaagaagcatggtgctatatatctctttatctacatttaccctggcccctctagttctgcatctaaacagaacctgtaatgtagaagttatgattatttgaacactttttgttttccttcagcattatacaatataatttaataagatacaaatgcatatttaatgtttgttaatgaagaaagttgtgtgagggtgggcatatatctaggaaaacactactggttactggcttctcatcaataactacaaagtaccacatacctttgtttcagaaaccacccattctacattaaaatctaattcctttatcatc

SEQ ID NO: 367127 - DNA, 1869 bp, Homo sapiens
acccattggatggatgaatgtttgacggggaagaggaagggtaggaggatgcatggatgagtggatgagtgtcttctcccctgacaggttatcactgtgatagaacctggactgctttttgagataatagagatgctgcagtctgaagagacttccagcacctctcagttgaatgaattaatgatggcttctgagtcaactttactggctcaggaaccacgagagatgactgcagatgtaatcgagcttaaagggaaattcctcatcaacttagaaggtggtgatattcgtgaagagtcttcctataaagtaattgtcatgccgactacgaaagaaaaatgcccccgttgttggaagtatacagcggagtcttcagatacactgtgtcctcgatgtgcagaagttgtcagtggaaaatagtattaacagctcactcgagcaagaaccctcctgacagtactggctagaagtttggatggattatttacaatataggaaagaaagccaagatttaggtaatgagtggatgagtaaatggtggaggatgggagtcaaaatcagaattatagaagaagtatttcctgtaactatagaaagaattatgtatatatacatgcagaaatatatatgtgtgtgtgtatctgtggatggatatatgtatatctcttcctatatatatccatagtggacttattcagaacatagatatgtattcagcttgtcttcaaatacggccaagcagaaaatgttttatattttataaatcatcttttgactctgtatttaaattctatgatactgaaaataaaggcattctggaaaaatactgactgattttggtgcagaagttttgagtatcaagtaaaagaagtatagttttgaaagggaatggcggaggcctgtttcccttaagaggtgaagggtcatttcattcttcccattagtgaacatcagccttttcagaatagctagtttttggggttggatcagaaagaatataatcaccaaatttgttactcaagaaaggaagaaatctcttaatagttagttatacttatgaatgtttaggaaacaacatgaaagctgaaaatttatttcactaatatacataagaagttcacaacaatgaacagacagaaaatagcagtatatacagaatttcactacttacagtacattacaatagagaaagcattttataaacagttcagtattggattaaaatcttttaaggatggctaattctattcagcaggaatctaacttctagacacccagcaaacccattcctatcagggtgagagagggcttttgctgttgctatagtgtactgtaaaaatatttgttccttataaatgaagtggaccacagcaacttctaaatgaacattatattcagtgtaagtctcatattattaaatttcagatttttgactttttagatcgcaattgtttttaaaaagcaatttaaatgtaacagtgtttactttgaccatagatgaagttttataataaaagtaaaactttttttttctgtttgcaaaagtatgaagcattaagaagcatggtgctatatatctctttatctacatttaccctggcccctctagttctgcatctaaacagaacctgtaatgtagaagttatgattatttgaacactttttgttttccttcagcattatacaatataatttaataagatacaaatgcatatttaatgtttgttaatgaagaaagttgtgtgagggtgggcatatatctaggaaaacactactggttactggcttctcatcaataactacaaagtaccacatacctttgtttcagaaaccacccattctacattaaaatctaattcctttatcatc

SEQ ID NO: 367128 - DNA, 2255 bp, Homo sapiens
cgaaggaatcttttttttttgtgcaggaaataaagtcctttttgcgggggattattcagaacagccccgtcagtcaaaaaggagtgtaaccctcctgtagggcattcccaatttcccctaactttttcaaccttcgctctgcgtgtgggaatgtgccgataacaaaaggggggaaataaccctttgcccctacccgtgcccccttttttcgaaaccaattggcctttggaaggtatggccccatccccccggtctacgcagggggcacttggtgtttttttgtgcttgtcccaattaaaaaccggcgaagagtgttccgcacaccttaaaaaaagtgcccaagagggtttccgtatgggggtagaggatttttttttctgtaaaagcccgggtgtaagaatctttgtagtttgcgggtgttttgttattttcaggttttgaagcagcccgggcaaaaaggcagctgtgtataaggtatcactgtttaagaacccggacggccaattgagaaaaaagagatgctgcagtctgaagagacttccagcacctctcagttgaatgaattaatgatggcttctgagtcaactttactggctcaggaaccacgagagatgactgcagatgtaatcgagcttaaagggaaattcctcatcaacttagaaggtggtgatattcgtgaagagtcttcctataaagtaattgtcatgccgactacgaaagaaaaatgcccccgttgttggaagtatacagcggagtcttcagatacactgtgtcctcgatgtgcagaagttgtcagtggaaaatagtattaacagctcactcgagcaagaaccctcctgacagtactggctagaagtttggatggattatttacaatataggaaagaaagccaagatttaggtaatgagtggatgagtaaatggtggaggatgggagtcaaaatcagaattatagaagaagtatttcctgtaactatagaaagaattatgtatatatacatgcagaaatatatatgtgtgtgtgtatctgtggatggatatatgtatatctcttcctatatatatccatagtggacttattcagaacatagatatgtattcagcttgtcttcaaatacggccaagcagaaaatgttttatattttataaatcatcttttgactctgtatttaaattctatgatactgaaaataaaggcattctggaaaaatactgactgattttggtgcagaagttttgagtatcaagtaaaagaagtatagttttgaaagggaatggcggaggcctgtttcccttaagaggtgaagggtcatttcattcttcccattagtgaacatcagccttttcagaatagctagtttttggggttggatcagaaagaatataatcaccaaatttgttactcaagaaaggaagaaatctcttaatagttagttatacttatgaatgtttaggaaacaacatgaaagctgaaaatttatttcactaatatacataagaagttcacaacaatgaacagacagaaaatagcagtatatacagaatttcactacttacagtacattacaatagagaaagcattttataaacagttcagtattggattaaaatcttttaaggatggctaattctattcagcaggaatctaacttctagacacccagcaaacccattcctatcagggtgagagagggcttttgctgttgctatagtgtactgtaaaaatatttgttccttataaatgaagtggaccacagcaacttctaaatgaacattatattcagtgtaagtctcatattattaaatttcagatttttgactttttagatcgcaattgtttttaaaaagcaatttaaatgtaacagtgtttactttgaccatagatgaagttttataataaaagtaaaactttttttttctgtttgcaaaagtatgaagcattaagaagcatggtgctatatatctctttatctacatttaccctggcccctctagttctgcatctaaacagaacctgtaatgtagaagttatgattatttgaacactttttgttttccttcagcattatacaatataatttaataagatacaaatgcatatttaatgtttgttaatgaagaaagttgtgtgagggtgggcatatatctaggaaaacactactggttactggcttctcatcaataactacaaagtaccacatacctttgtttcagaaaccacccattctacattaaaatctaattcctttatcatc

SEQ ID NO: 367129 - DNA, 2343 bp, Homo sapiens
  misc_feature (2293)..(2293): n is a, c, g, or t
  misc_feature (2306)..(2306): n is a, c, g, or t
cccttccgctcccggagcgcgtgcgccctcttactcggctccccttggtttcctggggtcctgccccttcaagctggggcgggagcggaggaccccgctctcaggggttgccggaccatgcgttgggggctgcgccctcgcgggccgggcgcggccgccctggccactgcccgaagtttgtgggggacgccccgccttccctgcagcccgggatggcaaggggcgacgaagaggcttctggtgcggtcggtctccggggccagtaaccaccagccgaactcgaatagtggcagataccgggacacggtgctgctgccgcagacgagcttccccatgaagctgctgggccgccagcagccggacacggagctggagatccagcagaaatgtggattttcagaactttattcatggcaaagagaaagaaaagtaaagacagaattttgccttcatgatggacctccttatgcaaacggtgaccctcatgttggacatgctttaaataagattttgaaagacatagccaatcgattccatatgatgaatggctccaaaatacattttgtgcccggctgggattgtcatgggttgcccattgaaataaaagtattatcagaacttggtagagaagctcagaatctttcagctatggaaattagaaagaaagctagatcatttgctaaagcagccattgagaaacagaaatcagcatttattcgttggggaataatggcagattggaataattgctactatacatttgatgggaagtatgaagccaaacagttgagaactttttaccaaatgtatgataagggcttggtttatcgatcttacaaacctgtgttttggtctccgtcatctaggactgcattggctgaagcagaacttgaatataatcctgagcatgtcagtcgttcaatatatgtaaaatttcctctcttaaagccttctccaaaattggcatctcttatagatggttcatctcctgttagtattttggtctggaccacacaaccttggacgattccagccaatgaagctgtttgctatatgcctgaatcaaagtatgctgttgtgaaatgttctaagtctggagacctctacgtactggcggcagataaagtagcatctgttgcttctactttggaaacaacatttgagactatttcaacactttcaggtgtagatttggaaaatggtacttgcagtcatccattaattcctgataaagcctctcctcttttacctgcaaatcatgtgaccatggcaaaaggaacgggattggttcacacagccccagctcatggtatggaagactacggtgtagcgtctcagcacaacctgcccatggattgtctagtggacgaagatggagttttcacagatgttgcaggtcctgaacttcaaaacaaggctgtccttgaagagggaactgatgtggttataaagatgcttcagactgcaaagaatttgttgaaagaggagaaattggtgcatagctatccgtatgactggaggaccaagaaacctgtggttattcgtgccagcaagcagtggtttataaacatcacggatattaagactgcagccaaggaattgttaaaaaaggtgaaatttattcctggatcagcactgaatggcatggttgaaatgatggacaggcggccatattggtgtatatcaaggcaaagagtttggggtgttccaattcctgtgtttcatcataagaccaaggatgaatacttgatcaacagccaaaccactgagcatattgttaaactagtggaacaacacggcagtgatatctggtggactcttccccctgaacaacttcttccaaaagaagtcttatctgaggttggtggccctgatgccttggaatatgtgccaggtcaggatattttggacatctggtttgatagcggaacttcatggtcttatgttcttccaggtcctgaccaaagagcagatttgtacttggaaggaaaagaccagctcgggggttggtttcagtcatccttattaacaagtgtggcagcaaggaagagagcaccttataagacagtgattgttcatggatttacccttggagaaaagggagaaaagatgtccaagtctcttgggaatgtcattcatcctgatgttgtcgttaatggaggacaagatcaaagcaaagagcctccgtatggtgctgatgtccttcgctggtgggtagctgattccaatgtcttcaccgaagttgcaattggcccatccgtgctcaatgctgccagagatgatattagcaagntttgggattacanttttggttttcttttttgggaaaatttgggctgtttt

SEQ ID NO: 367130 - DNA, 2179 bp, Homo sapiens
cccttccgctcccggagcgcgtgcgccctcttactcggctccccttggtttcctggggtcctgccccttcaagctggggcgggagcggaggaccccgctctcaggggttgccggaccatgcgttgggggctgcgccctcgcgggccgggcgcggccgccctggccactgcccgaagtttgtgggggacgccccgccttccctgcagcccgggatggcaaggggcgacgaagaggcttctggtgcggtcggtctccggggccagtaaccaccagccgaactcgaatagtggcagataccgggacacggtgctgctgccgcagacgagcttccccatgaagctgctgggccgccagcagccggacacggagctggagatccagcagaaatgtggattttcagaactttattcatggcaaagagaaagaaaagtaaagacagaattttgccttcatgatggacctccttatgcaaacggtgaccctcatgttggacatgctttaaataagattttgaaagacatagccaatcgattccatatgatgaatggctccaaaatacattttgtgcccggctgggattgtcatgggttgcccattgaaataaaagtattatcagaacttggtagagaagctcagaatctttcagctatggaaattagaaagaaagctagatcatttgctaaagcagccattgagaaacagaaatcagcatttattcgttggggaataatggcagattggaataattgctactatacatttgatgggaagtatgaagccaaacagttgagaactttttaccaaatgtatgataagggcttggtttatcgatcttacaaacctgtgttttggtctccgtcatctaggactgcattggctgaagcagaacttgaatataatcctgagcatgtcagtcgttcaatatatgtaaaatttcctctcttaaagccttctccaaaattggcatctcttatagatggttcatctcctgttagtattttggtctggaccacacaaccttggacgattccagccaatgaagctgtttgctatatgcctgaatcaaagtatgctgttgtgaaatgttctaagtctggagacctctacgtactggcggcagataaagtagcatctgttgcttctactttggaaacaacatttgagactatttcaacactttcaggtgtagatttggaaaatggtacttgcagtcatccattaattcctgataaagcctctcctcttttacctgcaaatcatgtgaccatggcaaaaggaacgggattggttcacacagccccagctcatggtatggaagactacggtgtagcgtctcagcacaacctgcccatggattgtctagtggacgaagatggagttttcacagatgttgcaggtcctgaacttcaaaacaaggctgtccttgaagagggaactgatgtggttataaagatgcttcagactgcaaagaatttgttgaaagaggagaaattggtgcatagctatccgtatgactggaggaccaagaaacctgtggttattcgtgccagcaagcagtggtttataaacatcacggatattaagactgcagccaaggaattgttaaaaaaggtgaaatttattcctggatcagcactgaatggcatggttgaaatgatggacaggcggccatattggtgtatatcaaggcaaagagtttggggtgttccaattcctgtgtttcatcataagaccaaggatgaatacttgatcaacagccaaaccactgagcatattgttaaactagtggaacaacacggcagtgatatctggtggactcttccccctgaacaacttcttccaaaagaagtcttatctgaggttggtggccctgatgccttggaatatgtgccaggtcaggatattttggacatctggtttgatagcggaacttcatggtcttatgttcttccaggtcctgaccaaagagcagatttgtacttggaaggaaaagaccagctcgggggttggtttcagtcatccttattaacaagtgtggcagcaaggaagagagcaccttataatgtcctgtaagaatttgaagtaaaaaaagagaaaggaaaaaggagacaacaccaaggtgtctttcgcattcagtcacccaggctggagtgcaatggtgtggtcagagctcgctgca

SEQ ID NO: 367131 - DNA, 1689 bp, Homo sapiens
  misc_feature (1609)..(1609): n is a, c, g, or t
  misc_feature (1654)..(1654): n is a, c, g, or t
  misc_feature (1657)..(1657): n is a, c, g, or t
cccttccgctcccggagcgcgtgcgccctcttactcggctccccttggtttcctggggtcctgccccttcaagctggggcgggagcggaggaccccgctctcaggggttgccggaccatgcgttgggggctgcgccctcgcgggccgggcgcggccgccctggccactgcccgaagtttgtgggggacgccccgccttccctgcagcccgggatggcaaggggcgacgaagaggcttctggtgcggtcggtctccggggccagtaaccaccagccgaactcgaatagtggcagataccgggacacggtgctgctgccgcagacgagcttccccatgaagctgctgggccgccagcagccggacacggagctggagatccagcagaaatgtggattttcagaactttattcatggcaaagagaaagaaaagtaaagacagaattttgccttcatgatggacctccttatgcaaacggtgaccctcatgttggacatgctttaaataagattttgaaagacatagccaatcgattccatatgatgaatggctccaaaatacattttgtgcccggctgggattgtcatgggttgcccattgaaataaaagtattatcagaacttggtagagaagctcagaatctttcagctatggaaattagaaagaaagctagatcatttgctaaagcagccattgagaaacagaaatcagcatttattcgttggggaataatggcagattggaataattgctactatacatttgatgggaagtatgaagccaaacagttgagaactttttaccaaatgtatgataagggcttggtttatcgatcttacaaacctgtgttttggtctccgtcatctaggactgcattggctgaagcagaacttgaatataatcctgagcatgtcagtcgttcaatatatgtaaaatttcctctcttaaagccttctccaaaattggcatctcttatagatggttcatctcctgttagtattttggtctggaccacacaaccttggacgattccagccaatgaagctgtttgctatatgcctgaatcaaagtatgctgttgtgaaatgttctaagtctggagacctctacgtactggcggcagataaagtagcatctgttgcttctactttggaaacaacatttgagactatttcaacactttcaggtgtagatttggaaaatggtacttgcagtcatccattaattcctgataaagcctctcctcttttacctgcaaatcatgtgaccatggcaaaaggaacgggattggttcacacagccccagctcatggtatggaagactacggtgtagcgtctcagcacaacctgcccatggattgtctagtggacgaagatggagttttcacagatgttgcaggtcctgaacttcaaaacaaggctgtccttgaagagggaactgatgtggttataaagatgcttcagactgcaaagaatttgttgaaagaggagaaattggtgcatagctatccgtatgactggaggaccaagaaacctgtggttattcgtgccagcaagcagtggtttataaacatcacggatattaagactgcagccaagaatggtaaaaagngaattattctgacacctgatgctggtgaatgaggcagcgctatgngantaagcaaagttgggtcatctggtatatagcag

SEQ ID NO: 367132 - DNA, 376 bp, Homo sapiens
ttttttgtgtgtatgtatgtgacaattagaagtaagagacatcttaggatctagcaaagtgaagtgcctggcattctcaataaatactgttgatggaaatatttagttaaaaccttttatgctaattaggattgatacatttagtgatgtttgctcaggatgcaatggtataccagaaggttcctctctaaacgtgagattttatagtgtttctttttataacctcagtttatggtacaaatttaacataaactgtaactttcacatgcttccttccagatgctgcagtctgaagagacttccagcacctctcagttgaatgaattaatgatggcttctgagtcaactttactggctcaggaaccacgagagatga

SEQ ID NO: 367133 - DNA, 4551 bp, Homo sapiens
cccttccgctcccggagcgcgtgcgccctcttactcggctccccttggtttcctggggtcctgccccttcaagctggggcgggagcggaggaccccgctctcaggggttgccggaccatgcgttgggggctgcgccctcgcgggccgggcgcggccgccctggccactgcccgaagtttgtgggggacgccccgccttccctgcagcccgggatggcaaggggcgacgaagaggcttctggtgcggtcggtctccggggccagtaaccaccagccgaactcgaatagtggcagataccgggacacggtgctgctgccgcagacgagcttccccatgaagctgctgggccgccagcagccggacacggagctggagatccagcagaaatgtggattttcagaactttattcatggcaaagagaaagaaaagtaaagacagaattttgccttcatgatggacctccttatgcaaacggtgaccctcatgttggacatgctttaaataagattttgaaagacatagccaatcgattccatatgatgaatggctccaaaatacattttgtgcccggctgggattgtcatgggttgcccattgaaataaaagtattatcagaacttggtagagaagctcagaatctttcagctatggaaattagaaagaaagctagatcatttgctaaagcagccattgagaaacagaaatcagcatttattcgttggggaataatggcagattggaataattgctactatacatttgatgggaagtatgaagccaaacagttgagaactttttaccaaatgtatgataagggcttggtttatcgatcttacaaacctgtgttttggtctccgtcatctaggactgcattggctgaagcagaacttgaatataatcctgagcatgtcagtcgttcaatatatgtaaaatttcctctcttaaagccttctcccacacaaccttggacgattccagccaatgaagctgtttgctatatgcctgaatcaaagtatgctgttgtgaaatgttctaagtctggagacctctacgtactggcggcagataaagtagcatctgttgcttctactttggaaacaacatttgagactatttcaacactttcaggtgtagatttggaaaatggtacttgcagtcatccattaattcctgataaagcctctcctcttttacctgcaaatcatgtgaccatggcaaaaggaacgggattggttcacacagccccagctcatggtatggaagactacggtgtagcgtctcagcacaacctgcccatggattgtctagtggacgaagatggagttttcacagatgttgcaggtcctgaacttcaaaacaaggctgtccttgaagagggaactgatgtggttataaagatgcttcagactgcaaagaatttgttgaaagaggagaaattggtgcatagctatccgtatgactggaggaccaagaaacctgtggttattcgtgccagcaagcagtggtttataaacatcacggatattaagactgcagccaaggaattgttaaaaaaggtgaaatttattcctggatcagcactgaatggcatggttgaaatgatggacaggcggccatattggtgtatatcaaggcaaagagtttggggtgttccaattcctgtgtttcatcataagaccaaggatgaatacttgatcaacagccaaaccactgagcatattgttaaactagtggaacaacacggcagtgatatctggtggactcttccccctgaacaacttcttccaaaagaagtcttatctgaggttggtggccctgatgccttggaatatgtgccaggtcaggatattttggacatctggtttgatagcggaacttcatggtcttatgttcttccaggtcctgaccaaagagcagatttgtacttggaaggaaaagaccagctcgggggttggtttcagtcatccttattaacaagtgtggcagcaaggaagagagcaccttataagacagtgattgttcatggatttacccttggagaaaagggagaaaagatgtccaagtctcttgggaatgtcattcatcctgatgttgtcgttaatggaggacaagatcaaagcaaagagcctccgtatggtgctgatgtccttcgctggtgggtagctgattccaatgtcttcaccgaagttgcaattggcccatccgtgctcaatgctgccagagatgatattagcaagcttaggaatacacttcgctttcttttgggaaatgtggctgatttcaacccagaaacagattccatccctgtaaacgatatgtatgtcatagaccagtacatgctacacttactgcaggatttggcaaacaagattaccgaattatacaaacaatatgattttggaaaagttgttcggctgttacggacgttttataccagagagctctctaacttttatttcagtataatcaaagataggctctattgtgaaaaggaaaatgaccccaaacgacgctcttgtcagactgcattagttgaaattttggatgtaatagttcgttcttttgctcccattcttcctcacctggctgaagaggtgttccagcacataccttatattaaagagcccaagagtgttttccgtactgggtggattagtactagttctatctggaaaaagcccgggttggaagaagctgtggagagtgcgtgtgcaatgcgagactcatttcttggaagcatccctggcaaaaatgcagctgagtacaaggttatcactgtgatagaacctggactgctttttgagataatagagatgctgcagtctgaagagacttccagcacctctcagttgaatgaattaatgatggcttctgagtcaactttactggctcaggaaccacgagagatgactgcagatgtaatcgagcttaaagggaaattcctcatcaacttagaaggtggtgatattcgtgaagagtcttcctataaagtaattgtcatgccgactacgaaagaaaaatgcccccgttgttggaagtatacagcggagtcttcagatacactgtgtcctcgatgtgcagaagttgtcagtggaaaatagtattaacagctcactcgagcaagaaccctcctgacagtactggctagaagtttggatggattatttacaatataggaaagaaagccaagatttaggtaatgagtggatgagtaaatggtggaggatgggagtcaaaatcagaattatagaagaagtatttcctgtaactatagaaagaattatgtatatatacatgcagaaatatatatgtgtgtgtgtatctgtggatggatatatgtatatctcttcctatatatatccatagtggacttattcagaacatagatatgtattcagcttgtcttcaaatacggccaagcagaaaatgttttatattttataaatcatcttttgactctgtatttaaattctatgatactgaaaataaaggcattctggaaaaatactgactgattttggtgcagaagttttgagtatcaagtaaaagaagtatagttttgaaagggaatggcggaggcctgtttcccttaagaggtgaagggtcatttcattcttcccattagtgaacatcagccttttcagaatagctagtttttggggttggatcagaaagaatataatcaccaaatttgttactcaagaaaggaagaaatctcttaatagttagttatacttatgaatgtttaggaaacaacatgaaagctgaaaatttatttcactaatatacataagaagttcacaacaatgaacagacagaaaatagcagtatatacagaatttcactacttacagtacattacaatagagaaagcattttataaacagttcagtattggattaaaatcttttaaggatggctaattctattcagcaggaatctaacttctagacacccagcaaacccattcctatcagggtgagagagggcttttgctgttgctatagtgtactgtaaaaatatttgttccttataaatgaagtggaccacagcaacttctaaatgaacattatattcagtgtaagtctcatattattaaatttcagatttttgactttttagatcgcaattgtttttaaaaagcaatttaaatgtaacagtgtttactttgaccatagatgaagttttataataaaagtaaaactttttttttctgtttgcaaaagtatgaagcattaagaagcatggtgctatatatctctttatctacatttaccctggcccctctagttctgcatctaaacagaacctgtaatgtagaagttatgattatttgaacactttttgttttccttcagcattatacaatataatttaataagatacaaatgcatatttaatgtttgttaatgaagaaagttgtgtgagggtgggcatatatctaggaaaacactactggttactggcttctcatcaataactacaaagtaccacatacctttgtttcagaaaccacccattctacattaaaatctaattcctttatcatc

SEQ ID NO: 367134 - DNA, 3782 bp, Homo sapiens
cccttccgctcccggagcgcgtgcgccctcttactcggctccccttggtttcctggggtcctgccccttcaagctggggcgggagcggaggaccccgctctcaggggttgccggaccatgcgttgggggctgcgccctcgcgggccgggcgcggccgccctggccactgcccgaagtttgtgggggacgccccgccttccctgcagcccgggatggcaaggggcgacgaagaggcttctggtgcggtcggtctccggggccagtaaccaccagccgaactcgaatagtggcagataccgggacacggtgctgctgccgcagacgagcttccccatgaagctgctgggccgccagcagccggacacggagctggagatccagcagaaatgtggattttcagaactttattcatggcaaagagaaagaaaagtaaagacagaattttgccttcatgatggacctccttatgcaaacggtgaccctcatgttggacatgctttaaataagattttgaaagacatagccaatcgattccatatgatgaatggctccaaaatacattttgtgcccggctgggattgtcatgggttgcccattgaaataaaagtattatcagaacttggtagagaagctcagaatctttcagctatggaaattagaaagaaagctagatcatttgctaaagcagccattgagaaacagaaatcagcatttattcgttggggaataatggcagattggaataattgctactatacatttgatgggaagtatgaagccaaacagttgagaactttttaccaaatgtatgataagggcttggtttatcgatcttacaaacctgtgttttggtctccgtcatctaggactgcattggctgaagcagaacttgaatataatcctgagcatgtcagtcgttcaatatatgtaaaatttcctctcttaaagccttctccaaaattggcatctcttatagatggttcatctcctgttagtattttggtctggaccacacaaccttggacgattccagccaatgaagctgtttgctatatgcctgaatcaaagtatgctgttgtgaaatgttctaagtctggagacctctacgtactggcggcagataaagtagcatctgttgcttctactttggaaacaacatttgagactatttcaacactttcaggtgtagatttggaaaatggtacttgcagtcatccattaattcctgataaagcctctcctcttttacctgcaaatcatgtgaccatggcaaaaggaacgggattggttcacacagccccagctcatggtatggaagactacggtgtagcgtctcagcacaacctgcccatggattgtctagtggacgaagatggagttttcacagatgttgcaggtcctgaacttcaaaacaaggctgtccttgaagagggaactgatgtggttataaagatgcttcagactgcaaagaatttgttgaaagaggagaaattggtgcatagctatccgtatgactggaggaccaagaaacctgtggttattcgtgccagcaagcagtggtttataaacatcacggatattaagactgcagccaaggaattgttaaaaaaggtgaaatttattcctggatcagcactgaatggcatggttgaaatgatggacaggcggccatattggtgtatatcaaggcaaagagtttggggtgttccaattcctgtgtttcatcataagaccaaggatgaatacttgatcaacagccaaaccactgagcatattgttaaactagtggaacaacacggcagtgatatctggtggactcttccccctgaacaacttcttccaaaagaagtcttatctgaggttggtggccctgatgccttggaatatgtgccaggtcaggatattttggacatctggtttgatagcggaacttcatggtcttatgttcttccaggtcctgaccaaagagcagatttgtacttggaaggaaaagaccagctcgggggttggtttcagtcatccttattaacaagtgtggcagcaaggaagagagcaccttataagacagtgattgttcatggatttacccttggagaaaagggagaaaagatgtccaagtctcttgggaatgtcattcatcctgatgttgtcgttaatggaggacaagatcaaagcaaagagcctccgtatggtgctgatgtccttcgctggtgggtagctgattccaatgtcttcaccgaagttgcaattggcccatccgtgctcaatgctgccagagatgatattagcaagcttaggaatacacttcgctttcttttgggaaatgtggctgatttcaacccagaaacagattccatccctgtaaacgatatgtatgtcatagaccagtacatgctacacttactgcaggatttggcaaacaagattaccgaattatacaaacaatatgattttggaaaagttgttcggctgttacggacgttttataccagagagctctctaacttttatttcagtataatcaaagataggctctattgtgaaaaggaaaatgaccccaaacgacgctcttgtcagactgcattagttgaaattttggatgtaatagttcgttcttttgctcccattcttcctcacctggctgaagaggtgttccagcacataccttatattaaagagcccaagagtgttttccgtactgggtggattagtactagttctatctggaaaaagcccgggttggaagaagctgtggagagtgcgtgtgcaatgcgagactcatttcttggaagcatccctggcaaaaatgcagctgagtacaaggttatcactgtgatagaacctggactgctttttgagataatagagatgctgcagtctgaagagacttccagcacctctcagttgaatgaattaatgatggcttctgagtcaactttactggctcaggaaccacgagagatgactgcagatgtaatcgagcttaaagggaaattcctcatcaacttagaaggtggtgatattcgtgaagagtcttcctataaagtaattgtcatgccgactacgaaagaaaaatgcccccgttgttggaagtatacagcggagtcttcagatacactgtgtcctcgatgtgcagaagttgtcagtggaaaatagtattaacagctcactcgagcaagaaccctcctgacagtactggctagaagtttggatggattatttacaatataggaaagaaagccaagatttaggtaatgagtggatgagtaaatggtggaggatgggagtcaaaatcagaattatagaagaagtatttcctgtaactatagaaagaattatgtatatatacatgcagaaatatatatgtgtgtgtgtatctgtggatggatatatgtatatctcttcctatatatatccatagtggacttattcagaacatagatatgtattcagcttgtcttcaaatacggccaagcagaaaatgttttatattttataaatcatcttttgactctgtatttaaattctatgatactgaaaataaaggcattctggaacaatccaaccctacttaagaacatcacccaccctcacaaacaaaaaaaacatgtcggcccgcttggccaaatcgattctagattcgagcaagtttatgcatgctgcccgcaattcgagctaactgtgccaattgcccctataggggtccgattacaattaacttggcgcggtttacaacggctgcattggaaaaccctggggttcccactttaaacgctttggag

SEQ ID NO: 367135 - DNA, 2203 bp, Homo sapiens
gatcctctgcacacgccgcatacccaaactgtacgaacacagatctccttgttaatgacgtacacacggcggaggctgtagaagcagacctcgttgagacactgtttgcaaggcctgtgtatggagattcggcgtgtgcatgcacacgccgaaacccaaacgacgctcttgtcagactgcattagttgaaattttggatgtaatagttcgttcttttgctcccattcttcctcacctggctgaagaggtgttccagcacataccttatattaaagagcccaagagtgttttccgtactgggtggattagtactagttctatctggaaaaagcccgggttggaagaagctgtggagagtgcgtgtgcaatgcgagactcatttcttggaagcatccctggcaaaaatgcagctgagtacaaggttatcactgtgatagaacctggactgctttttgagataatagagatgctgcagtctgaagagacttccagcacctctcagttgaatgaattaatgatggcttctgagtcaactttactggctcaggaaccacgagagatgactgcagatgtaatcgagcttaaagggaaattcctcatcaacttagaaggtggtgatattcgtgaagagtcttcctataaagtaattgtcatgccgactacgaaagaaaaatgcccccgttgttggaagtatacagcggagtcttcagatacactgtgtcctcgatgtgcagaagttgtcagtggaaaatagtattaacagctcactcgagcaagaaccctcctgacagtactggctagaagtttggatggattatttacaatataggaaagaaagccaagatttaggtaatgagtggatgagtaaatggtggaggatgggagtcaaaatcagaattatagaagaagtatttcctgtaactatagaaagaattatgtatatatacatgcagaaatatatatgtgtgtgtgtatctgtggatggatatatgtatatctcttcctatatatatccatagtggacttattcagaacatagatatgtattcagcttgtcttcaaatacggccaagcagaaaatgttttatattttataaatcatcttttgactctgtatttaaattctatgatactgaaaataaaggcattctggaaaaatactgactgattttggtgcagaagttttgagtatcaagtaaaagaagtatagttttgaaagggaatggcggaggcctgtttcccttaagaggtgaagggtcatttcattcttcccattagtgaacatcagccttttcagaatagctagtttttggggttggatcagaaagaatataatcaccaaatttgttactcaagaaaggaagaaatctcttaatagttagttatacttatgaatgtttaggaaacaacatgaaagctgaaaatttatttcactaatatacataagaagttcacaacaatgaacagacagaaaatagcagtatatacagaatttcactacttacagtacattacaatagagaaagcattttataaacagttcagtattggattaaaatcttttaaggatggctaattctattcagcaggaatctaacttctagacacccagcaaacccattcctatcagggtgagagagggcttttgctgttgctatagtgtactgtaaaaatatttgttccttataaatgaagtggaccacagcaacttctaaatgaacattatattcagtgtaagtctcatattattaaatttcagatttttgactttttagatcgcaattgtttttaaaaagcaatttaaatgtaacagtgtttactttgaccatagatgaagttttataataaaagtaaaactttttttttctgtttgcaaaagtatgaagcattaagaagcatggtgctatatatctctttatctacatttaccctggcccctctagttctgcatctaaacagaacctgtaatgtagaagttatgattatttgaacactttttgttttccttcagcattatacaatataatttaataagatacaaatgcatatttaatgtttgttaatgaagaaagttgtgtgagggtgggcatatatctaggaaaacactactggttactggcttctcatcaataactacaaagtaccacatacctttgtttcagaaaccacccattctacattaaaatctaattcctttatcatc

SEQ ID NO: 367136 - DNA, 2383 bp, Homo sapiens
cccttccgctcccggagcgcgtgcgccctcttactcggctccccttggtttcctggggtcctgccccttcaagctggggcgggagcggaggaccccgctctcaggggttgccggaccatgcgttgggggctgcgccctcgcgggccgggcgcggccgccctggccactgcccgaagtttgtgggggacgccccgccttccctgcagcccgggatggcaaggggcgacgaagaggcttctggtgcggtcggtctccggggccagtaaccaccagccgaactcgaatagtggcagataccgggacacggtgctgctgccgcagacgagcttccccatgaagctgctgggccgccagcagccggacacggagctggagatccagcagaaatgtggattttcagaactttattcatggcaaagagaaagaaaagtaaagacagaattttgccttcatgatggacctccttatgcaaacggtgaccctcatgttggacatgctttaaataagattttgaaagacatagccaatcgattccatatgatgaatggctccaaaatacattttgtgcccggctgggattgtcatgggttgcccattgaaataaaagtattatcagaacttggtagagaagctcagaatctttcagctatggaaattagaaagaaagctagatcatttgctaaagcagccattgagaaacagaaatcagcatttattcgttggggaataatggcagattggaataattgctactatacatttgatgggaagtatgaagccaaacagttgagaactttttaccaaatgtatgataagggcttggtttatcgatcttacaaacctgtgttttggtctccgtcatctaggactgcattggctgaagcagaacttgaatataatcctgagcatgtcagtcgttcaatatatgtaaaatttcctctcttaaagccttctccaaaattggcatctcttatagatggttcatctcctgttagtattttggtctggaccacacaaccttggacgattccagccaatgaagctgtttgctatatgcctgaatcaaagtatgctgttgtgaaatgttctaagtctggagacctctacgtactggcggcagataaagtagcatctgttgcttctactttggaaacaacatttgagactatttcaacactttcaggtgtagatttggaaaatggtacttgcagtcatccattaattcctgataaagcctctcctcttttacctgcaaatcatgtgaccatggcaaaaggaacgggattggttcacacagccccagctcatggtatggaagactacggtgtagcgtctcagcacaacctgcccatggattgtctagtggacgaagatggagttttcacagatgttgcaggtcctgaacttcaaaacaaggctgtccttgaagagggaactgatgtggttataaagatgcttcagactgcaaagaatttgttgaaagaggagaaattggtgcatagctatccgtatgactggaggaccaagaaacctgtggttattcgtgccagcaagcagtggtttataaacatcacggatattaagactgcagccaaggaattgttaaaaaaggtgaaatttattcctggatcagcactgaatggcatggttgaaatgatggacaggcggccatattggtgtatatcaaggcaaagagtttggggtgttccaattcctgtgtttcatcataagaccaaggatgaatacttgatcaacagccaaaccactgagcatattgttaaactagtggaacaacacggcagtgatatctggtggactcttccccctgaacaacttcttccaaaagaagtcttatctgaggttggtggccctgatgccttggaatatgtgccaggtcaggatattttggacatctggtttgatagcggaacttcatggtcttatgttcttccaggtcctgaccaaagagcagatttgtacttggaaggaaaagaccagctcgggggttggtttcagtcatccttattaacaagtgtggcagcaaggaagagagcaccttataagtaagtatttatgcctgaaccaacctgctgagtacctgccagtgtgtgaagcactatgctgagtactacagagatgataaggcaccactcttgattgcttacagtgtcctgtaagaatttgaagtaaaaaaagagaaaggaaaaaggagacaacaccaaggtgtcttgtgagtgtgatgcagatcataactctttgaagaaaaagtcagcattgactggagtagttgggggaacttatgtagttctttgttgttgttgtttttttttttttttttgaaaaaggaacttcagcctgggcgacagagcaagactccgtctca

SEQ ID NO: 367137 - DNA, 1718 bp, Homo sapiens
cccttccgctcccggagcgcgtgcgccctcttactcggctccccttggtttcctggggtcctgccccttcaagctggggcgggagcggaggaccccgctctcaggggttgccggaccatgcgttgggggctgcgccctcgcgggccgggcgcggccgccctggccactgcccgaagtttgtgggggacgccccgccttccctgcagcccgggatggcaaggggcgacgaagaggcttctggtgcggtcggtctccggggccagtaaccaccagccgaactcgaatagtggcagataccgggacacggtgctgctgccgcagacgagcttccccatgaagctgctgggccgccagcagccggacacggagctggagatccagcagaaatgtggattttcagaactttattcatggcaaagagaaagaaaagtaaagacagaattttgccttcatgatggacctccttatgcaaacggtgaccctcatgttggacatgctttaaataagattttgaaagacatagccaatcgattccatatgatgaatggctccaaaatacattttgtgcccggctgggattgtcatgggttgcccattgaaataaaagtattatcagaacttggtagagaagctcagaatctttcagctatggaaattagaaagaaagctagatcatttgctaaagcagccattgagaaacagaaatcagcatttattcgttggggaataatggcagattggaataattgctactatacatttgatgggaagtatgaagccaaacagttgagaactttttaccaaatgtatgataagggcttggtttatcgatcttacaaacctgtgttttggtctccgtcatctaggactgcattggctgaagcagaacttgaatataatcctgagcatgtcagtcgttcaatatatgtaaaatttcctctcttaaagccttctccaaaattggcatctcttatagatggttcatctcctgttagtattttggtctggaccacacaaccttggacgattccagccaatgaagctgtttgctatatgcctgaatcaaagtatgctgttgtgaaatgttctaagtctggagacctctacgtactggcggcagataaagtagcatctgttgcttctactttggaaacaacatttgagactatttcaacactttcaggtgtagatttggaaaatggtacttgcagtcatccattaattcctgataaagcctctcctcttttacctgcaaatcatgtgaccatggcaaaaggaacgggattggttcacacagccccagctcatggtatggaagactacggtgtagcgtctcagcacaacctgcccatggattgtctagtggacgaagatggagttttcacagatgttgcaggtcctgaacttcaaaacaaggctgtccttgaagagggaactgatgtggttataaagatgcttcagactgcaaagaatttgttgaaagaggagaaattggtgcatagctatccgtatgactggaggaccaagaaacctgtggttattcgtgccagcaagcagtggtttataaacatcacggatattaagactgcagccaagaattgttaaaaaaggtgaaatttattctcttgatatacactcaatatggccgcctgtccatcatttcaaccatgccattcagtgctgatccaggaatatttcacctttttaacaattcctca

SEQ ID NO: 367138 - DNA, 1126 bp, Homo sapiens
  misc_feature (687)..(687): n is a, c, g, or t
  misc_feature (689)..(689): n is a, c, g, or t
  misc_feature (692)..(693): n is a, c, g, or t
  misc_feature (702)..(702): n is a, c, g, or t
  misc_feature (704)..(704): n is a, c, g, or t
  misc_feature (709)..(709): n is a, c, g, or t
  misc_feature (714)..(714): n is a, c, g, or t
ggatcctgtgacgtcagcgggttcgaaccgccggagctgagcgagaggccgggggtgccgagccgggcggggagagctgggccgggagagcagaacagggaggctagagcgcagcgggaaccggcccggagccggagccggagccccacaggcacctactaaaccgcccagccgatcggcccccacagagtggcccgcgggcctccggccgggcccagtcccctcccgggccctccatggcccgggccgctgccctcctgccgtcgagatcgccgccgacgccgctgctgtggccgctgctgctgctgctgctcctggaaaccggagcccaggatgtgcgagttcaagtgctacccgaggtgcgaggccagctcgggggcaccgtggagctgccgtgccacctgctgccacctgttcctggactgtacatctccctggtgacctggcagcgcccagatgcacctgcgaaccaccagaatgtggccgcctcccactttcttgggacttggagggaggtggaacagcacactggacttctcccgtctctagggctgcatggggagcccggggagctgagtagtggggatccagagaggacccccgcccccagagacttggttttggctccagccttcccctggccccgtgacactcaggagttaataaatgccttggaggaaaacaaananaannaaaaaaaancncgaanaaagnacacacactctagggcactttgggcattccaatccccctaatttcccactataaagcctatcaggcactaggaactcaccctccggggacagacgccttgggaccaaagacccctccgagcctaattgccccacgagattcctattccccacaagggtatttttggccacagagtggccacagtaccatcccaaaaaaccttgcacattagtctagcgaggtggaaaatttccggaaatttatgtgcgcccaccgcggtccctccccgtggatacacggtctgcagattggggcagtttagaggggtaacccccgtgtgtaaaagccctgtgatgttgagacaaaaactttcccccgtggaggagccccccgtgtatgcaggcgcggagggagtacggcttaaacccccggt

SEQ ID NO: 367139 - DNA, 417 bp, Homo sapiens
aggatctcactctgtccctcaggctagagttcagtggtataatctgagctcactgcaaccttcgcctcctgagctcaaccaatcttcctaccgcagcctgggcaacatggcgaaacctgtctacaaaaaaaatacaaaaattcaccccaattcctgcctaccaagcaagcagccccagcctagggtcagacagggtgagcctcatacagactgtgccttgatggccccagccttgggagaagaatttactgttaacctggaagactactgaatcattttacccttgcccagtggaataggacctaaacatcccccttccggggaaagtgggtcatctgaattgggggtagcaattgatactgttttgtaaactacatttcctacaaaatatgaatttatactttgaaaaaaaagcct

SEQ ID NO: 367140 - DNA, 267 bp, Homo sapiens
tagaggatcccccaattcctccagtcgtacagatggtgtcacggtcacctgcaaagtggagcatgagagcttcgaggaaccagccctgatacctgtgaccctctctgtacgctgtgagtgtatcgggggtgacccctcccccatcaaaactgcctacactggcttctctaaagcactgtctacattgtctctgaatgttgtctacgtgggttccctgaagccaaattctgcactaccttcctgccattgtctacactggctcccatg

SEQ ID NO: 367141 - DNA, 2436 bp, Homo sapiens
  misc_feature (1997)..(1997): n is a, c, g, or t
  misc_feature (1999)..(1999): n is a, c, g, or t
  misc_feature (2002)..(2003): n is a, c, g, or t
  misc_feature (2012)..(2012): n is a, c, g, or t
  misc_feature (2014)..(2014): n is a, c, g, or t
  misc_feature (2019)..(2019): n is a, c, g, or t
  misc_feature (2024)..(2024): n is a, c, g, or t
ggatcctgtgacgtcagcgggttcgaaccgccggagctgagcgagaggccgggggtgccgagccgggcggggagagctgggccgggagagcagaacagggaggctagagcgcagcgggaaccggcccggagccggagccggagccccacaggcacctactaaaccgcccagccgatcggcccccacagagtggcccgcgggcctccggccgggcccagtcccctcccgggccctccatggcccgggccgctgccctcctgccgtcgagatcgccgccgacgccgctgctgtggccgctgctgctgctgctgctcctggaaaccggagcccaggatgtgcgagttcaagtgctacccgaggtgcgaggccagctcgggggcaccgtggagctgccgtgccacctgctgccacctgttcctggactgtacatctccctggtgacctggcagcgcccagatgcacctgcgaaccaccagaatgtggccgccttccaccctaagatgggtcccagcttccccagcccgaagcctggcagcgagcggctgtccttcgtctctgccaagcagagcactgggcaagacacagaggcagagctccaggacgccacgctggccctccacgggctcacggtggaggacgagggcaactacacttgcgagtttgccaccttccccaaggggtccgtccgagggatgacctggctcagagtcatagccaagcccaagaaccaagctgaggcccagaaggtcacgttcagccaggaccctacgacagtggccctctgcatctccaaagagggccgcccacctgcccggatctcctggctctcatccctggactgggaagccaaagagactcaggtgtcagggaccctggccggaactgtcactgtcaccagccgcttcaccttggtgccctcgggccgagcagatggtgtcacggtcacctgcaaagtggagcatgagagcttcgaggaaccagccctgatacctgtgaccctctctgtacgctaccctcctgaagtgtccatctccggctatgatgacaactggtacctcggccgtactgatgccaccctgagctgtgacgtccgcagcaacccagagcccacgggctatgactggagcacgacctcaggcaccttcccgacctccgcagtggcccagggctcccagctggtcatccacgcagtggacagtctgttcaataccaccttcgtctgcacagtcaccaatgccgtgggcatgggccgcgctgagcaggtcatctttgtccgagaaacccccagggcctcgccccgagatgtgggcccgctggtgtggggggccgtgggggggacactgctggtgctgctgcttctggctggggggtccttggccttcatcctgctgagggtgaggaggaggaggaagagccctggaggagcaggaggaggagccagtggcgacgggggattctacgatccgaaagctcaggtgttgggaaatggggaccccgtcttctggacaccagtagtccctggtcccatggaaccagatggcaaggatgaggaggaggaggaggaggaagagaaggcagagaaaggcctcatgttgcctccacccccagcactcgaggatgacatggagtcccagctggacggctccctcatctcacggcgggcagtttatgtgtgacctggacacagacagagacagagccaggcccggccctcccgcccccgacctgaccacgccggcctagggttccagactggttggacttgttcgtctggacgacactggagtggaacactgcctcccactttcttgggacttggagggaggtggaacagcacactggacttctcccgtctctagggctgcatggggagcccggggagctgagtagtggggatccagagaggacccccgcccccagagacttggttttggctccagccttcccctggccccgtgacactcaggagttaataaatgccttggaggaaaacaaananaannaaaaaaaancncgaanaaagnacacacactctagggcactttgggcattccaatccccctaatttcccactataaagcctatcaggcactaggaactcaccctccggggacagacgccttgggaccaaagacccctccgagcctaattgccccacgagattcctattccccacaagggtatttttggccacagagtggccacagtaccatcccaaaaaaccttgcacattagtctagcgaggtggaaaatttccggaaatttatgtgcgcccaccgcggtccctccccgtggatacacggtctgcagattggggcagtttagaggggtaacccccgtgtgtaaaagccctgtgatgttgagacaaaaactttcccccgtggaggagccccccgtgtatgcaggcgcggagggagtacggcttaaacccccggt

SEQ ID NO: 367142 - DNA, 2488 bp, Homo sapiens
ggatcctgtgacgtcagcgggttcgaaccgccggagctgagcgagaggccgggggtgccgagccgggcggggagagctgggccgggagagcagaacagggaggctagagcgcagcgggaaccggcccggagccggagccggagccccacaggcacctactaaaccgcccagccgatcggcccccacagagtggcccgcgggcctccggccgggcccagtcccctcccgggccctccatggcccgggccgctgccctcctgccgtcgagatcgccgccgacgccgctgctgtggccgctgctgctgctgctgctcctggaaaccggagcccaggatgtgcgagttcaagtgctacccgaggtgcgaggccagctcgggggcaccgtggagctgccgtgccacctgctgccacctgttcctggactgtacatctccctggtgacctggcagcgcccagatgcacctgcgaaccaccagaatgtggccgccttccaccctaagatgggtcccagcttccccagcccgaagcctggcagcgagcggctgtccttcgtctctgccaagcagagcactgggcaagacacagaggcagagctccaggacgccacgctggccctccacgggctcacggtggaggacgagggcaactacacttgcgagtttgccaccttccccaaggggtccgtccgagggatgacctggctcagagtcatagccaagcccaagaaccaagctgaggcccagaaggtcacgttcagccaggaccctacgacagtggccctctgcatctccaaagagggccgcccacctgcccggatctcctggctctcatccctggactgggaagccaaagagactcaggtgtcagggaccctggccggaactgtcactgtcaccagccgcttcaccttggtgccctcgggccgagcagatggtgtcacggtcacctgcaaagtggagcatgagagcttcgaggaaccagccctgatacctgtgaccctctctgtacgctaccctcctgaagtgtccatctccggctatgatgacaactggtacctcggccgtactgatgccaccctgagctgtgacgtccgcagcaacccagagcccacgggctatgactggagcacgacctcaggcaccttcccgacctccgcagtggcccagggctcccagctggtcatccacgcagtggacagtctgttcaataccaccttcgtctgcacagtcaccaatgccgtgggcatgggccgcgctgagcaggtcatctttgtccgagagacccccaacacagcaggcgcaggggccacaggcggcatcatcgggggcatcatcgccgccatcattgctactgctgtggctgccacgggcatccttatctgccggcagcagcggaaggagcagacgctgcagggggcagaggaggacgaagacctggagggacctccctcctacaagccaccgaccccaaaagcgaagctggaggcacaggagatgccctcccagctcttcactctgggggcctcggagcacagcccactcaagaccccctactttgatgctggcgcctcatgcactgagcaggaaatgcctcgataccatgagctgcccaccttggaagaacggtcaggacccttgcaccctggagccacaagcctggggtcccccatcccggtgcctccagggccacctgctgtggaagacgtttccctggatctagaggatgaggagggggaggaggaggaagagtatctggacaagatcaaccccatctatgatgctctgtcctatagcagcccctctgattcctaccagggcaaaggctttgtcatgtcccgggccatgtatgtgtgagctgccatgcgcctggcgtctcacatctcacctgttgatcccttagctttcttgccaaggatctagtgccccctgacctctggccaggccactgtcagttaacacatatgcattccatttgtgatgtctaccttggtggctccactatgacccctaacccatgagcccagagaaattcaccgtgataatggaatcctggcaaccttatctcatgaggcaggaggtggggaaggtgcttctgcacaacctctgatcccaaggactcctctcccagactgtgaccttagaccatacctctcaccccccaatgcctcgactcccccaaaatcacaaagaagaccctagacctataatttgtcttcaggtagtaaattcccaataggtctgctggagtgggcgctgagggctccctgctgctcagacctgagccctccaggcagcagggtcccacttaccccctccccaccctgttccccaaaggtgggaaagaggggattccccagcccaagtggaataggacctaaacatcccccttccggggaaagtgggtcatctgaattgggggtagcaattgatactgttttgtaaactacatttcctacaaaatatgaatttatactttgaaaaaaaagcct

SEQ ID NO: 367143 - DNA, 2346 bp, Homo sapiens
ggatcctgtgacgtcagcgggttcgaaccgccggagctgagcgagaggccgggggtgccgagccgggcggggagagctgggccgggagagcagaacagggaggctagagcgcagcgggaaccggcccggagccggagccggagccccacaggcacctactaaaccgcccagccgatcggcccccacagagtggcccgcgggcctccggccgggcccagtcccctcccgggccctccatggcccgggccgctgccctcctgccgtcgagatcgccgccgacgccgctgctgtggccgctgctgctgctgctgctcctggaaaccggagcccaggatgtgcgagttcaagtgctacccgaggtgcgaggccagctcgggggcaccgtggagctgccgtgccacctgctgccacctgttcctggactgtacatctccctggtgacctggcagcgcccagatgcacctgcgaaccaccagaatgtggccgccttccaccctaagatgggtcccagcttccccagcccgaagcctggcagcgagcggctgtccttcgtctctgccaagcagagcactgggcaagacacagaggcagagctccaggacgccacgctggccctccacgggctcacggtggaggacgagggcaactacacttgcgagtttgccaccttccccaaggggtccgtccgagggatgacctggctcagagtcatagccaagcccaagaaccaagctgaggcccagaaggtcacgttcagccaggaccctacgacagtggccctctgcatctccaaagagggccgcccacctgcccggatctcctggctctcatccctggactgggaagccaaagagactcaggtgtcagggaccctggccggaactgtcactgtcaccagccgcttcaccttggtgccctcgggccgagcagatggtgtcacggtcacctgcaaagtggagcatgagagcttcgaggaaccagccctgatacctgtgaccctctctgtacgctaccctcctgaagtgtccatctccggctatgatgacaactggtacctcggccgtactgatgccaccctgagctgtgacgtccgcagcaacccagagcccacgggctatgactggagcacgacctcaggcaccttcccgacctccgcagtggcccagggctcccagctggtcatccacgcagtggacagtctgttcaataccaccttcgtctgcacagtcaccaatgccgtgggcatgggccgcgctgagcaggtcatctttgtccgagagacccccaacacagcaggcgcaggggccacaggcggcatcatcgggggcatcatcgccgccatcattgctactgctgtggctgccacgggcatccttatctgccggcagcagcggaaggagcagacgctgcagggggcagaggaggacgaagacctggagggacctccctcctacaagccaccgaccccaaaagcgaagctggaggcacaggagatgccctcccagctcttcactctgggggcctcggagcacagcccactcaagaccccctactttgatgctggcgcctcatgcactgagcaggaaatgcctcgataccatgagctgcccaccttggaagaacggtcaggacccttgcaccctggagccacaagcctggggtcccccatcccggtgcctccagggccacctgctgtggaagacgtttccctggatctagaggatgaggagggggaggaggaggaagagtatctggacaagatcaaccccatctatgatgctctgtcctatagcagcccctctgattcctaccagggcaaaggctttgtcatgtcccgggccatgtatgtgtgagctgccatgcgcctggcgtctcacatctcacctgttgatcccttagctttcttgccaaggatctagtgccccctgacctctggccaggccactgtcagttaacacatatgcattccatttgtgatgtctaccttggtggctccactatgacccctaacccatgagcccagagaaattcaccgtgataatggaatcctggcaaccttatctcatgaggcaggaggtggggaaggtgcttctgcacaacctctgatcccaaggactcctctcccagactgtgaccttagaccatacctctcaccccccaatgcctcgactcccccaaaatcacaaagaagacctactgaatcattttacccttgcccagtggaataggacctaaacatcccccttccggggaaagtgggtcatctgaattgggggtagcaattgatactgttttgtaaactacatttcctacaaaatatgaatttatactttgaaaaaaaagcct

SEQ ID NO: 367144 - DNA, 2106 bp, Homo sapiens
  misc_feature (1667)..(1667): n is a, c, g, or t
  misc_feature (1669)..(1669): n is a, c, g, or t
  misc_feature (1672)..(1673): n is a, c, g, or t
  misc_feature (1682)..(1682): n is a, c, g, or t
  misc_feature (1684)..(1684): n is a, c, g, or t
  misc_feature (1689)..(1689): n is a, c, g, or t
  misc_feature (1694)..(1694): n is a, c, g, or t
ggatcctgtgacgtcagcgggttcgaaccgccggagctgagcgagaggccgggggtgccgagccgggcggggagagctgggccgggagagcagaacagggaggctagagcgcagcgggaaccggcccggagccggagccggagccccacaggcacctactaaaccgcccagccgatcggcccccacagagtggcccgcgggcctccggccgggcccagtcccctcccgggccctccatggcccgggccgctgccctcctgccgtcgagatcgccgccgacgccgctgctgtggccgctgctgctgctgctgctcctggaaaccggagcccaggatgtgcgagttcaagtgctacccgaggtgcgaggccagctcgggggcaccgtggagctgccgtgccacctgctgccacctgttcctggactgtacatctccctggtgacctggcagcgcccagatgcacctgcgaaccaccagaatgtggccgccttccaccctaagatgggtcccagcttccccagcccgaagcctggcagcgagcggctgtccttcgtctctgccaagcagagcactgggcaagacacagaggcagagctccaggacgccacgctggccctccacgggctcacggtggaggacgagggcaactacacttgcgagtttgccaccttccccaaggggtccgtccgagggatgacctggctcagagtcatagccaagcccaagaaccaagctgaggcccagaaggtcacgttcagccaggaccctacgacagtggccctctgcatctccaaagagggccgcccacctgcccggatctcctggctctcatccctggactgggaagccaaagagactcaggtgtcagggaccctggccggaactgtcactgtcaccagccgcttcaccttggtgccctcgggccgagcagatggtgtcacggtcacctgcaaagtggagcatgagagcttcgaggaaccagccctgatacctgtgaccctctctgtacgctaccctcctgaagtgtccatctccggctatgatgacaactggtacctcggccgtactgatgccaccctgagctgtgacgtccgcagcaacccagagcccacgggctatgactggagcacgacctcaggcaccttcccgacctccgcagtggcccagggctcccagctggtcatccacgcagtggacagtctgttcaataccaccttcgtctgcacagtcaccaatgccgtgggcatgggccgcgctgagcaggtcatctttgtccgagcactcgaggatgacatggagtcccagctggacggctccctcatctcacggcgggcagtttatgtgtgacctggacacagacagagacagagccaggcccggccctcccgcccccgacctgaccacgccggcctagggttccagactggttggacttgttcgtctggacgacactggagtggaacactgcctcccactttcttgggacttggagggaggtggaacagcacactggacttctcccgtctctagggctgcatggggagcccggggagctgagtagtggggatccagagaggacccccgcccccagagacttggttttggctccagccttcccctggccccgtgacactcaggagttaataaatgccttggaggaaaacaaananaannaaaaaaaancncgaanaaagnacacacactctagggcactttgggcattccaatccccctaatttcccactataaagcctatcaggcactaggaactcaccctccggggacagacgccttgggaccaaagacccctccgagcctaattgccccacgagattcctattccccacaagggtatttttggccacagagtggccacagtaccatcccaaaaaaccttgcacattagtctagcgaggtggaaaatttccggaaatttatgtgcgcccaccgcggtccctccccgtggatacacggtctgcagattggggcagtttagaggggtaacccccgtgtgtaaaagccctgtgatgttgagacaaaaactttcccccgtggaggagccccccgtgtatgcaggcgcggagggagtacggcttaaacccccggt

SEQ ID NO: 367145 - DNA, 1655 bp, Homo sapiens
  misc_feature (1216)..(1216): n is a, c, g, or t
  misc_feature (1218)..(1218): n is a, c, g, or t
  misc_feature (1221)..(1222): n is a, c, g, or t
  misc_feature (1231)..(1231): n is a, c, g, or t
  misc_feature (1233)..(1233): n is a, c, g, or t
  misc_feature (1238)..(1238): n is a, c, g, or t
  misc_feature (1243)..(1243): n is a, c, g, or t
ggatcctgtgacgtcagcgggttcgaaccgccggagctgagcgagaggccgggggtgccgagccgggcggggagagctgggccgggagagcagaacagggaggctagagcgcagcgggaaccggcccggagccggagccggagccccacaggcacctactaaaccgcccagccgatcggcccccacagagtggcccgcgggcctccggccgggcccagtcccctcccgggccctccatggcccgggccgctgccctcctgccgtcgagatcgccgccgacgccgctgctgtggccgctgctgctgctgctgctcctggaaaccggagcccaggatgtgcgagttcaagtgctacccgaggtgcgaggccagctcgggggcaccgtggagctgccgtgccacctgctgccacctgttcctggactgtacatctccctggtgacctggcagcgcccagatgcacctgcgaaccaccagaatgtggccgccttccaccctaagatgggtcccagcttccccagcccgaagcctggcagcgagcggctgtccttcgtctctgccaagcagagcactgggcaagacacagaggcagagctccaggacgccacgctggccctccacgggctcacggtggaggacgagggcaactacacttgcgagtttgccaccttccccaaggggtccgtccgagggatgacctggctcagagtcatagccaagcccaagaaccaagctgaggcccagaaggtcacgttcagccaggaccctacgacagtggccctctgcatctccaaagagggccgcccacctgcccggatctcctggctctcatccctggactgggaagccaaagagactcaggtgtcagggaccctggccggaactgtcactgtcaccagccgcttcaccttggtgccctcgggccgagcagatggtgtcacggtcacctgcaaagtggagcatgagagcttcgaggaaccagccctgatacctgtgaccctctctgtacgctaccctcctgaagtgtccatctccggctatgatgacaactggtacctcggccgtactgatgccaccctgagtgcatggggagcccggggagctgagtagtggggatccagagaggacccccgcccccagagacttggttttggctccagccttcccctggccccgtgacactcaggagttaataaatgccttggaggaaaacaaananaannaaaaaaaancncgaanaaagnacacacactctagggcactttgggcattccaatccccctaatttcccactataaagcctatcaggcactaggaactcaccctccggggacagacgccttgggaccaaagacccctccgagcctaattgccccacgagattcctattccccacaagggtatttttggccacagagtggccacagtaccatcccaaaaaaccttgcacattagtctagcgaggtggaaaatttccggaaatttatgtgcgcccaccgcggtccctccccgtggatacacggtctgcagattggggcagtttagaggggtaacccccgtgtgtaaaagccctgtgatgttgagacaaaaactttcccccgtggaggagccccccgtgtatgcaggcgcggagggagtacggcttaaacccccggt

SEQ ID NO: 367146 - DNA, 1315 bp, Homo sapiens
ggaggatgcgactctgcggtggtctaggatgactctgacctggtggtgagcttgctcctactcgccactgaacccgatagcgtagctggaggcacatgagatgccctcccagctcttcactctgggggcctcggagcacagcccactcaagaccccctactttgatgctggcgcctcatgcactgagcaggaaatgcctcgataccatgagctgcccaccttggaagaacggtcaggacccttgcaccctggagccacaagcctggggtcccccatcccggtgcctccagggccacctgctgtggaagacgtttccctggatctagaggatgaggagggggaggaggaggaagagtatctggacaagatcaaccccatctatgatgctctgtcctatagcagcccctctgattcctaccagggcaaaggctttgtcatgtcccgggccatgtatgtgtgagctgccatgcgcctggcgtctcacatctcacctgttgatcccttagctttcttgccaaggatctagtgccccctgacctctggccaggccactgtcagttaacacatatgcattccatttgtgatgtctaccttggtggctccactatgacccctaacccatgagcccagagaaattcaccgtgataatggaatcctggcaaccttatctcatgaggcaggaggtggggaaggtgcttctgcacaacctctgatcccaaggactcctctcccagactgtgaccttagaccatacctctcaccccccaatgcctcgactcccccaaaatcacaaagaagaccctagacctataatttgtcttcaggtagtaaattcccaataggtctgctggagtgggcgctgagggctccctgctgctcagacctgagccctccaggcagcagggtcccacttaccccctccccaccctgttccccaaaggtgggaaagaggggattccccagcccaaggcagggttttcccagcaccctcctgtaagcagaagtctcagggtccagacccttccctgagcccccacccccaccccaattcctgcctaccaagcaagcagccccagcctagggtcagacagggtgagcctcatacagactgtgccttgatggccccagccttgggagaagaatttactgttaacctggaagactactgaatcattttacccttgcccagtggaataggacctaaacatcccccttccggggaaagtgggtcatctgaattgggggtagcaattgatactgttttgtaaactacatttcctacaaaatatgaatttatactttgaaaaaaaagcct

SEQ ID NO: 367147 - DNA, 887 bp, Homo sapiens
tgagcggtcccggttatgtcagggcagtgtatgtatgcagctggctggcgtctcacatctcacctgttgatcccttagctttcttgccaaggatctagtgccccctgacctctggccaggccactgtcagttaacacatatgcattccatttgtgatgtctaccttggtggctccactatgacccctaacccatgagcccagagaaattcaccgtgataatggaatcctggcaaccttatctcatgaggcaggaggtggggaaggtgcttctgcacaacctctgatcccaaggactcctctcccagactgtgaccttagaccatacctctcaccccccaatgcctcgactcccccaaaatcacaaagaagaccctagacctataatttgtcttcaggtagtaaattcccaataggtctgctggagtgggcgctgagggctccctgctgctcagacctgagccctccaggcagcagggtcccacttaccccctccccaccctgttccccaaaggtgggaaagaggggattccccagcccaaggcagggttttcccagcaccctcctgtaagcagaagtctcagggtccagacccttccctgagcccccacccccaccccaattcctgcctaccaagcaagcagccccagcctagggtcagacagggtgagcctcatacagactgtgccttgatggccccagccttgggagaagaatttactgttaacctggaagactactgaatcattttacccttgcccagtggaataggacctaaacatcccccttccggggaaagtgggtcatctgaattgggggtagcaattgatactgttttgtaaactacatttcctacaaaatatgaatttatactttgaaaaaaaagcct

SEQ ID NO: 367148 - DNA, 1273 bp, Homo sapiens
  misc_feature (834)..(834): n is a, c, g, or t
  misc_feature (836)..(836): n is a, c, g, or t
  misc_feature (839)..(840): n is a, c, g, or t
  misc_feature (849)..(849): n is a, c, g, or t
  misc_feature (851)..(851): n is a, c, g, or t
  misc_feature (856)..(856): n is a, c, g, or t
  misc_feature (861)..(861): n is a, c, g, or t
gaggctgggtttgaatcggccgaggcagtggacagtctgttcaataccaccttcgtctgcacagtcaccaatgccgtgggcatgggccgcgctgagcaggtcatctttgtccgagaaacccccagggcctcgccccgagatgtgggcccgctggtgtggggggccgtgggggggacactgctggtgctgctgcttctggctggggggtccttggccttcatcctgctgagggtgaggaggaggaggaagagccctggaggagcaggaggaggagccagtggcgacgggggattctacgatccgaaagctcaggtgttgggaaatggggaccccgtcttctggacaccagtagtccctggtcccatggaaccagatggcaaggatgaggaggaggaggaggaggaagagaaggcagagaaaggcctcatgttgcctccacccccagcactcgaggatgacatggagtcccagctggacggctccctcatctcacggcgggcagtttatgtgtgacctggacacagacagagacagagccaggcccggccctcccgcccccgacctgaccacgccggcctagggttccagactggttggacttgttcgtctggacgacactggagtggaacactgcctcccactttcttgggacttggagggaggtggaacagcacactggacttctcccgtctctagggctgcatggggagcccggggagctgagtagtggggatccagagaggacccccgcccccagagacttggttttggctccagccttcccctggccccgtgacactcaggagttaataaatgccttggaggaaaacaaananaannaaaaaaaancncgaanaaagnacacacactctagggcactttgggcattccaatccccctaatttcccactataaagcctatcaggcactaggaactcaccctccggggacagacgccttgggaccaaagacccctccgagcctaattgccccacgagattcctattccccacaagggtatttttggccacagagtggccacagtaccatcccaaaaaaccttgcacattagtctagcgaggtggaaaatttccggaaatttatgtgcgcccaccgcggtccctccccgtggatacacggtctgcagattggggcagtttagaggggtaacccccgtgtgtaaaagccctgtgatgttgagacaaaaactttcccccgtggaggagccccccgtgtatgcaggcgcggagggagtacggcttaaacccccggt

SEQ ID NO: 367149 - DNA, 1111 bp, Homo sapiens
ggatcctgtgacgtcagcgggttcgaaccgccggagctgagcgagaggccgggggtgccgagccgggcggggagagctgggccgggagagcagaacagggaggctagagcgcagcgggaaccggcccggagccggagccggagccccacaggcacctactaaaccgcccagccgatcggcccccacagagtggcccgcggttttttttggcctgggcccagtcacccctccacagggcccatacaatagagcccctggagccagactagcaccataccatagaacgtcagaagactacggcacagccagacagcgaaccagcatgcatagtgcgccatgatagcctagcattgactagcatagacatcccataggaaatatcccagagaagacccacaaggggatagctagacggaggtttacaaaggttgacattatcgctcagtatgtgttgacagcacgggccccaacgacttcagagaggaggacaaccgatagtgaaggaaatagacaacgatgaacacaaccacttgacataggcacaacacatagataacgcttgagcaacataggttaacatttacgtcgccacatgggatgcagcacgttggagctaagacagaaccaacaagagaaattggccaaccacagttgcagcacaagcaccataccccaaggaaacactggtttgcgacccaggcaccagttgttacgcgcaacacccggatcatcatcacactttgaggagggttccccaccaagaacatttaccaccacaaccaagagcgagcccgacaaggacaccattacgaacagcaagcccgggacaagcaccgcatgacattagagatcacccatattacacaagtcacaaccatttggcaccacaacatggtacaactggcaacgaccacagcccattggcaacagaccatcgaatcgaaacccgatccgcaatggcaaggggtacccacagaaaagcacattcccaagcagggcaaaacgggccaccagaacaggaccaattgcgtaacgcccaagtataccgcaaacacagaagtcgaacccattcgaaacccaaggcggataggaagaaacgagagaaaccagg

SEQ ID NO: 367150 - DNA, 2708 bp, Homo sapiens
ggatcctgtgacgtcagcgggttcgaaccgccggagctgagcgagaggccgggggtgccgagccgggcggggagagctgggccgggagagcagaacagggaggctagagcgcagcgggaaccggcccggagccggagccggagccccacaggcacctactaaaccgcccagccgatcggcccccacagagtggcccgcgggcctccggccgggcccagtcccctcccgggccctccatggcccgggccgctgccctcctgccgtcgagatcgccgccgacgccgctgctgtggccgctgctgctgctgctgctcctggaaaccggagcccaggatgtgcgagttcaagtgctacccgaggtgcgaggccagctcgggggcaccgtggagctgccgtgccacctgctgccacctgttcctggactgtacatctccctggtgacctggcagcgcccagatgcacctgcgaaccaccagaatgtggccgccttccaccctaagatgggtcccagcttccccagcccgaagcctggcagcgagcggctgtccttcgtctctgccaagcagagcactgggcaagacacagaggcagagctccaggacgccacgctggccctccacgggctcacggtggaggacgagggcaactacacttgcgagtttgccaccttccccaaggggtccgtccgagggatgacctggctcagagtcatagccaagcccaagaaccaagctgaggcccagaaggtcacgttcagccaggaccctacgacagtggccctctgcatctccaaagagggccgcccacctgcccggatctcctggctctcatccctggactgggaagccaaagagactcaggtgtcagggaccctggccggaactgtcactgtcaccagccgcttcaccttggtgccctcgggccgagcagatggtgtcacggtcacctgcaaagtggagcatgagagcttcgaggaaccagccctgatacctgtgaccctctctgtacgctaccctcctgaagtgtccatctccggctatgatgacaactggtacctcggccgtactgatgccaccctgagctgtgacgtccgcagcaacccagagcccacgggctatgactggagcacgacctcaggcaccttcccgacctccgcagtggcccagggctcccagctggtcatccacgcagtggacagtctgttcaataccaccttcgtctgcacagtcaccaatgccgtgggcatgggccgcgctgagcaggtcatctttgtccgagagacccccaacacagcaggcgcaggggccacaggcggcatcatcgggggcatcatcgccgccatcattgctactgctgtggctgccacgggcatccttatctgccggcagcagcggaaggagcagacgctgcagggggcagaggaggacgaagacctggagggacctccctcctacaagccaccgaccccaaaagcgaagctggaggcacaggagatgccctcccagctcttcactctgggggcctcggagcacagcccactcaagaccccctactttgatgctggcgcctcatgcactgagcaggaaatgcctcgataccatgagctgcccaccttggaagaacggtcaggacccttgcaccctggagccacaagcctggggtcccccatcccggtgcctccagggccacctgctgtggaagacgtttccctggatctagaggatgaggagggggaggaggaggaagagtatctggacaagatcaaccccatctatgatgctctgtcctatagcagcccctctgattcctaccagggcaaaggctttgtcatgtcccgggccatgtatgtgtgagctgccatgcgcctggcgtctcacatctcacctgttgatcccttagctttcttgccaaggatctagtgccccctgacctctggccaggccactgtcagttaacacatatgcattccatttgtgatgtctaccttggtggctccactatgacccctaacccatgagcccagagaaattcaccgtgataatggaatcctggcaaccttatctcatgaggcaggaggtggggaaggtgcttctgcacaacctctgatcccaaggactcctctcccagactgtgaccttagaccatacctctcaccccccaatgcctcgactcccccaaaatcacaaagaagaccctagacctataatttgtcttcaggtagtaaattcccaataggtctgctggagtgggcgctgagggctccctgctgctcagacctgagccctccaggcagcagggtcccacttaccccctccccaccctgttccccaaaggtgggaaagaggggattccccagcccaaggcagggttttcccagcaccctcctgtaagcagaagtctcagggtccagacccttccctgagcccccacccccaccccaattcctgcctaccaagcaagcagccccagcctagggtcagacagggtgagcctcatacagactgtgccttgatggccccagccttgggagaagaatttactgttaacctggaagactactgaatcattttacccttgcccagtggaataggacctaaacatcccccttccggggaaagtgggtcatctgaattgggggtagcaattgatactgttttgtaaactacatttcctacaaaatatgaatttatactttgaaaaaaaagcct

SEQ ID NO: 367151 - DNA, 2557 bp, Homo sapiens
ggatcctgtgacgtcagcgggttcgaaccgccggagctgagcgagaggccgggggtgccgagccgggcggggagagctgggccgggagagcagaacagggaggctagagcgcagcgggaaccggcccggagccggagccggagccccacaggcacctactaaaccgcccagccgatcggcccccacagagtggcccgcgggcctccggccgggcccagtcccctcccgggccctccatggcccgggccgctgccctcctgccgtcgagatcgccgccgacgccgctgctgtggccgctgctgctgctgctgctcctggaaaccggagcccaggatgtgcgagttcaagtgctacccgaggtgcgaggccagctcgggggcaccgtggagctgccgtgccacctgctgccacctgttcctggactgtacatctccctggtgacctggcagcgcccagatgcacctgcgaaccaccagaatgtggccgccttccaccctaagatgggtcccagcttccccagcccgaagcctggcagcgagcggctgtccttcgtctctgccaagcagagcactgggcaagacacagaggcagagctccaggacgccacgctggccctccacgggctcacggtggaggacgagggcaactacacttgcgagtttgccaccttccccaaggggtccgtccgagggatgacctggctcagagtcatagccaagcccaagaaccaagctgaggcccagaaggtcacgttcagccaggaccctacgacagtggccctctgcatctccaaagagggccgcccacctgcccggatctcctggctctcatccctggactgggaagccaaagagactcaggtgtcagggaccctggccggaactgtcactgtcaccagccgcttcaccttggtgccctcgggccgagcagatggtgtcacggtcacctgcaaagtggagcatgagagcttcgaggaaccagccctgatacctgtgaccctctctgtacgctaccctcctgaagtgtccatctccggctatgatgacaactggtacctcggccgtactgatgccaccctgagctgtgacgtccgcagcaacccagagcccacgggctatgactggagcacgacctcaggcaccttcccgacctccgcagtggcccagggctcccagctggtcatccacgcagtggacagtctgttcaataccaccttcgtctgcacagtcaccaatgccgtgggcatgggccgcgctgagcaggtcatctttgtccgagagacccccaacacagcaggcgcaggggccacaggcggcatcatcgggggcatcatcgccgccatcattgctactgctgtggctgccacgggcatccttatctgccggcagcagcggaaggagcagacgctgcagggggcagaggaggacgaagagaaatgcctcgataccatgagctgcccaccttggaagaacggtcaggacccttgcaccctggagccacaagcctggggtcccccatcccggtgcctccagggccacctgctgtggaagacgtttccctggatctagaggatgaggagggggaggaggaggaagagtatctggacaagatcaaccccatctatgatgctctgtcctatagcagcccctctgattcctaccagggcaaaggctttgtcatgtcccgggccatgtatgtgtgagctgccatgcgcctggcgtctcacatctcacctgttgatcccttagctttcttgccaaggatctagtgccccctgacctctggccaggccactgtcagttaacacatatgcattccatttgtgatgtctaccttggtggctccactatgacccctaacccatgagcccagagaaattcaccgtgataatggaatcctggcaaccttatctcatgaggcaggaggtggggaaggtgcttctgcacaacctctgatcccaaggactcctctcccagactgtgaccttagaccatacctctcaccccccaatgcctcgactcccccaaaatcacaaagaagaccctagacctataatttgtcttcaggtagtaaattcccaataggtctgctggagtgggcgctgagggctccctgctgctcagacctgagccctccaggcagcagggtcccacttaccccctccccaccctgttccccaaaggtgggaaagaggggattccccagcccaaggcagggttttcccagcaccctcctgtaagcagaagtctcagggtccagacccttccctgagcccccacccccaccccaattcctgcctaccaagcaagcagccccagcctagggtcagacagggtgagcctcatacagactgtgccttgatggccccagccttgggagaagaatttactgttaacctggaagactactgaatcattttacccttgcccagtggaataggacctaaacatcccccttccggggaaagtgggtcatctgaattgggggtagcaattgatactgttttgtaaactacatttcctacaaaatatgaatttatactttgaaaaaaaagcct

SEQ ID NO: 367152 - DNA, 2502 bp, Homo sapiens
ggatcctgtgacgtcagcgggttcgaaccgccggagctgagcgagaggccgggggtgccgagccgggcggggagagctgggccgggagagcagaacagggaggctagagcgcagcgggaaccggcccggagccggagccggagccccacaggcacctactaaaccgcccagccgatcggcccccacagagtggcccgcgggcctccggccgggcccagtcccctcccgggccctccatggcccgggccgctgccctcctgccgtcgagatcgccgccgacgccgctgctgtggccgctgctgctgctgctgctcctggaaaccggagcccaggatgtgcgagttcaagtgctacccgaggtgcgaggccagctcgggggcaccgtggagctgccgtgccacctgctgccacctgttcctggactgtacatctccctggtgacctggcagcgcccagatgcacctgcgaaccaccagaatgtggccgccttccaccctaagatgggtcccagcttccccagcccgaagcctggcagcgagcggctgtccttcgtctctgccaagcagagcactgggcaagacacagaggcagagctccaggacgccacgctggccctccacgggctcacggtggaggacgagggcaactacacttgcgagtttgccaccttccccaaggggtccgtccgagggatgacctggctcagagtcatagccaagcccaagaaccaagctgaggcccagaaggtcacgttcagccaggaccctacgacagtggccctctgcatctccaaagagggccgcccacctgcccggatctcctggctctcatccctggactgggaagccaaagagactcaggtgtcagggaccctggccggaactgtcactgtcaccagccgcttcaccttggtgccctcgggccgagcagatggtgtcacggtcacctgcaaagtggagcatgagagcttcgaggaaccagccctgatacctgtgaccctctctgtacgctaccctcctgaagtgtccatctccggctatgatgacaactggtacctcggccgtactgatgccaccctgagctgtgacgtccgcagcaacccagagcccacgggctatgactggagcacgacctcaggcaccttcccgacctccgcagtggcccagggctcccagctggtcatccacgcagtggacagtctgttcaataccaccttcgtctgcacagtcaccaatgccgtgggcatgggccgcgctgagcaggtcatctttgtccgagagacccccaacacagcaggcgcaggggccacaggcggcatcatcgggggcatcatcgccgccatcattgctactgctgtggctgccacgggcatccttatctgccggcagcagcggaaggagcagacgctgcagggggcagaggaggacgaagacctggagggacctccctcctacaagccaccgaccccaaaagcgaagctggaggcacaggagatgccctcccagctcttcactctgggggcctcggagcacagcccactcaagaccccctactttgatgctggcgcctcatgcactgagcaggaaatgcctcgataccatgagctgcccaccttggaagaacggtcaggacccttgcaccctggagccacaagcctggggtcccccatcccggtgcctccagggccacctgctgtggaagacgtttccctggatctagaggatgaggagggggaggaggaggaagagtatctggacaagatcaaccccatctatgatgctctgtcctatagcagcccctctgattcctaccagggcaaaggctttgtcatgtcccgggccatgtatgtgtgagctgccatgcgcctggcgtctcacatctcacctgttgatcccttagctttcttgccaaggatctagtgccccctgacctctggccaggccactgtcagttaacacatatgcattccatttgtgatgtctaccttggtggctccactatgacccctaacccatgagcccagagaaattcaccgtgataatggaatcctggcaaccttatctcatgaggcaggaggtggggaaggtgcttctgcacaacctctgatcccaaggactcctctcccagactgtgaccttagaccatacctctcaccccccaatgcctcgactcccccaaaatcacaaagaagaccctagacctataatttgtcttcaggtagtaaattcaccccaattcctgcctaccaagcaagcagccccagcctagggtcagacagggtgagcctcatacagactgtgccttgatggccccagccttgggagaagaatttactgttaacctggaagactactgaatcattttacccttgcccagtggaataggacctaaacatcccccttccggggaaagtgggtcatctgaattgggggtagcaattgatactgttttgtaaactacatttcctacaaaatatgaatttatactttgaaaaaaaagcct

SEQ ID NO: 367153 - DNA, 2068 bp, Homo sapiens
ggatcctgtgacgtcagcgggttcgaaccgccggagctgagcgagaggccgggggtgccgagccgggcggggagagctgggccgggagagcagaacagggaggctagagcgcagcgggaaccggcccggagccggagccggagccccacaggcacctactaaaccgcccagccgatcggcccccacagagtggcccgcgggcctccggccgggcccagtcccctcccgggccctccatggcccgggccgctgccctcctgccgtcgagatcgccgccgacgccgctgctgtggccgctgctgctgctgctgctcctggaaaccggagcccaggatgtgcgagttcaagtgctacccgaggtgcgaggccagctcgggggcaccgtggagctgccgtgccacctgctgccacctgttcctggactgtacatctccctggtgacctggcagcgcccagatgcacctgcgaaccaccagaatgtggccgccttccaccctaagatgggtcccagcttccccagcccgaagcctggcagcgagcggctgtccttcgtctctgccaagcagagcactgggcaagacacagaggcagagctccaggacgccacgctggccctccacgggctcacggtggaggacgagggcaactacacttgcgagtttgccaccttccccaaggggtccgtccgagggatgacctggctcagagtcatagccaagcccaagaaccaagctgaggcccagaaggtcacgttcagccaggaccctacgacagtggccctctgcatctccaaagagggccgcccacctgcccggatctcctggctctcatccctggactgggaagccaaagagactcaggtgtcagggaccctggccggaactgtcactgtcaccagccgcttcaccttggtgccctcgggccgagcagatggtgtcacggtcacctgcaaagtggagcatgagagcttcgaggaaccagccctgatacctgtgaccctctctgtacgctaccctcctgaagtgtccatctccggctatgatgacaactggtacctcggccgtactgatgccaccctgagctgtgacgtccgcagcaacccagagcccacgggctatgactggagcacgacctcaggcaccttcccgacctccgcagtggcccagggctcccagctggtcatccacgcagtggacagtctgttcaataccaccttcgtctgcacagtcaccaatgccgtgggcatgggccgcgctgagcaggtcatctttgtccgagaaacccccagggcctcgccccgagatgtgggcccgctggtgtggggggccgtgggggggacactgctggtgctgctgcttctggctggggggtccttggccttcatcctgctgagggtgaggaggaggaggaagagccctggaggagcaggaggaggagccagtggcgacgggggattctacgatccgaaagctcaggtgttgggaaatggggaccccgtcttctggacaccagtagtccctggtcccatggaaccagatggcaaggatgaggaggaggaggaggaggaagagaaggcagagaaaggcctcatgttgcctccacccccagcactcgaggatgacatggagtcccagctggacggctccctcatctcacggcgggcagtttatgtgtgacctggacacagacagagacagagccaggcccggccctcccgcccccgacctgaccacgccggcctagggttccagactggttggacttgttcgtctggacgacactggagtggaacactgcctcccactttcttgggacttggagggaggtggaacagcacactggacttctcccgtctctagggctgcatggggagcccggggagctgagtagtggggatccagagaggacccccgcccccagagacttggttttggctccagccttcccctggccccgtgacactcaggagtggggatccaaaaaggacccccgcccccaaaaacttggttttggctccagccttcccctggccccgtgacactcaggagctcataaatgccttggagga

SEQ ID NO: 367154 - DNA, 1755 bp, Homo sapiens
ggatcctgtgacgtcagcgggttcgaaccgccggagctgagcgagaggccgggggtgccgagccgggcggggagagctgggccgggagagcagaacagggaggctagagcgcagcgggaaccggcccggagccggagccggagccccacaggcacctactaaaccgcccagccgatcggcccccacagagtggcccgcgggcctccggccgggcccagtcccctcccgggccctccatggcccgggccgctgccctcctgccgtcgagatcgccgccgacgccgctgctgtggccgctgctgctgctgctgctcctggaaaccggagcccaggatgtgcgagttcaagtgctacccgaggtgcgaggccagctcgggggcaccgtggagctgccgtgccacctgctgccacctgttcctggactgtacatctccctggtgacctggcagcgcccagatgcacctgcgaaccaccagaatgtggccgccttccaccctaagatgggtcccagcttccccagcccgaagcctggcagcgagcggctgtccttcgtctctgccaagcagagcactgggcaagacacagaggcagagctccaggacgccacgctggccctccacgggctcacggtggaggacgagggcaactacacttgcgagtttgccaccttccccaaggggtccgtccgagggatgacctggctcagagtcatagccaagcccaagaaccaagctgaggcccagaaggtcacgttcagccaggaccctacgacagtggccctctgcatctccaaagagggccgcccacctgcccggatctcctggctctcatccctggactgggaagccaaagagactcaggtgtcagggaccctggccggaactgtcactgtcaccagccgcttcaccttggtgccctcgggccgagcagatggtgtcacggtcacctgcaaagtggagcatgagagcttcgaggaaccagccctgatacctgtgaccctctctgtacgctaccctcctgaagtgtccatctccggctatgatgacaactggtacctcggccgtactgatgccaccctgagctgtgacgtccgcagcaacccagagcccacgggctatgactggagcacgacctcaggcaccttcccgacctccgcagtggcccagggctcccagctggtcatccacgcagtggacagtctgttcaataccaccttcgtctgcacagtcaccaatgccgtgggcatgggccgcgctgagcaggtcatctttgtccgagagacccccaacacagcaggcgcaggggccacaggcggcatcatcgggggcatcatcgccgccatcattgctactgctgtggctgccacgggcatccttatctgccggcagcagcggaaggagcagacgctgcagggggcagaggaggacgaagacctggagggacctccctcctacaagccaccgaccccaaaagcgaagctggaggcacaggagatgccctcccagctcttcactctgggggcctcggagcacagcccactcaagaccccctactttgatgctggcgcctcatgcactgagcagaaatgctcgatacatgagctgccccttggagaggtcggacctgccctggggcccagctgggtccccctccgtgctccgggcctggtggggacgttcttgtttagatgggggggggggaatttggatccctttttttgcttgcctgtttcggagtgttgtcgcttttgtcctg

SEQ ID NO: 367155 - DNA, 1489 bp, Homo sapiens
ggatcctgtgacgtcagcgggttcgaaccgccggagctgagcgagaggccgggggtgccgagccgggcggggagagctgggccgggagagcagaacagggaggctagagcgcagcgggaaccggcccggagccggagccggagccccacaggcacctactaaaccgcccagccgatcggcccccacagagtggcccgcgggcctccggccgggcccagtcccctcccgggccctccatggcccgggccgctgccctcctgccgtcgagatcgccgccgacgccgctgctgtggccgctgctgctgctgctgctcctggaaaccggagcccaggatgtgcgagttcaagtgctacccgaggtgcgaggccagctcgggggcaccgtggagctgccgtgccacctgctgccacctgttcctggactgtacatctccctggtgacctggcagcgcccagatgcacctgcgaaccaccagaatgtggccgccttccaccctaagatgggtcccagcttccccagcccgaagcctggcagcgagcggctgtccttcgtctctgccaagcagagcactgggcaagacacagaggcagagctccaggacgccacgctggccctccacgggctcacggtggaggacgagggcaactacacttgcgagtttgccaccttccccaaggggtccgtccgagggatgacctggctcagagtcatagccaagcccaagaaccaagctgaggcccagaaggtcacgttcagccaggaccctacgacagtggccctctgcatctccaaagagggccgcccacctgcccggatctcctggctctcatccctggactgggaagccaaagagactcaggtgtcagggaccctggccggaactgtcactgtcaccagccgcttcaccttggtgccctcgggccgagcagatggtgtcacggtcacctgcaaagtggagcatgagagcttcgaggaaccagccctgatacctgtgaccctctctgtacgctaccctcctgaagtgtccatctccggctatgatgacaactggtacctcggccgtactgatgccaccctgagctgtgacgtccgcagcaacccagagcccacgggctatgactggagcacgacctcaggcaccttcccgacctccgcagtggcccagggctcccagctggtcatccacgcagtggacagtctgttcaataccaccttcgtctgcacagtcaccaatgccgtgggcatgggccgcgctgagcaggtcatctttgtccgaggtgagtgggtcttgggggccgtgtgtggagacctgggtccgctcccctggagttctgcccttcaggacttggggctgcactgggggaggctgcgccgccgacctgggagggatgcagacctgcctggctgaggggagatgagggttggccttcccctcgtggcctcagactggggtctggatttggggtgtcggggtaggtgaaggcagca

SEQ ID NO: 367156 - DNA, 1262 bp, Homo sapiens
  misc_feature (823)..(823): n is a, c, g, or t
  misc_feature (825)..(825): n is a, c, g, or t
  misc_feature (828)..(829): n is a, c, g, or t
  misc_feature (838)..(838): n is a, c, g, or t
  misc_feature (840)..(840): n is a, c, g, or t
  misc_feature (845)..(845): n is a, c, g, or t
  misc_feature (850)..(850): n is a, c, g, or t
cgctaggtacgagctggggttaatcggcaccgaggtacacttcgtctgcacagtcaccaatgccgtgggcatgggccgcgctgagcaggtcatctttgtccgagaaacccccagggcctcgccccgagatgtgggcccgctggtgtggggggccgtgggggggacactgctggtgctgctgcttctggctggggggtccttggccttcatcctgctgagggtgaggaggaggaggaagagccctggaggagcaggaggaggagccagtggcgacgggggattctacgatccgaaagctcaggtgttgggaaatggggaccccgtcttctggacaccagtagtccctggtcccatggaaccagatggcaaggatgaggaggaggaggaggaggaagagaaggcagagaaaggcctcatgttgcctccacccccagcactcgaggatgacatggagtcccagctggacggctccctcatctcacggcgggcagtttatgtgtgacctggacacagacagagacagagccaggcccggccctcccgcccccgacctgaccacgccggcctagggttccagactggttggacttgttcgtctggacgacactggagtggaacactgcctcccactttcttgggacttggagggaggtggaacagcacactggacttctcccgtctctagggctgcatggggagcccggggagctgagtagtggggatccagagaggacccccgcccccagagacttggttttggctccagccttcccctggccccgtgacactcaggagttaataaatgccttggaggaaaacaaananaannaaaaaaaancncgaanaaagnacacacactctagggcactttgggcattccaatccccctaatttcccactataaagcctatcaggcactaggaactcaccctccggggacagacgccttgggaccaaagacccctccgagcctaattgccccacgagattcctattccccacaagggtatttttggccacagagtggccacagtaccatcccaaaaaaccttgcacattagtctagcgaggtggaaaatttccggaaatttatgtgcgcccaccgcggtccctccccgtggatacacggtctgcagattggggcagtttagaggggtaacccccgtgtgtaaaagccctgtgatgttgagacaaaaactttcccccgtggaggagccccccgtgtatgcaggcgcggagggagtacggcttaaacccccggt

SEQ ID NO: 367157 - DNA, 1134 bp, Homo sapiens
gcggcccaggcccggaaccttccctggtcgtgcgccctatgtaaggccagccgcggcaggaccaaggcggcggtgtcagctcgcgagcctaccctccgcggacggtcttgggtcgcctgctgcctggcttgcctggtcggcggcgggtgccccgcgcgcacgcgcaaagcccgccgcgttccccgaccccaggccgcgctctgtgggcctctgagggcggcatgcgggactacgacgaggtgaccgccttcctgggcgagtgggggcccttccagcgcctcatcttcttcctgctcagcgccagcatcatccccaatggcttcaccggcctgtcctccgtgttcctgatagcgaccccggagcaccgctgccgggtgccggacgccgcgaacctgagcagcgcctggcgcaaccacactgtcccactgcggctgcgggacggccgcgaggtgccccacagctgccgccgctaccggctcgccaccatcgccaacttctcggcgctcgggctggagccggggcgcgacgtggacctggggcagctggagcaggagagctgtctggatggctgggagttcagtcaggacgtctacctgtccaccattgtgaccgaggtgggtgccggcccctgctggggctgagaccagggctcggaggacctgtcgcggtccttgaacccgagctcctctctcccagatgcgcactggacgctgtcactccccctcccccaacggtcaacaccctagcgatggagaccctccagccaggtggcttgggaacgcttcacgaggtgacctccagccacagtgtgctcctccctgcacaggtggtcagtctggcctcccgtcctgatggccactttgaagagggtaccaggaaggtcctggcggtccctgggcgatgctctatggccctgtgtgtccaggacttactctagttggggttgggggtggtaagtagcagagccaggacttgggccaggggctatcccgtttttcctctagtctcttgatttctttttagaagagaagaaatacttctctttcctgaacttttaaaagttaaataaagcatgtgtatacaactgcctcttccctttttcctctagttactccttcccctaccgtccacaac

SEQ ID NO: 367158 - DNA, 2086 bp, Homo sapiens
  misc_feature (14)..(14): n is a, c, g, or t
  misc_feature (16)..(16): n is a, c, g, or t
  misc_feature (19)..(19): n is a, c, g, or t
  misc_feature (24)..(24): n is a, c, g, or t
  misc_feature (27)..(27): n is a, c, g, or t
  misc_feature (56)..(56): n is a, c, g, or t
agacaactcttgtngnganacccnaanatttgaaaacaccggtttgtggtgttaanaaaaaaaaggcagctgtacgcgaatccggatcgatgtcacaatcatgtcatatgcttgtgatgaccatatcagtgggctattttgggctttcgcttgatactcctaacttgcatggggacatctttgtgaactgcttcctttcagcgatggttgaagtcccagcatatgtgttggcctggctgctgctgcaatatttgccccggcgctattccatggccactgccctcttcctgggtggcagtgtccttctcttcatgcagctggtacccccagacttgtattatttggctacagtcctggtgatggtgggcaagtttggagtcacggctgccttttccatggtctacgtgtacacagccgagctgtatcccacagtggtgagaaacatgggtgtgggagtcagctccacagcatcccgcctgggcagcatcctgtctccctacttcgtttaccttggtgcctacgaccgcttcctgccctacattctcatgggaagtctgaccatcctgacagccatcctcaccttgtttctcccagagagcttcggtaccccactcccagacaccattgaccagatgctaagagtcaaaggaatgaaacacagaaaaactccaagtcacacaaggatgttaaaagatggtcaagaaaggcccacaatccttaaaagcacagccttctaacatcgcttccagtaagggagaaactgaagaggaaagactgtcttgccagaaatggccagcttgtgcagactccgagtccttcagtgacaaaggcctttgctgtttgtcctcttgacctgtgtctgacttgctcctggatgggcacccacactcagaggctacatatggccctagagcaccaccttcctctagggacactggggctacctacagacaacttcatctaagtcctaactattacaatgatggactcagcacctccaaagcagttaatttttcactagaaccagtgagatctggaggaatgtgagaagcatatgctaaatgtacattttaattttagactacttgaaaaggcccctaataaggctagaggtctaagtcccccacccctttccccactcccctctagtggtgaactttagaggaaaaggaagtaattgcacaaggagtttgattcttaccttttctcagttacagaggacattaactggatcattgcttccccagggcaggagagcgcagagctagggaaagtgaaaggtaatgaagatggagcagaatgagcagatgcagatcaccagcaaagtgcactgatgtgtgagctcttaagaccactcagcatgacgactgagtagacttgtttacatctgatcaaagcactgggcttgtccaggctcataataaatgctccattgaatctactattcttgttttccactgctgtggaaacctccttgctactatagcgtcttatgtatggtttaaaggaaatttatcaggtgagagagatgagcaacgttgtcttttctctcaaagctgtaatgtgggttttgttttactgtttatttgtttgttgttgtatccttttctccttgttatttgcccttcagaatgcacttgggaaaggctggttccttagcctcctggtttgtgtctttttttttttttttttaaacacagaatcactctggcaattgtctgcagctgccactggtgcaaggccttaccagccctagcctctagcacttctctaagtgccaaaaacagtgtcattgtgtgtgttcctttcttgatacttagtcatgggaggatattacaaaaaagaaatttaaattgtgttcatagtctttcagagtagctcactttagtcctgtaactttattgggtgatattttgtgttcagtgtaattgtcttctctttgctgattatgttaccatggtactcctaaagcatatgcctcacctggttaaaaaagaacaaacatgtttttgtgaaagctactgaagtgccttgggaaatgagaaagttttaataagtaaaatgattttttaaatatcaaaaaaag

SEQ ID NO: 367159 - DNA, 1559 bp, Homo sapiens
gcggcccaggcccggaaccttccctggtcgtgcgccctatgtaaggccagccgcggcaggaccaaggcggcggtgtcagctcgcgagcctaccctccgcggacggtcttgggtcgcctgctgcctggcttgcctggtcggcggcgggtgccccgcgcgcacgcgcaaagcccgccgcgttccccgaccccaggccgcgctctgtgggcctctgagggcggcatgcgggactacgacgaggtgaccgccttcctgggcgagtgggggcccttccagcgcctcatcttcttcctgctcagcgccagcatcatccccaatggcttcaccggcctgtcctccgtgttcctgatagcgaccccggagcaccgctgccgggtgccggacgccgcgaacctgagcagcgcctggcgcaaccacactgtcccactgcggctgcgggacggccgcgaggtgccccacagctgccgccgctaccggctcgccaccatcgccaacttctcggcgctcgggctggagccggggcgcgacgtggacctggggcagctggagcaggagagctgtctggatggctgggagttcagtcaggacgtctacctgtccaccattgtgaccgagtggaacctggtgtgtgaggacgactggaaggccccactcacaatctccttgttcttcgtgggtgtgctgttgggctccttcatttcagggcagctgtcagacaggtttggccggaagaatgtgctgttcgtgaccatgggcatgcagacaggcttcagcttcctgcagatcttctcgaagaattttgagatgtttgtcgtgctgtttgtccttgtaggcatgggccagatctccaactatgtggcagcatttgtcctggggacagaaattcttggcaagtcagttcgtataatattctctacgttaggagtgtgcatattttatgcatttggctacatggtgctgccactgtttgcttacttcatccgagactggcggatgctgctggtggcgctgacgatgccgggggtgctgtgcgtggcactctggtggttcatccctgagtccccccgatggctcatctctcagggacgatttgaagaggcagaggtgatcatccgcaaggctgccaaagccaatgggattgttgtgccttccactatctttgacccgagtgagttacaagacctaagttccaagaagcagcagtcccacaacattctggatctgcttcgaacctggaatatccggatggtcaccatcatgtccataatgctgtggtatgtaaaagagacctgcctgaggcttccagacaaagcttcttgaagtggccattgggcctcttgtttacagacatgcctcagacaaaattcaaagcctatgtcatcagagagtgaaaaggatatgtcttgtgttagatggaaaaaatgggcatgtcacaattcttaatgggatggaacctcagaaaaggagaatgaaaacaattgtggaggctgttgtgggaggatcgcctgagcccaggagttcaagaccagtttaggcaacatggtggaaccctgtgtctac

SEQ ID NO: 367160 - DNA, 1019 bp, Homo sapiens
ctaactctggaaaaacaagctccaaacctgggtttgcttaagaaagcaacatcagtgtgtttagacgtgtggtttattaatggccttggctgtgctgaatttcataggaagtcactctgggtgaagctcaggtcaattttcctgtttttctatttgaattctttttccctggaagcacaccagtaactacatagtataaggactcaaaacattaacttttaaaaaatatcagaccaataaaccacacagccaggtactctctctgacccagagggcagggagccaggcttcgggaggaatacttagaggcctccttggaatgtggccaccgacaggaatatgtgggggtgcagtgaggaagctgtcagcctgggcctctgtcttcctgtacccttgagggactggtcacttacttttcctcattttcattcactctgatttgttactgacaaggcctagggaagttttcacagcctaaaacacagtcagtatacttactgttcttagaaacgtaacactccccgacgctgagatgcagacagctaagatgccagggattcaagtatgttattgtgtgctctgagtctctgaccacctcttcttcccatacacttatgatgttgttcctgcagttacaagacctaagttccaagaagcagcagtcccacaacattctggatctgcttcgaacctggaatatccggatggtcaccatcatgtccataatgctgtggtatgtaaaagagacctgcctgaggcttccagacaaagcttcttgaagtggccattgggcctcttgtttacagacatgcctcagacaaaattcaaagcctatgtcatcagagagtgaaaaggatatgtcttgtgttagatggaaaaaatgggcatgtcacaattcttaatgggatggaacctcagaaaaggagaatgaaaacaattgtggaggctgttgtgggaggatcgcctgagcccaggagttcaagaccagtttaggcaacatggtggaaccctgtgtctac

SEQ ID NO: 367161 - DNA, 256 bp, Homo sapiens
ttgtccttgtaggcatgggccagatctccaactatgtggcagcatttgtcctgggtatggccatcaggttggagttgagtacttgatcctgtatttcaccatcatcccatcacctacctttctggagacagctgtgatgtccctcaagggggacagggtttctaacaaaactagccagagcttcctggtgaaccttacttacaggcagggaaactgagccagacatgagaccagcctggggtccccagcagcacaa

SEQ ID NO: 367162 - DNA, 150 bp, Homo sapiens
ggctgccaaagccaatgggattgttgtgccttccactatctttgacccgagtgaggtaagcaccatgtgggtgtgggtgagagggacagactgaccgtgatttgagagcagcagcacccagccctgaagtcctccctgctcacagcagcc

SEQ ID NO: 367163 - DNA, 3244 bp, Homo sapiens
gcggcccaggcccggaaccttccctggtcgtgcgccctatgtaaggccagccgcggcaggaccaaggcggcggtgtcagctcgcgagcctaccctccgcggacggtcttgggtcgcctgctgcctggcttgcctggtcggcggcgggtgccccgcgcgcacgcgcaaagcccgccgcgttccccgaccccaggccgcgctctgtgggcctctgagggcggcatgcgggactacgacgaggtgaccgccttcctgggcgagtgggggcccttccagcgcctcatcttcttcctgctcagcgccagcatcatccccaatggcttcaccggcctgtcctccgtgttcctgatagcgaccccggagcaccgctgccgggtgccggacgccgcgaacctgagcagcgcctggcgcaaccacactgtcccactgcggctgcgggacggccgcgaggtgccccacagctgccgccgctaccggctcgccaccatcgccaacttctcggcgctcgggctggagccggggcgcgacgtggacctggggcagctggagcaggagagctgtctggatggctgggagttcagtcaggacgtctacctgtccaccattgtgaccgagtggaacctggtgtgtgaggacgactggaaggccccactcacaatctccttgttcttcgtgggtgtgctgttgggctccttcatttcagggcagctgtcagacaggtttggccggaagaatgtgctgttcgtgaccatgggcatgcagacaggcttcagcttcctgcagatcttctcgaagaattttgagatgtttgtcgtgctgtttgtccttgtaggcatgggccagatctccaactatgtggcagcatttgtcctggggacagaaattcttggcaagtcagttcgtataatattctctacgttaggagtgtgcatattttatgcatttggctacatggtgctgccactgtttgcttacttcatccgagactggcggatgctgctggtggcgctgacgatgccgggggtgctgtgcgtggcactctggtggttcatccctgagtccccccgatggctcatctctcagggacgatttgaagaggcagaggtgatcatccgcaaggctgccaaagccaatgggattgttgtgccttccactatctttgacccgagtgagttacaagacctaagttccaagaagcagcagtcccacaacattctggatctgcttcgaacctggaatatccggatggtcaccatcatgtccataatgctgtggatgaccatatcagtgggctattttgggctttcgcttgatactcctaacttgcatggggacatctttgtgaactgcttcctttcagcgatggttgaagtcccagcatatgtgttggcctggctgctgctgcaatatttgccccggcgctattccatggccactgccctcttcctgggtggcagtgtccttctcttcatgcagctggtacccccagacttgtattatttggctacagtcctggtgatggtgggcaagtttggagtcacggctgccttttccatggtctacgtgtacacagccgagctgtatcccacagtggtgagaaacatgggtgtgggagtcagctccacagcatcccgcctgggcagcatcctgtctccctacttcgtttaccttggtgcctacgaccgcttcctgccctacattctcatgggaagtctgaccatcctgacagccatcctcaccttgtttctcccagagagcttcggtaccccactcccagacaccattgaccagatgctaagagtcaaaggaatgaaacacagaaaaactccaagtcacacaaggatgttaaaagatggtcaagaaaggcccacaatccttaaaagcacagccttctaacatcgcttccagtaagggagaaactgaagaggaaagactgtcttgccagaaatggccagcttgtgcagactccgagtccttcagtgacaaaggcctttgctgtttgtcctcttgacctgtgtctgacttgctcctggatgggcacccacactcagaggctacatatggccctagagcaccaccttcctctagggacactggggctacctacagacaacttcatctaagtcctaactattacaatgatggactcagcacctccaaagcagttaatttttcactagaaccagtgagatctggaggaatgtgagaagcatatgctaaatgtacattttaattttagactacttgaaaaggcccctaataaggctagaggtctaagtcccccacccctttccccactcccctctagtggtgaactttagaggaaaaggaagtaattgcacaaggagtttgattcttaccttttctcagttacagaggacattaactggatcattgcttccccagggcaggagagcgcagagctagggaaagtgaaaggtaatgaagatggagcagaatgagcagatgcagatcaccagcaaagtgcactgatgtgtgagctcttaagaccactcagcatgacgactgagtagacttgtttacatctgatcaaagcactgggcttgtccaggctcataataaatgctccattgaatctactattcttgttttccactgctgtggaaacctccttgctactatagcgtcttatgtatggtttaaaggaaatttatcaggtgagagagatgagcaacgttgtcttttctctcaaagctgtaatgtgggttttgttttactgtttatttgtttgttgttgtatccttttctccttgttatttgcccttcagaatgcacttgggaaaggctggttccttagcctcctggtttgtgtctttttttttttttttttaaacacagaatcactctggcaattgtctgcagctgccactggtgcaaggccttaccagccctagcctctagcacttctctaagtgccaaaaacagtgtcattgtgtgtgttcctttcttgatacttagtcatgggaggatattacaaaaaagaaatttaaattgtgttcatagtctttcagagtagctcactttagtcctgtaactttattgggtgatattttgtgttcagtgtaattgtcttctctttgctgattatgttaccatggtactcctaaagcatatgcctcacctggttaaaaaagaacaaacatgtttttgtgaaagctactgaagtgccttgggaaatgagaaagttttaataagtaaaatgattttttaaatatcaaaaaaag

SEQ ID NO: 367164 - DNA, 3316 bp, Homo sapiens
gcggcccaggcccggaaccttccctggtcgtgcgccctatgtaaggccagccgcggcaggaccaaggcggcggtgtcagctcgcgagcctaccctccgcggacggtcttgggtcgcctgctgcctggcttgcctggtcggcggcgggtgccccgcgcgcacgcgcaaagcccgccgcgttccccgaccccaggccgcgctctgtgggcctctgagggcggcatgcgggactacgacgaggtgaccgccttcctgggcgagtgggggcccttccagcgcctcatcttcttcctgctcagcgccagcatcatccccaatggcttcaccggcctgtcctccgtgttcctgatagcgaccccggagcaccgctgccgggtgccggacgccgcgaacctgagcagcgcctggcgcaaccacactgtcccactgcggctgcgggacggccgcgaggtgccccacagctgccgccgctaccggctcgccaccatcgccaacttctcggcgctcgggctggagccggggcgcgacgtggacctggggcagctggagcaggagagctgtctggatggctgggagttcagtcaggacgtctacctgtccaccattgtgaccgagcaagacagtggggcctacaatgctatgaaaaacaggatgggaaagaagcctgctctctgccttcctgcccagtggaacctggtgtgtgaggacgactggaaggccccactcacaatctccttgttcttcgtgggtgtgctgttgggctccttcatttcagggcagctgtcagacaggtttggccggaagaatgtgctgttcgtgaccatgggcatgcagacaggcttcagcttcctgcagatcttctcgaagaattttgagatgtttgtcgtgctgtttgtccttgtaggcatgggccagatctccaactatgtggcagcatttgtcctggggacagaaattcttggcaagtcagttcgtataatattctctacgttaggagtgtgcatattttatgcatttggctacatggtgctgccactgtttgcttacttcatccgagactggcggatgctgctggtggcgctgacgatgccgggggtgctgtgcgtggcactctggtggttcatccctgagtccccccgatggctcatctctcagggacgatttgaagaggcagaggtgatcatccgcaaggctgccaaagccaatgggattgttgtgccttccactatctttgacccgagtgagttacaagacctaagttccaagaagcagcagtcccacaacattctggatctgcttcgaacctggaatatccggatggtcaccatcatgtccataatgctgtggatgaccatatcagtgggctattttgggctttcgcttgatactcctaacttgcatggggacatctttgtgaactgcttcctttcagcgatggttgaagtcccagcatatgtgttggcctggctgctgctgcaatatttgccccggcgctattccatggccactgccctcttcctgggtggcagtgtccttctcttcatgcagctggtacccccagacttgtattatttggctacagtcctggtgatggtgggcaagtttggagtcacggctgccttttccatggtctacgtgtacacagccgagctgtatcccacagtggtgagaaacatgggtgtgggagtcagctccacagcatcccgcctgggcagcatcctgtctccctacttcgtttaccttggtgcctacgaccgcttcctgccctacattctcatgggaagtctgaccatcctgacagccatcctcaccttgtttctcccagagagcttcggtaccccactcccagacaccattgaccagatgctaagagtcaaaggaatgaaacacagaaaaactccaagtcacacaaggatgttaaaagatggtcaagaaaggcccacaatccttaaaagcacagccttctaacatcgcttccagtaagggagaaactgaagaggaaagactgtcttgccagaaatggccagcttgtgcagactccgagtccttcagtgacaaaggcctttgctgtttgtcctcttgacctgtgtctgacttgctcctggatgggcacccacactcagaggctacatatggccctagagcaccaccttcctctagggacactggggctacctacagacaacttcatctaagtcctaactattacaatgatggactcagcacctccaaagcagttaatttttcactagaaccagtgagatctggaggaatgtgagaagcatatgctaaatgtacattttaattttagactacttgaaaaggcccctaataaggctagaggtctaagtcccccacccctttccccactcccctctagtggtgaactttagaggaaaaggaagtaattgcacaaggagtttgattcttaccttttctcagttacagaggacattaactggatcattgcttccccagggcaggagagcgcagagctagggaaagtgaaaggtaatgaagatggagcagaatgagcagatgcagatcaccagcaaagtgcactgatgtgtgagctcttaagaccactcagcatgacgactgagtagacttgtttacatctgatcaaagcactgggcttgtccaggctcataataaatgctccattgaatctactattcttgttttccactgctgtggaaacctccttgctactatagcgtcttatgtatggtttaaaggaaatttatcaggtgagagagatgagcaacgttgtcttttctctcaaagctgtaatgtgggttttgttttactgtttatttgtttgttgttgtatccttttctccttgttatttgcccttcagaatgcacttgggaaaggctggttccttagcctcctggtttgtgtctttttttttttttttttaaacacagaatcactctggcaattgtctgcagctgccactggtgcaaggccttaccagccctagcctctagcacttctctaagtgccaaaaacagtgtcattgtgtgtgttcctttcttgatacttagtcatgggaggatattacaaaaaagaaatttaaattgtgttcatagtctttcagagtagctcactttagtcctgtaactttattgggtgatattttgtgttcagtgtaattgtcttctctttgctgattatgttaccatggtactcctaaagcatatgcctcacctggttaaaaaagaacaaacatgtttttgtgaaagctactgaagtgccttgggaaatgagaaagttttaataagtaaaatgattttttaaatatcaaaaaaag

SEQ ID NO: 367165 - DNA, 2704 bp, Homo sapiens
ctaactctggaaaaacaagctccaaacctgggtttgcttaagaaagcaacatcagtgtgtttagacgtgtggtttattaatggccttggctgtgctgaatttcataggaagtcactctgggtgaagctcaggtcaattttcctgtttttctatttgaattctttttccctggaagcacaccagtaactacatagtataaggactcaaaacattaacttttaaaaaatatcagaccaataaaccacacagccaggtactctctctgacccagagggcagggagccaggcttcgggaggaatacttagaggcctccttggaatgtggccaccgacaggaatatgtgggggtgcagtgaggaagctgtcagcctgggcctctgtcttcctgtacccttgagggactggtcacttacttttcctcattttcattcactctgatttgttactgacaaggcctagggaagttttcacagcctaaaacacagtcagtatacttactgttcttagaaacgtaacactccccgacgctgagatgcagacagctaagatgccagggattcaagtatgttattgtgtgctctgagtctctgaccacctcttcttcccatacacttatgatgttgttcctgcagttacaagacctaagttccaagaagcagcagtcccacaacattctggatctgcttcgaacctggaatatccggatggtcaccatcatgtccataatgctgtggatgaccatatcagtgggctattttgggctttcgcttgatactcctaacttgcatggggacatctttgtgaactgcttcctttcagcgatggttgaagtcccagcatatgtgttggcctggctgctgctgcaatatttgccccggcgctattccatggccactgccctcttcctgggtggcagtgtccttctcttcatgcagctggtacccccagacttgtattatttggctacagtcctggtgatggtgggcaagtttggagtcacggctgccttttccatggtctacgtgtacacagccgagctgtatcccacagtggtgagaaacatgggtgtgggagtcagctccacagcatcccgcctgggcagcatcctgtctccctacttcgtttaccttggtgcctacgaccgcttcctgccctacattctcatgggaagtctgaccatcctgacagccatcctcaccttgtttctcccagagagcttcggtaccccactcccagacaccattgaccagatgctaagagtcaaaggaatgaaacacagaaaaactccaagtcacacaaggatgttaaaagatggtcaagaaaggcccacaatccttaaaagcacagccttctaacatcgcttccagtaagggagaaactgaagaggaaagactgtcttgccagaaatggccagcttgtgcagactccgagtccttcagtgacaaaggcctttgctgtttgtcctcttgacctgtgtctgacttgctcctggatgggcacccacactcagaggctacatatggccctagagcaccaccttcctctagggacactggggctacctacagacaacttcatctaagtcctaactattacaatgatggactcagcacctccaaagcagttaatttttcactagaaccagtgagatctggaggaatgtgagaagcatatgctaaatgtacattttaattttagactacttgaaaaggcccctaataaggctagaggtctaagtcccccacccctttccccactcccctctagtggtgaactttagaggaaaaggaagtaattgcacaaggagtttgattcttaccttttctcagttacagaggacattaactggatcattgcttccccagggcaggagagcgcagagctagggaaagtgaaaggtaatgaagatggagcagaatgagcagatgcagatcaccagcaaagtgcactgatgtgtgagctcttaagaccactcagcatgacgactgagtagacttgtttacatctgatcaaagcactgggcttgtccaggctcataataaatgctccattgaatctactattcttgttttccactgctgtggaaacctccttgctactatagcgtcttatgtatggtttaaaggaaatttatcaggtgagagagatgagcaacgttgtcttttctctcaaagctgtaatgtgggttttgttttactgtttatttgtttgttgttgtatccttttctccttgttatttgcccttcagaatgcacttgggaaaggctggttccttagcctcctggtttgtgtctttttttttttttttttaaacacagaatcactctggcaattgtctgcagctgccactggtgcaaggccttaccagccctagcctctagcacttctctaagtgccaaaaacagtgtcattgtgtgtgttcctttcttgatacttagtcatgggaggatattacaaaaaagaaatttaaattgtgttcatagtctttcagagtagctcactttagtcctgtaactttattgggtgatattttgtgttcagtgtaattgtcttctctttgctgattatgttaccatggtactcctaaagcatatgcctcacctggttaaaaaagaacaaacatgtttttgtgaaagctactgaagtgccttgggaaatgagaaagttttaataagtaaaatgattttttaaatatcaaaaaaag

SEQ ID NO: 367166 - DNA, 3450 bp, Homo sapiens
gccagaccccacccccggccccggcccgggaccccctcccctcccgggatcccccggggttcccaccccgcccgcaccgccggggacccggccggtccggcgcgagcccccgtccggggccctggctcggcccccaggttggaggagcccggagcccgccttcggagctacggcctaacggcggcggcgactgcagtctggagggtccacacttgtgattctcaatggagagtgaaaacgcagattcataatgaaaactagcccccgtcggccactgattctcaaaagacggaggctgccccttcctgttcaaaatgccccaagtgaaacatcagaggaggaacctaagagatcccctgcccaacaggagtctaatcaagcagaggcctccaaggaagtggcagagtccaactcttgcaagtttccagctgggatcaagattattaaccaccccaccatgcccaacacgcaagtagtggccatccccaacaatgctaatattcacagcatcatcacagcactgactgccaagggaaaagagagtggcagtagtgggcccaacaaattcatcctcatcagctgtgggggagccccaactcagcctccaggactccggcctcaaacccaaaccagctatgatgccaaaaggacagaagtgaccctggagaccttgggaccaaaacctgcagctagggatgtgaatcttcctagaccacctggagccctttgcgagcagaaacgggagacctgtgcagatggtgaggcagcaggctgcactatcaacaatagcctatccaacatccagtggcttcgaaagatgagttctgatggactgggctcccgcagcatcaagcaagagatggaggaaaaggagaattgtcacctggagcagcgacaggttaaggttgaggagccttcgagaccatcagcgtcctggcagaactctgtgtctgagcggccaccctactcttacatggccatgatacaattcgccatcaacagcactgagaggaagcgcatgactttgaaagacatctatacgtggattgaggaccactttccctactttaagcacattgccaagccaggctggaagaactccatccgccacaacctttccctgcacgacatgtttgtccgggagacgtctgccaatggcaaggtctccttctggaccattcaccccagtgccaaccgctacttgacattggaccaggtgtttaagcagcagaaacgaccgaatccagagctccgccggaacatgaccatcaaaaccgaactccccctgggcgcacggcggaagatgaagccactgctaccacgggtcagctcatacctggtacctatccagttcccggtgaaccagtcactggtgttgcagccctcggtgaaggtgccattgcccctggcggcttccctcatgagctcagagcttgcccgccatagcaagcgagtccgcattgcccccaaggtgctgctagctgaggaggggatagctcctctttcttctgcaggaccagggaaagaggagaaactcctgtttggagaagggttttctcctttgcttccagttcagactatcaaggaggaagaaatccagcctggggaggaaatgccacacttagcgagacccatcaaagtggagagccctcccttggaagagtggccctccccggccccatctttcaaagaggaatcatctcactcctgggaggattcgtcccaatctcccaccccaagacccaagaagtcctacagtgggcttaggtccccaacccggtgtgtctcggaaatgcttgtgattcaacacagggagaggagggagaggagccggtctcggaggaaacagcatctactgcctccctgtgtggatgagccggagctgctcttctcagaggggcccagtacttcccgctgggccgcagagctcccgttcccagcagactcctctgaccctgcctcccagctcagctactcccaggaagtgggaggaccttttaagacacccattaaggaaacgctgcccatctcctccaccccgagcaaatctgtcctccccagaacccctgaatcctggaggctcacgcccccagccaaagtagggggactggatttcagcccagtacaaacctcccagggtgcctctgaccccttgcctgaccccctggggctgatggatctcagcaccactcccttgcaaagtgctcccccccttgaatcaccgcaaaggctcctcagttcagaacccttagacctcatctccgtcccctttggcaactcttctccctcagatatagacgtccccaagccaggctccccggagccacaggtttctggccttgcagccaatcgttctctgacagaaggcctggtcctggacacaatgaatgacagcctcagcaagatcctgctggacatcagctttcctggcctggacgaggacccactgggccctgacaacatcaactggtcccagtttattcctgagctacagtagagccctgcccttgcccctgtgctcaagctgtccaccatcccgggcactccaaggctcagtgcaccccaagcctctgagtgaggacagcaggcagggactgttctgctcctcatagctccctgctgcctgattatgcaaaagtagcagtcacaccctagccactgctgggaccttgtgttccccaagagtatctgattcctctgctgtccctgccaggagctgaagggtgggaacaacaaaggcaatggtgaaaagagattaggaaccccccagcctgtttccattctctgcccagcagtctcttaccttccctgatctttgcagggtggtccgtgtaaatagtataaattctccaaattatcctctaattataaatgtaagcttatttccttagatcattatccagagactgccagaaggtgggtaggatgacctggggtttcaattgacttctgttccttgcttttagttttgatagaagggaagacctgcagtgcacggtttcttccaggctgaggtacctggatcttgggttcttcactgcagggacccagacaagtggatctgcttgccagagtcctttttgcccctccctgccacctccccgtgtttccaagtcagctttcctgcaagaagaaatcctggttaaaaaagtcttttgtattgggtcaggagttgaatttggggtgggaggatggatgcaactgaagcagagtgtgggtgcccagatgtgcgctattagatgtttctctgataatgtccccaatcataccagggagactggcattgacgagaactcaggtggaggcttgagaaggccgaaagggcccctgacctgcctggcttccttagcttgcccctcagctttgcaaagagccaccctaggccccagctgaccgcatgggtgtgagccagcttgagaacactaactactcaataaaagcgaaggtgga

SEQ ID NO: 367167 - DNA, 1109 bp, Homo sapiens
tatctaggtcttttctttatcacaatctaaggttggcatcagtctttattcccgtagaatagatgggtttatggctgaaggtgacggctctgcggtgtggagtgtcaggagagttgccaagagggctgcaaagacaccagacgaagcctgtgctgagcacagtgggaggggcctgaggctggtttccccatgtgtttgaagggtgatgtttctgaatctaaagtagctgataaccagttgtcttgctcttcttccagaactccatccgccacaacctttccctgcacgacatgtttgtccgggagacgtctgccaatggcaaggtctccttctggaccattcaccccagtgccaaccgctacttgacattggaccaggtgtttaaggtgaatgccctgctttcctctaaatagggcctaagttggaggttgtcatagccatctcaaaaggaaacaagttctgctagtgatgctttcatttgatcaggggagagttagaagccagccacccaattagtgacttgcacaaaacccagtgaattaagtacacttgacaaataccaaatgacacatttttgtgccagaccagagcaaggagaaggctgttctgacccaacagaaagggctccccagggcagtgttttcctaacttccctgtgaatgggaattgcctgggacattgttaaaacacagcttcccagacccctctcttggggctcttgatttagtgcttctgggatgggcccaggaatttgtatttttagcaagcatctcaggtgattcttacaagaaattctgggaatgcttgctctaaaaaaagcccttcctgctgggtgtggtggctcacgtctgtaatcccagcactttgggaggctgaggcaggtggatcacctaaggtcgggagttggagaccagcctgaccaacatggagaaactccgtctctactaaaaatacaaaaattagctgggtgtggtggcgcatgcctgtaatcccagctacttgggaggctgaggcaggagaatcccttgaacccaggaggcggtggttgtggagagctgaaatcgcaccattgcactccagcctgggcaataagagtgaaagtctgtctc

SEQ ID NO: 367168 - DNA, 3228 bp, Homo sapiens
  misc_feature (27)..(27): n is a, c, g, or t
ggacgcgtgggtcgacccacgcgtcgngctgccccttcctgttcaaaatgccccaagtgaaacatcagaggaggaacctaagagatcccctgcccaacaggagtctaatcaagcagaggcctccaaggaagtggcagagtccaactcttgcaagtttccagctgggatcaagattattaaccaccccaccatgcccaacacgcaagtagtggccatccccaacaatgctaatattcacagcatcatcacagcactgactgccaagggaaaagagagtggcagtagtgggcccaacaaattcatcctcatcagctgtgggggagccccaactcagcctccaggactccggcctcaaacccaaaccagctatgatgccaaaaggacagaagtgaccctggagaccttgggaccaaaacctgcagctagggatgtgaatcttcctagaccacctggagccctttgcgagcagaaacgggagacctgtgcagatggtgaggcagcaggctgcactatcaacaatagcctatccaacatccagtggcttcgaaagatgagttctgatggactgggctcccgcagcatcaagcaagagatggaggaaaaggagaattgtcacctggagcagcgacaggttaaggttgaggagccttcgagaccatcagcgtcctggcagaactctgtgtctgagcggccaccctactcttacatggccatgatacaattcgccatcaacagcactgagaggaagcgcatgactttgaaagacatctatacgtggattgaggaccactttccctactttaagcacattgccaagccaggctggaagaactccatccgccacaacctttccctgcacgacatgtttgtccgggagacgtctgccaatggcaaggtctccttctggaccattcaccccagtgccaaccgctacttgacattggaccaggtgtttaagccactggacccagggtctccacaattgcccgagcacttggaatcacagcagaaacgaccgaatccagagctccgccggaacatgaccatcaaaaccgaactccccctgggcgcacggcggaagatgaagccactgctaccacgggtcagctcatacctggtacctatccagttcccggtgaaccagtcactggtgttgcagccctcggtgaaggtgccattgcccctggcggcttccctcatgagctcagagcttgcccgccatagcaagcgagtccgcattgcccccaaggtgctgctagctgaggaggggatagctcctctttcttctgcaggaccagggaaagaggagaaactcctgtttggagaagggttttctcctttgcttccagttcagactatcaaggaggaagaaatccagcctggggaggaaatgccacacttagcgagacccatcaaagtggagagccctcccttggaagagtggccctccccggccccatctttcaaagaggaatcatctcactcctgggaggattcgtcccaatctcccaccccaagacccaagaagtcctacagtgggcttaggtccccaacccggtgtgtctcggaaatgcttgtgattcaacacagggagaggagggagaggagccggtctcggaggaaacagcatctactgcctccctgtgtggatgagccggagctgctcttctcagaggggcccagtacttcccgctgggccgcagagctcccgttcccagcagactcctctgaccctgcctcccagctcagctactcccaggaagtgggaggaccttttaagacacccattaaggaaacgctgcccatctcctccaccccgagcaaatctgtcctccccagaacccctgaatcctggaggctcacgcccccagccaaagtagggggactggatttcagcccagtacaaacctcccagggtgcctctgaccccttgcctgaccccctggggctgatggatctcagcaccactcccttgcaaagtgctcccccccttgaatcaccgcaaaggctcctcagttcagaacccttagacctcatctccgtcccctttggcaactcttctccctcagatatagacgtccccaagccaggctccccggagccacaggtttctggccttgcagccaatcgttctctgacagaaggcctggtcctggacacaatgaatgacagcctcagcaagatcctgctggacatcagctttcctggcctggacgaggacccactgggccctgacaacatcaactggtcccagtttattcctgagctacagtagagccctgcccttgcccctgtgctcaagctgtccaccatcccgggcactccaaggctcagtgcaccccaagcctctgagtgaggacagcaggcagggactgttctgctcctcatagctccctgctgcctgattatgcaaaagtagcagtcacaccctagccactgctgggaccttgtgttccccaagagtatctgattcctctgctgtccctgccaggagctgaagggtgggaacaacaaaggcaatggtgaaaagagattaggaaccccccagcctgtttccattctctgcccagcagtctcttaccttccctgatctttgcagggtggtccgtgtaaatagtataaattctccaaattatcctctaattataaatgtaagcttatttccttagatcattatccagagactgccagaaggtgggtaggatgacctggggtttcaattgacttctgttccttgcttttagttttgatagaagggaagacctgcagtgcacggtttcttccaggctgaggtacctggatcttgggttcttcactgcagggacccagacaagtggatctgcttgccagagtcctttttgcccctccctgccacctccccgtgtttccaagtcagctttcctgcaagaagaaatcctggttaaaaaagtcttttgtattgggtcaggagttgaatttggggtgggaggatggatgcaactgaagcagagtgtgggtgcccagatgtgcgctattagatgtttctctgataatgtccccaatcataccagggagactggcattgacgagaactcaggtggaggcttgagaaggccgaaagggcccctgacctgcctggcttccttagcttgcccctcagctttgcaaagagccaccctaggccccagctgaccgcatgggtgtgagccagcttgagaacactaactactcaataaaagcgaaggtgga

SEQ ID NO: 367169 - DNA, 3530 bp, Homo sapiens
gccagaccccacccccggccccggcccgggaccccctcccctcccgggatcccccggggttcccaccccgcccgcaccgccggggacccggccggtccggcgcgagcccccgtccggggccctggctcggcccccaggttggaggagcccggagcccgccttcggagctacggcctaacggcggcggcgactgcagtctggagggtccacacttgtgattctcaatggagagtgaaaacgcagattcataatgaaaactagcccccgtcggccactgattctcaaaagacggaggctgccccttcctgttcaaaatgccccaagtgaaacatcagaggaggaacctaagagatcccctgcccaacaggagtctaatcaagcagaggcctccaaggaagtggcagagtccaactcttgcaagtttccagctgggatcaagattattaaccaccccaccatgcccaacacgcaagtagtggccatccccaacaatgctaatattcacagcatcatcacagcactgactgccaagggaaaagagagtggcagtagtgggcccaacaaattcatcctcatcagctgtgggggagccccaactcagcctccaggactccggcctcaaacccaaaccagctatgatgccaaaaggacagaagtgaccctggagaccttgggaccaaaacctgcagctagggatgtgaatcttcctagaccacctggagccctttgcgagcagaaacgggagacctgtgcagatggtgaggcagcaggctgcactatcaacaatagcctatccaacatccagtggcttcgaaagatgagttctgatggactgggctcccgcagcatcaagcaagagatggaggaaaaggagaattgtcacctggagcagcgacaggttaaggttgaggagccttcgagaccatcagcgtcctggcagaactctgtgtctgagcggccaccctactcttacatggccatgatacaattcgccatcaacagcactgagaggaagcgcatgactttgaaagacatctatacgtggattgaggaccactttccctactttaagcacattgccaagccaggctggaagaactccatccgccacaacctttccctgcacgacatgtttgtccgggagacgtctgccaatggcaaggtctccttctggaccattcaccccagtgccaaccgctacttgacattggaccaggtgtttaagccactggacccagggtctccacaattgcccgagcacttggaatcacagcagaaacgaccgaatccagagctccgccggaacatgaccatcaaaaccgaactccccctgggcgcacggcggaagatgaagccactgctaccacgggtcagctcatacctggtacctatccagttcccggtgaaccagtcactggtgttgcagccctcggtgaaggtgccattgcccctggcggcttccctcatgagctcagagcttgcccgccatagcaagcgagtccgcattgcccccaaggtgctgctagctgaggaggggatagctcctctttcttctgcaggaccagggaaagaggagaaactcctgtttggagaagggttttctcctttgcttccagttcagactatcaaggaggaagaaatccagcctggggaggaaatgccacacttagcgagacccatcaaagtggagagccctcccttggaagagtggccctccccggccccatctttcaaagaggaatcatctcactcctgggaggattcgtcccaatctcccaccccaagacccaagaagtcctacagtgggcttaggtccccaacccggtgtgtctcggaaatgcttgtgattcaacacagggagaggagggagaggagccggtctcggaggaaacagcatctactgcctccctgtgtggatgagccggagctgctcttctcagaggggcccagtacttcccgctgggccgcagagctcccgttcccagcagactcctctgaccctgcctcccagctcagctactcccaggaagtgggaggaccttttaagacacccattaaggaaacgctgcccatctcctccaccccgagcaaatctgtcctccccagaacccctgaatcctggaggctcacgcccccagccaaagtagggggactggatttcagcccagtacaaacctcccagggtgcctctgaccccttgcctgaccccctggggctgatggatctcagcaccactcccttgcaaagtgctcccccccttgaatcaccgcaaaggctcctcagttcagaacccttagacctcatctccgtcccctttggcaactcttctccctcagatatagacgtccccaagccaggctccccggagccacaggtttctggccttgcagccaatcgttctctgacagaaggcctggtcctggacacaatgaatgacagcctcagcaagatcctgctggacatcagctttcctggcctggacgaggacccactgggccctgacaacatcaactggtcccagtttattcctgagctacagtagagccctgcccttgcccctgtgctcaagctgtccaccatcccgggcactccaaggctcagtgcaccccaagcctctgagtgaggacagcaggcagggactgttctgctcctcatagctccctgctgcctgattatgcaaaagtagcagtcacaccctagccactgctgggaccttgtgttccccaagagtatctgattcctctgctgtccctgccaggagctgaagggtgggaacaacaaaggcaatggtgaaaagagattaggaaccccccagcctgtttccattctctgcccagcagtctcttaccttccctgatctttgcagggtggtccgtgtaaatagtataaattctccaaattatcctctaattataaatgtaagcttatttccttagatcattatccagagactgccagaaggtgggtaggatgacctggggtttcaattgacttctgttccttgcttttagttttgatagaagggaagacctgcagtgcacggtttcttccaggctgaggtacctggatcttgggttcttcactgcagggacccagacaagtggatctgcttgccagagtcctttttgcccctccctgccacctccccgtgtttccaagtcagctttcctgcaagaagaaatcctggttaaaaaagtcttttgtattgggtcaggagttgaatttggggtgggaggatggatgcaactgaagcagagtgtgggtgcccagatgtgcgctattagatgtttctctgataatgtccccaatcataccagggagactggcattgacgagaactcaggtggaggcttgagaaggccgaaagggcccctgacctgcctggcttccttagcttgcccctcagctttgcaaagagccaccctaggccccagctgaccgcatgggtgtgagccagcttgagaacactaactactcaataaaagcgaaggtggaaaaaaaacaaaaccacacgccccaaccgccaacga

SEQ ID NO: 367170 - DNA, 2656 bp, Homo sapiens
tatctaggtcttttctttatcacaatctaaggttggcatcagtctttattcccgtagaatagatgggtttatggctgaaggtgacggctctgcggtgtggagtgtcaggagagttgccaagagggctgcaaagacaccagacgaagcctgtgctgagcacagtgggaggggcctgaggctggtttccccatgtgtttgaagggtgatgtttctgaatctaaagtagctgataaccagttgtcttgctcttcttccagaactccatccgccacaacctttccctgcacgacatgtttgtccgggagacgtctgccaatggcaaggtctccttctggaccattcaccccagtgccaaccgctacttgacattggaccaggtgtttaagccactggacccagggtctccacaattgcccgagcacttggaatcacagcagaaacgaccgaatccagagctccgccggaacatgaccatcaaaaccgaactccccctgggcgcacggcggaagatgaagccactgctaccacgggtcagctcatacctggtacctatccagttcccggtgaaccagtcactggtgttgcagccctcggtgaaggtgccattgcccctggcggcttccctcatgagctcagagcttgcccgccatagcaagcgagtccgcattgcccccaaggtgctgctagctgaggaggggatagctcctctttcttctgcaggaccagggaaagaggagaaactcctgtttggagaagggttttctcctttgcttccagttcagactatcaaggaggaagaaatccagcctggggaggaaatgccacacttagcgagacccatcaaagtggagagccctcccttggaagagtggccctccccggccccatctttcaaagaggaatcatctcactcctgggaggattcgtcccaatctcccaccccaagacccaagaagtcctacagtgggcttaggtccccaacccggtgtgtctcggaaatgcttgtgattcaacacagggagaggagggagaggagccggtctcggaggaaacagcatctactgcctccctgtgtggatgagccggagctgctcttctcagaggggcccagtacttcccgctgggccgcagagctcccgttcccagcagactcctctgaccctgcctcccagctcagctactcccaggaagtgggaggaccttttaagacacccattaaggaaacgctgcccatctcctccaccccgagcaaatctgtcctccccagaacccctgaatcctggaggctcacgcccccagccaaagtagggggactggatttcagcccagtacaaacctcccagggtgcctctgaccccttgcctgaccccctggggctgatggatctcagcaccactcccttgcaaagtgctcccccccttgaatcaccgcaaaggctcctcagttcagaacccttagacctcatctccgtcccctttggcaactcttctccctcagatatagacgtccccaagccaggctccccggagccacaggtttctggccttgcagccaatcgttctctgacagaaggcctggtcctggacacaatgaatgacagcctcagcaagatcctgctggacatcagctttcctggcctggacgaggacccactgggccctgacaacatcaactggtcccagtttattcctgagctacagtagagccctgcccttgcccctgtgctcaagctgtccaccatcccgggcactccaaggctcagtgcaccccaagcctctgagtgaggacagcaggcagggactgttctgctcctcatagctccctgctgcctgattatgcaaaagtagcagtcacaccctagccactgctgggaccttgtgttccccaagagtatctgattcctctgctgtccctgccaggagctgaagggtgggaacaacaaaggcaatggtgaaaagagattaggaaccccccagcctgtttccattctctgcccagcagtctcttaccttccctgatctttgcagggtggtccgtgtaaatagtataaattctccaaattatcctctaattataaatgtaagcttatttccttagatcattatccagagactgccagaaggtgggtaggatgacctggggtttcaattgacttctgttccttgcttttagttttgatagaagggaagacctgcagtgcacggtttcttccaggctgaggtacctggatcttgggttcttcactgcagggacccagacaagtggatctgcttgccagagtcctttttgcccctccctgccacctccccgtgtttccaagtcagctttcctgcaagaagaaatcctggttaaaaaagtcttttgtattgggtcaggagttgaatttggggtgggaggatggatgcaactgaagcagagtgtgggtgcccagatgtgcgctattagatgtttctctgataatgtccccaatcataccagggagactggcattgacgagaactcaggtggaggcttgagaaggccgaaagggcccctgacctgcctggcttccttagcttgcccctcagctttgcaaagagccaccctaggccccagctgaccgcatgggtgtgagccagcttgagaacactaactactcaataaaagcgaaggtgga

SEQ ID NO: 367171 - DNA, 3556 bp, Homo sapiens
gccagaccccacccccggccccggcccgggaccccctcccctcccgggatcccccggggttcccaccccgcccgcaccgccggggacccggccggtccggcgcgagcccccgtccggggccctggctcggcccccaggttggaggagcccggagcccgccttcggagctacggcctaacggcggcggcgactgcagtctggagggtccacacttgtgattctcaatggagagtgaaaacgcagattcataatgaaaactagcccccgtcggccactgattctcaaaagacggaggctgccccttcctgttcaaaatgccccaagtgaaacatcagaggaggaacctaagagatcccctgcccaacaggagtctaatcaagcagaggcctccaaggaagtggcagagtccaactcttgcaagtttccagctgggatcaagattattaaccaccccaccatgcccaacacgcaagtagtggccatccccaacaatgctaatattcacagcatcatcacagcactgactgccaagggaaaagagagtggcagtagtgggcccaacaaattcatcctcatcagctgtgggggagccccaactcagcctccaggactccggcctcaaacccaaaccagctatgatgccaaaaggacagaagtgaccctggagaccttgggaccaaaacctgcagctagggatgtgaatcttcctagaccacctggagccctttgcgagcagaaacgggagacctgtgcagatggtgaggcagcaggctgcactatcaacaatagcctatccaacatccagtggcttcgaaagatgagttctgatggactgggctcccgcagcatcaagcaagagatggaggaaaaggagaattgtcacctggagcagcgacaggttaaggttgaggagccttcgagaccatcagcgtcctggcagaactctgtgtctgagcggccaccctactcttacatggccatgatacaattcgccatcaacagcactgagaggaagcgcatgactttgaaagacatctatacgtggattgaggaccactttccctactttaagcacattgccaagccaggctggaagaactccatccgccacaacctttccctgcacgacatgtttgtccgggagacgtctgccaatggcaaggtctccttctggaccattcaccccagtgccaaccgctacttgacattggaccaggtgtttaagccactggacccagggtctccacaattgcccgagcacttggaatcagccacccacctgcccactcatcacagttttggagactgctcgcctacgtccatcccctcagcagcagaaacgaccgaatccagagctccgccggaacatgaccatcaaaaccgaactccccctgggcgcacggcggaagatgaagccactgctaccacgggtcagctcatacctggtacctatccagttcccggtgaaccagtcactggtgttgcagccctcggtgaaggtgccattgcccctggcggcttccctcatgagctcagagcttgcccgccatagcaagcgagtccgcattgcccccaaggtgctgctagctgaggaggggatagctcctctttcttctgcaggaccagggaaagaggagaaactcctgtttggagaagggttttctcctttgcttccagttcagactatcaaggaggaagaaatccagcctggggaggaaatgccacacttagcgagacccatcaaagtggagagccctcccttggaagagtggccctccccggccccatctttcaaagaggaatcatctcactcctgggaggattcgtcccaatctcccaccccaagacccaagaagtcctacagtgggcttaggtccccaacccggtgtgtctcggaaatgcttgtgattcaacacagggagaggagggagaggagccggtctcggaggaaacagcatctactgcctccctgtgtggatgagccggagctgctcttctcagaggggcccagtacttcccgctgggccgcagagctcccgttcccagcagactcctctgaccctgcctcccagctcagctactcccaggaagtgggaggaccttttaagacacccattaaggaaacgctgcccatctcctccaccccgagcaaatctgtcctccccagaacccctgaatcctggaggctcacgcccccagccaaagtagggggactggatttcagcccagtacaaacctcccagggtgcctctgaccccttgcctgaccccctggggctgatggatctcagcaccactcccttgcaaagtgctcccccccttgaatcaccgcaaaggctcctcagttcagaacccttagacctcatctccgtcccctttggcaactcttctccctcagatatagacgtccccaagccaggctccccggagccacaggtttctggccttgcagccaatcgttctctgacagaaggcctggtcctggacacaatgaatgacagcctcagcaagatcctgctggacatcagctttcctggcctggacgaggacccactgggccctgacaacatcaactggtcccagtttattcctgagctacagtagagccctgcccttgcccctgtgctcaagctgtccaccatcccgggcactccaaggctcagtgcaccccaagcctctgagtgaggacagcaggcagggactgttctgctcctcatagctccctgctgcctgattatgcaaaagtagcagtcacaccctagccactgctgggaccttgtgttccccaagagtatctgattcctctgctgtccctgccaggagctgaagggtgggaacaacaaaggcaatggtgaaaagagattaggaaccccccagcctgtttccattctctgcccagcagtctcttaccttccctgatctttgcagggtggtccgtgtaaatagtataaattctccaaattatcctctaattataaatgtaagcttatttccttagatcattatccagagactgccagaaggtgggtaggatgacctggggtttcaattgacttctgttccttgcttttagttttgatagaagggaagacctgcagtgcacggtttcttccaggctgaggtacctggatcttgggttcttcactgcagggacccagacaagtggatctgcttgccagagtcctttttgcccctccctgccacctccccgtgtttccaagtcagctttcctgcaagaagaaatcctggttaaaaaagtcttttgtattgggtcaggagttgaatttggggtgggaggatggatgcaactgaagcagagtgtgggtgcccagatgtgcgctattagatgtttctctgataatgtccccaatcataccagggagactggcattgacgagaactcaggtggaggcttgagaaggccgaaagggcccctgacctgcctggcttccttagcttgcccctcagctttgcaaagagccaccctaggccccagctgaccgcatgggtgtgagccagcttgagaacactaactactcaataaaagcgaaggtgga

SEQ ID NO: 367172 - DNA, 3484 bp, Homo sapiens
gccagaccccacccccggccccggcccgggaccccctcccctcccgggatcccccggggttcccaccccgcccgcaccgccggggacccggccggtccggcgcgagcccccgtccggggccctggctcggcccccaggttggaggagcccggagcccgccttcggagctacggcctaacggcggcggcgactgcagtctggagggtccacacttgtgattctcaatggagagtgaaaacgcagattcataatgaaaactagcccccgtcggccactgattctcaaaagacggaggctgccccttcctgttcaaaatgccccaagtgaaacatcagaggaggaacctaagagatcccctgcccaacaggagtctaatcaagcagaggcctccaaggaagtggcagagtccaactcttgcaagtttccagctgggatcaagattattaaccaccccaccatgcccaacacgcaagtagtggccatccccaacaatgctaatattcacagcatcatcacagcactgactgccaagggaaaagagagtggcagtagtgggcccaacaaattcatcctcatcagctgtgggggagccccaactcagcctccaggactccggcctcaaacccaaaccagctatgatgccaaaaggacagaagtgaccctggagaccttgggaccaaaacctgcagctagggatgtgaatcttcctagaccacctggagccctttgcgagcagaaacgggagacctgtgcagatggtgaggcagcaggctgcactatcaacaatagcctatccaacatccagtggcttcgaaagatgagttctgatggactgggctcccgcagcatcaagcaagagatggaggaaaaggagaattgtcacctggagcagcgacaggttaaggttgaggagccttcgagaccatcagcgtcctggcagaactctgtgtctgagcggccaccctactcttacatggccatgatacaattcgccatcaacagcactgagaggaagcgcatgactttgaaagacatctatacgtggattgaggaccactttccctactttaagcacattgccaagccaggctggaagaactccatccgccacaacctttccctgcacgacatgtttgtccgggagacgtctgccaatggcaaggtctccttctggaccattcaccccagtgccaaccgctacttgacattggaccaggtgtttaagcagcagaaacgaccgaatccagagctccgccggaacatgaccatcaaaaccgaactccccctgggcgcacggcggaagatgaagccactgctaccacgggtcagctcatacctggtacctatccagttcccggtgaaccagtcactggtgttgcagccctcggtgaaggtgccattgcccctggcggcttccctcatgagctcagagcttgcccgccatagcaagcgagtccgcattgcccccaaggtttttggggaacaggtggtgtttggttacatgagtgctgctagctgaggaggggatagctcctctttcttctgcaggaccagggaaagaggagaaactcctgtttggagaagggttttctcctttgcttccagttcagactatcaaggaggaagaaatccagcctggggaggaaatgccacacttagcgagacccatcaaagtggagagccctcccttggaagagtggccctccccggccccatctttcaaagaggaatcatctcactcctgggaggattcgtcccaatctcccaccccaagacccaagaagtcctacagtgggcttaggtccccaacccggtgtgtctcggaaatgcttgtgattcaacacagggagaggagggagaggagccggtctcggaggaaacagcatctactgcctccctgtgtggatgagccggagctgctcttctcagaggggcccagtacttcccgctgggccgcagagctcccgttcccagcagactcctctgaccctgcctcccagctcagctactcccaggaagtgggaggaccttttaagacacccattaaggaaacgctgcccatctcctccaccccgagcaaatctgtcctccccagaacccctgaatcctggaggctcacgcccccagccaaagtagggggactggatttcagcccagtacaaacctcccagggtgcctctgaccccttgcctgaccccctggggctgatggatctcagcaccactcccttgcaaagtgctcccccccttgaatcaccgcaaaggctcctcagttcagaacccttagacctcatctccgtcccctttggcaactcttctccctcagatatagacgtccccaagccaggctccccggagccacaggtttctggccttgcagccaatcgttctctgacagaaggcctggtcctggacacaatgaatgacagcctcagcaagatcctgctggacatcagctttcctggcctggacgaggacccactgggccctgacaacatcaactggtcccagtttattcctgagctacagtagagccctgcccttgcccctgtgctcaagctgtccaccatcccgggcactccaaggctcagtgcaccccaagcctctgagtgaggacagcaggcagggactgttctgctcctcatagctccctgctgcctgattatgcaaaagtagcagtcacaccctagccactgctgggaccttgtgttccccaagagtatctgattcctctgctgtccctgccaggagctgaagggtgggaacaacaaaggcaatggtgaaaagagattaggaaccccccagcctgtttccattctctgcccagcagtctcttaccttccctgatctttgcagggtggtccgtgtaaatagtataaattctccaaattatcctctaattataaatgtaagcttatttccttagatcattatccagagactgccagaaggtgggtaggatgacctggggtttcaattgacttctgttccttgcttttagttttgatagaagggaagacctgcagtgcacggtttcttccaggctgaggtacctggatcttgggttcttcactgcagggacccagacaagtggatctgcttgccagagtcctttttgcccctccctgccacctccccgtgtttccaagtcagctttcctgcaagaagaaatcctggttaaaaaagtcttttgtattgggtcaggagttgaatttggggtgggaggatggatgcaactgaagcagagtgtgggtgcccagatgtgcgctattagatgtttctctgataatgtccccaatcataccagggagactggcattgacgagaactcaggtggaggcttgagaaggccgaaagggcccctgacctgcctggcttccttagcttgcccctcagctttgcaaagagccaccctaggccccagctgaccgcatgggtgtgagccagcttgagaacactaactactcaataaaagcgaaggtgga

SEQ ID NO: 367173 - DNA, 2829 bp, Homo sapiens
gccagaccccacccccggccccggcccgggaccccctcccctcccgggatcccccggggttcccaccccgcccgcaccgccggggacccggccggtccggcgcgagcccccgtccggggccctggctcggcccccaggttggaggagcccggagcccgccttcggagctacggcctaacggcggcggcgactgcagtctggagggtccacacttgtgattctcaatggagagtgaaaacgcagattcataatgaaaactagcccccgtcggccactgattctcaaaagacggaggctgccccttcctgttcaaaatgccccaagtgaaacatcagaggaggaacctaagagatcccctgcccaacaggagtctaatcaagcagaggcctccaaggaagtggcagagtccaactcttgcaagtttccagctgggatcaagattattaaccaccccaccatgcccaacacgcaagtagtggccatccccaacaatgctaatattcacagcatcatcacagcactgactgccaagggaaaagagagtggcagtagtgggcccaacaaattcatcctcatcagctgtgggggagccccaactcagcctccaggactccggcctcaaacccaaaccagctatgatgccaaaaggacagaagtgaccctggagaccttgggaccaaaacctgcagctagggatgtgaatcttcctagaccacctggagccctttgcgagcagaaacgggagacctgtgcagatggtgaggcagcaggctgcactatcaacaatagcctatccaacatccagtggcttcgaaagatgagttctgatggactgggctcccgcagcatcaagcaagagatggaggaaaaggagaattgtcacctggagcagcgacaggttaaggttgaggagccttcgagaccatcagcgtcctggcagaactctgtgtctgagcggccaccctactcttacatggccatgatacaattcgccatcaacagcactgagaggaagcgcatgactttgaaagacatctatacgtggattgaggaccactttccctactttaagcacattgccaagccaggctggaagaactccatccgccacaacctttccctgcacgacatgtttgtccgggagacgtctgccaatggcaaggtctccttctggaccattcaccccagtgccaaccgctacttgacattggaccaggtgtttaagccactggacccagggtctccacaattgcccgagcacttggaatcacagcagaaacgaccgaatccagagctccgccggaacatgaccatcaaaaccgaactccccctgggcgcacggcggaagatgaagccactgctaccacgggtcagctcatacctggtacctatccagttcccggtgaaccagtcactggtgttgcagccctcggtgaaggtgccattgcccctggcggcttccctcatgagctcagagcttgcccgccatagcaagcgagtccgcattgcccccaaggtgctgctagctgaggaggggatagctcctctttcttctgcaggaccagggaaagaggagaaactcctgtttggagaagggttttctcctttgcttccagttcagactatcaaggaggaagaaatccagcctggggaggaaatgccacacttagcgagacccatcaaagtggagagccctcccttggaagagtggccctccccggccccatctttcaaagaggaatcatctcactcctgggaggattcgtcccaatctcccaccccaagacccaagaagtcctacagtgggcttaggtccccaacccggtgtgtctcggaaatgcttgtgattcaacacagggagaggagggagaggagccggtctcggaggaaacagcatctactgcctccctgtgtggatgagccggagctgctcttctcagaggggcccagtacttcccgctgggccgcagagctcccgttcccagcagactcctctgaccctgcctcccagctcagctactcccaggaagtgggaggaccttttaagacacccattaaggaaacgctgcccatctcctccaccccgagcaaatctgtcctccccagaacccctgaatcctggaggctcacgcccccagccaaagtagggggactggatttcagcccagtacaaacctcccagggtgcctctgaccccttgcctgaccccctggggctgatggatctcagcaccactcccttgcaaagtgctcccccccttgaatcaccgcaaaggctcctcagttcagaacccttagacctcatctccgtcccctttggcaactcttctccctcagatatagacgtccccaagccaggctccccggagccacaggtttctggccttgcagccaatcgttctctgacagaaggcctggtcctggacacaatgaatgacagcctcagcaagatcctgctggacatcagctttcctggcctggacgaggacccactgggccctgacaacatcaactggtcccagtttattcctgagctacagtagagccctgcccttgcccctgtgctcaagctgtccaccatcccgggcactccaaggctcagtgcaccccaagcctctgagtgaggacagcaggcagggactgttctgctcctcatagctccctgctgcctgattatgcaaaagtagcagtcacaccctagccactgctgggaccttgtgttccccaagagtatctgattcctctgctgtccctgccagggagcactaagcgcttagtgctcccttgtaaaccagtgccgggcagacactgggtagaggcggttggccag

SEQ ID NO: 367174 - DNA, 2749 bp, Homo sapiens
gccagaccccacccccggccccggcccgggaccccctcccctcccgggatcccccggggttcccaccccgcccgcaccgccggggacccggccggtccggcgcgagcccccgtccggggccctggctcggcccccaggttggaggagcccggagcccgccttcggagctacggcctaacggcggcggcgactgcagtctggagggtccacacttgtgattctcaatggagagtgaaaacgcagattcataatgaaaactagcccccgtcggccactgattctcaaaagacggaggctgccccttcctgttcaaaatgccccaagtgaaacatcagaggaggaacctaagagatcccctgcccaacaggagtctaatcaagcagaggcctccaaggaagtggcagagtccaactcttgcaagtttccagctgggatcaagattattaaccaccccaccatgcccaacacgcaagtagtggccatccccaacaatgctaatattcacagcatcatcacagcactgactgccaagggaaaagagagtggcagtagtgggcccaacaaattcatcctcatcagctgtgggggagccccaactcagcctccaggactccggcctcaaacccaaaccagctatgatgccaaaaggacagaagtgaccctggagaccttgggaccaaaacctgcagctagggatgtgaatcttcctagaccacctggagccctttgcgagcagaaacgggagacctgtgcagatggtgaggcagcaggctgcactatcaacaatagcctatccaacatccagtggcttcgaaagatgagttctgatggactgggctcccgcagcatcaagcaagagatggaggaaaaggagaattgtcacctggagcagcgacaggttaaggttgaggagccttcgagaccatcagcgtcctggcagaactctgtgtctgagcggccaccctactcttacatggccatgatacaattcgccatcaacagcactgagaggaagcgcatgactttgaaagacatctatacgtggattgaggaccactttccctactttaagcacattgccaagccaggctggaagaactccatccgccacaacctttccctgcacgacatgtttgtccgggagacgtctgccaatggcaaggtctccttctggaccattcaccccagtgccaaccgctacttgacattggaccaggtgtttaagccactggacccagggtctccacaattgcccgagcacttggaatcacagcagaaacgaccgaatccagagctccgccggaacatgaccatcaaaaccgaactccccctgggcgcacggcggaagatgaagccactgctaccacgggtcagctcatacctggtacctatccagttcccggtgaaccagtcactggtgttgcagccctcggtgaaggtgccattgcccctggcggcttccctcatgagctcagagcttgcccgccatagcaagcgagtccgcattgcccccaaggtgctgctagctgaggaggggatagctcctctttcttctgcaggaccagggaaagaggagaaactcctgtttggagaagggttttctcctttgcttccagttcagactatcaaggaggaagaaatccagcctggggaggaaatgccacacttagcgagacccatcaaagtggagagccctcccttggaagagtggccctccccggccccatctttcaaagaggaatcatctcactcctgggaggattcgtcccaatctcccaccccaagacccaagaagtcctacagtgggcttaggtccccaacccggtgtgtctcggaaatgcttgtgattcaacacagggagaggagggagaggagccggtctcggaggaaacagcatctactgcctccctgtgtggatgagccggagctgctcttctcagaggggcccagtacttcccgctgggccgcagagctcccgttcccagcagactcctctgaccctgcctcccagctcagctactcccaggaagtgggaggaccttttaagacacccattaaggaaacgctgcccatctcctccaccccgagcaaatctgtcctccccagaacccctgaatcctggaggctcacgcccccagccaaagtagggggactggatttcagcccagtacaaacctcccagggtgcctctgaccccttgcctgaccccctggggctgatggatctcagcaccactcccttgcaaagtgctcccccccttgaatcaccgcaaaggctcctcagttcagaacccttagacctcatctccgtcccctttggcaactcttctccctcagatatagacgtccccaagccaggctccccggagccacaggtttctggccttgcagccaatcgttctctgacagaaggcctggtcctggacacaatgaatgacagcctcagcaagatcctgctggacatcagctttcctggcctggacgaggacccactgggccctgacaacatcaactggtcccagtttattcctgagctacagtagagccctgcccttgcccctgtgctcaagctgtccaccatcccgggcactccaaggctcagtgcaccccaagcctctgagtgaggacagcaggcagggactgttctgctcctcatagctccctgctgcctgattatgcaaaagtagcactgaccgcatgggtgtgagccagcttgagaacactaactactcaataaaagcgaaggtgga

SEQ ID NO: 367175 - DNA, 2620 bp, Homo sapiens
gccagaccccacccccggccccggcccgggaccccctcccctcccgggatcccccggggttcccaccccgcccgcaccgccggggacccggccggtccggcgcgagcccccgtccggggccctggctcggcccccaggttggaggagcccggagcccgccttcggagctacggcctaacggcggcggcgactgcagtctggagggtccacacttgtgattctcaatggagagtgaaaacgcagattcataatgaaaactagcccccgtcggccactgattctcaaaagacggaggctgccccttcctgttcaaaatgccccaagtgaaacatcagaggaggaacctaagagatcccctgcccaacaggagtctaatcaagcagaggcctccaaggaagtggcagagtccaactcttgcaagtttccagctgggatcaagattattaaccaccccaccatgcccaacacgcaagtagtggccatccccaacaatgctaatattcacagcatcatcacagcactgactgccaagggaaaagagagtggcagtagtgggcccaacaaattcatcctcatcagctgtgggggagccccaactcagcctccaggactccggcctcaaacccaaaccagctatgatgccaaaaggacagaagtgaccctggagaccttgggaccaaaacctgcagctagggatgtgaatcttcctagaccacctggagccctttgcgagcagaaacgggagacctgtgcagatggtgaggcagcaggctgcactatcaacaatagcctatccaacatccagtggcttcgaaagatgagttctgatggactgggctcccgcagcatcaagcaagagatggaggaaaaggagaattgtcacctggagcagcgacaggttaaggttgaggagccttcgagaccatcagcgtcctggcagaactctgtgtctgagcggccaccctactcttacatggccatgatacaattcgccatcaacagcactgagaggaagcgcatgactttgaaagacatctatacgtggattgaggaccactttccctactttaagcacattgccaagccaggctggaagaactccatccgccacaacctttccctgcacgacatgtttgtccgggagacgtctgccaatggcaaggtctccttctggaccattcaccccagtgccaaccgctacttgacattggaccaggtgtttaagccactggacccagggtctccacaattgcccgagcacttggaatcacagcagaaacgaccgaatccagagctccgccggaacatgaccatcaaaaccgaactccccctgggcgcacggcggaagatgaagccactgctaccacgggtcagctcatacctggtacctatccagttcccggtgaaccagtcactggtgttgcagccctcggtgaaggtgccattgcccctggcggcttccctcatgagctcagagcttgcccgccatagcaagcgagtccgcattgcccccaaggtgctgctagctgaggaggggatagctcctctttcttctgcaggaccagggaaagaggagaaactcctgtttggagaagggttttctcctttgcttccagttcagactatcaaggaggaagaaatccagcctggggaggaaatgccacacttagcgagacccatcaaagtggagagccctcccttggaagagtggccctccccggccccatctttcaaagaggaatcatctcactcctgggaggattcgtcccaatctcccaccccaagacccaagaagtcctacagtgggcttaggtccccaacccggtgtgtctcggaaatgcttgtgattcaacacagggagaggagggagaggagccggtctcggaggaaacagcatctactgcctccctgtgtggatgagccggagctgctcttctcagaggggcccagtacttcccgctgggccgcagagctcccgttcccagcagactcctctgaccctgcctcccagctcagctactcccaggaagtgggaggaccttttaagacacccattaaggaaacgctgcccatctcctccaccccgagcaaatctgtcctccccagaacccctgaatcctggaggctcacgcccccagccaaagtagggggactggatttcagcccagtacaaacctcccagggtgcctctgaccccttgcctgaccccctggggctgatggatctcagcaccactcccttgcaaagtgctcccccccttgaatcaccgcaaaggctcctctcagtgcaccccaagcctctgagtgaggacagcaggcagggactgttctgctcctcatagctccctgctgcctgattatgcaaaagtagcatgaagcagagtgtgggtgcccagatgtgcgctattagatgtttctctgataatgtccccaatcataccagggagactggcattgacgagaactcaggtggaggcttgagaaggccgaaagggcccctgacctgcctggcttccttagcttgcccctcagctttgcaaagagccaccctaggccccagctgaccgcatgggtgtgagccagcttgagaacactaactactcaataaaagcgaaggtgga

SEQ ID NO: 367176 - DNA, 1303 bp, Homo sapiens
  misc_feature (77)..(77): n is a, c, g, or t
tcctcagttcagaaccctttgcggtgattcaagggggggagcactttgcaagggagtggtgctcccccttgaatccnaagcatccatcaagttcagaacccttagacctcatctccgtcccctttggcaactcttctccctcagatatagacgtccccaagccaggctccccggagccacaggtttctggccttgcagccaatcgttctctgacagaaggcctggtcctggacacaatgaatgacagcctcagcaagatcctgctggacatcagctttcctggcctggacgaggacccactgggccctgacaacatcaactggtcccagtttattcctgagctacagtagagccctgcccttgcccctgtgctcaagctgtccaccatcccgggcactccaaggctcagtgcaccccaagcctctgagtgaggacagcaggcagggactgttctgctcctcatagctccctgctgcctgattatgcaaaagtagcagtcacaccctagccactgctgggaccttgtgttccccaagagtatctgattcctctgctgtccctgccaggagctgaagggtgggaacaacaaaggcaatggtgaaaagagattaggaaccccccagcctgtttccattctctgcccagcagtctcttaccttccctgatctttgcagggtggtccgtgtaaatagtataaattctccaaattatcctctaattataaatgtaagcttatttccttagatcattatccagagactgccagaaggtgggtaggatgacctggggtttcaattgacttctgttccttgcttttagttttgatagaagggaagacctgcagtgcacggtttcttccaggctgaggtacctggatcttgggttcttcactgcagggacccagacaagtggatctgcttgccagagtcctttttgcccctccctgccacctccccgtgtttccaagtcagctttcctgcaagaagaaatcctggttaaaaaagtcttttgtattgggtcaggagttgaatttggggtgggaggatggatgcaactgaagcagagtgtgggtgcccagatgtgcgctattagatgtttctctgataatgtccccaatcataccagggagactggcattgacgagaactcaggtggaggcttgagaaggccgaaagggcccctgacctgcctggcttccttagcttgcccctcagctttgcaaagagccaccctaggccccagctgaccgcatgggtgtgagccagcttgagaacactaactactcaataaaagcgaaggtgga

SEQ ID NO: 367177 - DNA, 1114 bp, Homo sapiens
  misc_feature (10)..(11): n is a, c, g, or t
taggctaggnncgaggctggggttgagaaggcctggtcctggacacaatgaatgacagcctcagcaagatcctgctggacatcagctttcctggcctggacgaggacccactgggccctgacaacatcaactggtcccagtttattcctgagctacagtagagccctgcccttgcccctgtgctcaagctgtccaccatcccgggcactccaaggctcagtgcaccccaagcctctgagtgaggacagcaggcagggactgttctgctcctcatagctccctgctgcctgattatgcaaaagtagcagtcacaccctagccactgctgggaccttgtgttccccaagagtatctgattcctctgctgtccctgccaggagctgaagggtgggaacaacaaaggcaatggtgaaaagagattaggaaccccccagcctgtttccattctctgcccagcagtctcttaccttccctgatctttgcagggtggtccgtgtaaatagtataaattctccaaattatcctctaattataaatgtaagcttatttccttagatcattatccagagactgccagaaggtgggtaggatgacctggggtttcaattgacttctgttccttgcttttagttttgatagaagggaagacctgcagtgcacggtttcttccaggctgaggtacctggatcttgggttcttcactgcagggacccagacaagtggatctgcttgccagagtcctttttgcccctccctgccacctccccgtgtttccaagtcagctttcctgcaagaagaaatcctggttaaaaaagtcttttgtattgggtcaggagttgaatttggggtgggaggatggatgcaactgaagcagagtgtgggtgcccagatgtgcgctattagatgtttctctgataatgtccccaatcataccagggagactggcattgacgagaactcaggtggaggcttgagaaggccgaaagggcccctgacctgcctggcttccttagcttgcccctcagctttgcaaagagccaccctaggccccagctgaccgcatgggtgtgagccagcttgagaacactaactactcaataaaagcgaaggtgga

SEQ ID NO: 367178 - DNA, 1948 bp, Homo sapiens
gccagaccccacccccggccccggcccgggaccccctcccctcccgggatcccccggggttcccaccccgcccgcaccgccggggacccggccggtccggcgcgagcccccgtccggggccctggctcggcccccaggttggaggagcccggagcccgccttcggagctacggcctaacggcggcggcgactgcagtctggagggtccacacttgtgattctcaatggagagtgaaaacgcagattcataatgaaaactagcccccgtcggccactgattctcaaaagacggaggctgccccttcctgttcaaaatgccccaagtgaaacatcagaggaggaacctaagagatcccctgcccaacaggagtctaatcaagcagaggcctccaaggaagtggcagagtccaactcttgcaagtttccagctgggatcaagattattaaccaccccaccatgcccaacacgcaagtagtggccatccccaacaatgctaatattcacagcatcatcacagcactgactgccaagggaaaagagagtggcagtagtgggcccaacaaattcatcctcatcagctgtgggggagccccaactcagcctccaggactccggcctcaaacccaaaccagctatgatgccaaaaggacagaagtgaccctggagaccttgggaccaaaacctgcagctagggatgtgaatcttcctagaccacctggagccctttgcgagcagaaacgggagacctgtgcagatggtgaggcagcaggctgcactatcaacaatagcctatccaacatccagtggcttcgaaagatgagttctgatggactgggctcccgcagcatcaagcaagagatggaggaaaaggagaattgtcacctggagcagcgacaggttaaggttgaggagccttcgagaccatcagcgtcctggcagaactctgtgtctgagcggccaccctactcttacatggccatgatacaattcgccatcaacagcactgagaggaagcgcatgactttgaaagacatctatacgtggattgaggaccactttccctactttaagcacattgccaagccaggctggaagaactccatccgccacaacctttccctgcacgacatgtttgtccgggagacgtctgccaatggcaaggtctccttctggaccattcaccccagtgccaaccgctacttgacattggaccaggtgtttaaggtgaatgccctgctttcctctaaatagggcctaagttggaggttgtcatagccatctcaaaaggaaacaagttctgctagtgatgctttcatttgatcaggggagagttagaagccagccacccaattagtgacttgcacaaaacccagtgaattaagtacacttgacaaataccaaatgacacatttttgtgccagaccagagcaaggagaaggctgttctgacccaacagaaagggctccccagggcagtgttttcctaacttccctgtgaatgggaattgcctgggacattgttaaaacacagcttcccagacccctctcttggggctcttgatttagtgcttctgggatgggcccaggaatttgtatttttagcaagcatctcaggtgattcttacaagaaattctgggaatgcttgctctaaaaaaagcccttcctgctgggtgtggtggctcacgtctgtaatcccagcactttgggaggctgaggcaggtggatcacctaaggtcgggagttggagaccagcctgaccaacatggagaaactccgtctctactaaaaatacaaaaattagctgggtgtggtggcgcatgcctgtaatcccagctacttgggaggctgaggcaggagaatcccttgaacccaggaggcggtggttgtggagagctgaaatcgcaccattgcactccagcctgggcaataagagtgaaagtctgtctc

SEQ ID NO: 367179 - DNA, 1348 bp, Homo sapiens
gccagaccccacccccggccccggcccgggaccccctcccctcccgggatcccccggggttcccaccccgcccgcaccgccggggacccggccggtccggcgcgagcccccgtccggggccctggctcggcccccaggttggaggagcccggagcccgccttcggagctacggcctaacggcggcggcgactgcagtctggagggtccacacttgtgattctcaatggagagtgaaaacgcagattcataatgaaaactagcccccgtcggccactgattctcaaaagacggaggctgccccttcctgttcaaaatgccccaagtgaaacatcagaggaggaacctaagagatcccctgcccaacaggagtctaatcaagcagaggcctccaaggaagtggcagagtccaactcttgcaagtttccagctgggatcaagattattaaccaccccaccatgcccaacacgcaagtagtggccatccccaacaatgctaatattcacagcatcatcacagcactgactgccaagggaaaagagagtggcagtagtgggcccaacaaattcatcctcatcagctgtgggggagccccaactcagcctccaggactccggcctcaaacccaaaccagctatgatgccaaaaggacagaagtgaccctggagaccttgggaccaaaacctgcagctagggatgtgaatcttcctagaccacctggagccctttgcgagcagaaacgggagacctgtgcagatggtgaggcagcaggctgcactatcaacaatagcctatccaacatccagtggcttcgaaagatgagttctgatggactgggctcccgcagcatcaagcaagagatggaggaaaaggagaattgtcacctggagcagcgacaggttaaggttgaggagccttcgagaccatcagcgtcctggcagaactctgtgtctgagcggccaccctactcttacatggccatgatacaattcgccatcaacagcactgagaggaagcgcatgactttgaaagacatctatacgtggattgaggaccactttccctactttaagcacattgccaagccaggctggaaggtaatgtgtcccacagcaaccaaaatcaaggtcagcccagcctgacagtctctccagtgctgtactgcaacttgtatctgggacagcagttaagtgcaaaggacactagaatgataaacaaatgtatcttttagattgtgactcaatcttattgaatccaggcaaaatcattaagaagagctccttaactacttcatgtgttactacctaaagtccatggagggtcttcaatgtagcactcaagcccacttt

SEQ ID NO: 367180 - DNA, 430 bp, Homo sapiens
ataatgtccccaatcataccagggagactggcattgacgagaactcaggtggaggcttgagaaggccgaaagggcccctgacctgcctggcttccttagcttgcccctcagctttgcaaagagccaccctaggccccagctgaccgcatgggtgtgagccagcttgagaacactaactactcaataaaagcgaaggtggagctgggctctgtggtttattggcgtctgattcctaaggcaccaggagaggctggaaaagaaagagggtgttgatggagacgatggtgatagggaagaggcaaggcctgaagttcacccaaagcagcagttggagcacttgcacaggcacacacttgacaacacaaattgccagttttcccagtgctagtcctgcacagctcacctcttttccctggcgtctctgaccttg

SEQ ID NO: 367181 - DNA, 3495 bp, Homo sapiens
gccagaccccacccccggccccggcccgggaccccctcccctcccgggatcccccggggttcccaccccgcccgcaccgccggggacccggccggtccggcgcgagcccccgtccggggccctggctcggcccccaggttggaggagcccggagcccgccttcggagctacggcctaacggcggcggcgactgcagtctggagggtccacacttgtgattctcaatggagagtgaaaacgcagattcataatgaaaactagcccccgtcggccactgattctcaaaagacggaggctgccccttcctgttcaaaatgccccaagtgaaacatcagaggaggaacctaagagatcccctgcccaacaggagtctaatcaagcagaggcctccaaggaagtggcagagtccaactcttgcaagtttccagctgggatcaagattattaaccaccccaccatgcccaacacgcaagtagtggccatccccaacaatgctaatattcacagcatcatcacagcactgactgccaagggaaaagagagtggcagtagtgggcccaacaaattcatcctcatcagctgtgggggagccccaactcagcctccaggactccggcctcaaacccaaaccagctatgatgccaaaaggacagaagtgaccctggagaccttgggaccaaaacctgcagctagggatgtgaatcttcctagaccacctggagccctttgcgagcagaaacgggagacctgtgcagatggtgaggcagcaggctgcactatcaacaatagcctatccaacatccagtggcttcgaaagatgagttctgatggactgggctcccgcagcatcaagcaagagatggaggaaaaggagaattgtcacctggagcagcgacaggttaaggttgaggagccttcgagaccatcagcgtcctggcagaactctgtgtctgagcggccaccctactcttacatggccatgatacaattcgccatcaacagcactgagaggaagcgcatgactttgaaagacatctatacgtggattgaggaccactttccctactttaagcacattgccaagccaggctggaagaactccatccgccacaacctttccctgcacgacatgtttgtccgggagacgtctgccaatggcaaggtctccttctggaccattcaccccagtgccaaccgctacttgacattggaccaggtgtttaagccactggacccagggtctccacaattgcccgagcacttggaatcacagcagaaacgaccgaatccagagctccgccggaacatgaccatcaaaaccgaactccccctgggcgcacggcggaagatgaagccactgctaccacgggtcagctcatacctggtacctatccagttcccggtgaaccagtcactggtgttgcagccctcggtgaaggtgccattgcccctggcggcttccctcatgagctcagagcttgcccgccatagcaagcgagtccgcattgcccccaaggtgctgctagctgaggaggggatagctcctctttcttctgcaggaccagggaaagaggagaaactcctgtttggagaagggttttctcctttgcttccagttcagactatcaaggaggaagaaatccagcctggggaggaaatgccacacttagcgagacccatcaaagtggagagccctcccttggaagagtggccctccccggccccatctttcaaagaggaatcatctcactcctgggaggattcgtcccaatctcccaccccaagacccaagaagtcctacagtgggcttaggtccccaacccggtgtgtctcggaaatgcttgtgattcaacacagggagaggagggagaggagccggtctcggaggaaacagcatctactgcctccctgtgtggatgagccggagctgctcttctcagaggggcccagtacttcccgctgggccgcagagctcccgttcccagcagactcctctgaccctgcctcccagctcagctactcccaggaagtgggaggaccttttaagacacccattaaggaaacgctgcccatctcctccaccccgagcaaatctgtcctccccagaacccctgaatcctggaggctcacgcccccagccaaagtagggggactggatttcagcccagtacaaacctcccagggtgcctctgaccccttgcctgaccccctggggctgatggatctcagcaccactcccttgcaaagtgctcccccccttgaatcaccgcaaaggctcctcagttcagaacccttagacctcatctccgtcccctttggcaactcttctccctcagatatagacgtccccaagccaggctccccggagccacaggtttctggccttgcagccaatcgttctctgacagaaggcctggtcctggacacaatgaatgacagcctcagcaagatcctgctggacatcagctttcctggcctggacgaggacccactgggccctgacaacatcaactggtcccagtttattcctgagctacagtagagccctgcccttgcccctgtgctcaagctgtccaccatcccgggcactccaaggctcagtgcaccccaagcctctgagtgaggacagcaggcagggactgttctgctcctcatagctccctgctgcctgattatgcaaaagtagcagtcacaccctagccactgctgggaccttgtgttccccaagagtatctgattcctctgctgtccctgccaggagctgaagggtgggaacaacaaaggcaatggtgaaaagagattaggaaccccccagcctgtttccattctctgcccagcagtctcttaccttccctgatctttgcagggtggtccgtgtaaatagtataaattctccaaattatcctctaattataaatgtaagcttatttccttagatcattatccagagactgccagaaggtgggtaggatgacctggggtttcaattgacttctgttccttgcttttagttttgatagaagggaagacctgcagtgcacggtttcttccaggctgaggtacctggatcttgggttcttcactgcagggacccagacaagtggatctgcttgccagagtcctttttgcccctccctgccacctccccgtgtttccaagtcagctttcctgcaagaagaaatcctggttaaaaaagtcttttgtattgggtcaggagttgaatttggggtgggaggatggatgcaactgaagcagagtgtgggtgcccagatgtgcgctattagatgtttctctgataatgtccccaatcataccagggagactggcattgacgagaactcaggtggaggcttgagaaggccgaaagggcccctgacctgcctggcttccttagcttgcccctcagctttgcaaagagccaccctaggccccagctgaccgcatgggtgtgagccagcttgagaacactaactactcaataaaagcgaaggtgga

SEQ ID NO: 367182 - DNA, 3609 bp, Homo sapiens
gccagaccccacccccggccccggcccgggaccccctcccctcccgggatcccccggggttcccaccccgcccgcaccgccggggacccggccggtccggcgcgagcccccgtccggggccctggctcggcccccaggttggaggagcccggagcccgccttcggagctacggcctaacggcggcggcgactgcagtctggagggtccacacttgtgattctcaatggagagtgaaaacgcagattcataatgaaaactagcccccgtcggccactgattctcaaaagacggaggctgccccttcctgttcaaaatgccccaagtgaaacatcagaggaggaacctaagagatcccctgcccaacaggagtctaatcaagcagaggcctccaaggaagtggcagagtccaactcttgcaagtttccagctgggatcaagattattaaccaccccaccatgcccaacacgcaagtagtggccatccccaacaatgctaatattcacagcatcatcacagcactgactgccaagggaaaagagagtggcagtagtgggcccaacaaattcatcctcatcagctgtgggggagccccaactcagcctccaggactccggcctcaaacccaaaccagctatgatgccaaaaggacagaagtgaccctggagaccttgggaccaaaacctgcagctagggatgtgaatcttcctagaccacctggagccctttgcgagcagaaacgggagacctgtgcagatggtgaggcagcaggctgcactatcaacaatagcctatccaacatccagtggcttcgaaagatgagttctgatggactgggctcccgcagcatcaagcaagagatggaggaaaaggagaattgtcacctggagcagcgacaggttaaggttgaggagccttcgagaccatcagcgtcctggcagaactctgtgtctgagcggccaccctactcttacatggccatgatacaattcgccatcaacagcactgagaggaagcgcatgactttgaaagacatctatacgtggattgaggaccactttccctactttaagcacattgccaagccaggctggaagaactccatccgccacaacctttccctgcacgacatgtttgtccgggagacgtctgccaatggcaaggtctccttctggaccattcaccccagtgccaaccgctacttgacattggaccaggtgtttaagccactggacccagggtctccacaattgcccgagcacttggaatcacagcagaaacgaccgaatccagagctccgccggaacatgaccatcaaaaccgaactccccctgggcgcacggcggaagatgaagccactgctaccacgggtcagctcatacctggtacctatccagttcccggtgaaccagtcactggtgttgcagccctcggtgaaggtgccattgcccctggcggcttccctcatgagctcagagcttgcccgccatagcaagcgagtccgcattgcccccaaggtttttggggaacaggtggtgtttggttacatgagtaagttctttagtggcgatctgcgagattttggtacacccatcaccagcttgtttaattttatctttctttgtttatcagtgctgctagctgaggaggggatagctcctctttcttctgcaggaccagggaaagaggagaaactcctgtttggagaagggttttctcctttgcttccagttcagactatcaaggaggaagaaatccagcctggggaggaaatgccacacttagcgagacccatcaaagtggagagccctcccttggaagagtggccctccccggccccatctttcaaagaggaatcatctcactcctgggaggattcgtcccaatctcccaccccaagacccaagaagtcctacagtgggcttaggtccccaacccggtgtgtctcggaaatgcttgtgattcaacacagggagaggagggagaggagccggtctcggaggaaacagcatctactgcctccctgtgtggatgagccggagctgctcttctcagaggggcccagtacttcccgctgggccgcagagctcccgttcccagcagactcctctgaccctgcctcccagctcagctactcccaggaagtgggaggaccttttaagacacccattaaggaaacgctgcccatctcctccaccccgagcaaatctgtcctccccagaacccctgaatcctggaggctcacgcccccagccaaagtagggggactggatttcagcccagtacaaacctcccagggtgcctctgaccccttgcctgaccccctggggctgatggatctcagcaccactcccttgcaaagtgctcccccccttgaatcaccgcaaaggctcctcagttcagaacccttagacctcatctccgtcccctttggcaactcttctccctcagatatagacgtccccaagccaggctccccggagccacaggtttctggccttgcagccaatcgttctctgacagaaggcctggtcctggacacaatgaatgacagcctcagcaagatcctgctggacatcagctttcctggcctggacgaggacccactgggccctgacaacatcaactggtcccagtttattcctgagctacagtagagccctgcccttgcccctgtgctcaagctgtccaccatcccgggcactccaaggctcagtgcaccccaagcctctgagtgaggacagcaggcagggactgttctgctcctcatagctccctgctgcctgattatgcaaaagtagcagtcacaccctagccactgctgggaccttgtgttccccaagagtatctgattcctctgctgtccctgccaggagctgaagggtgggaacaacaaaggcaatggtgaaaagagattaggaaccccccagcctgtttccattctctgcccagcagtctcttaccttccctgatctttgcagggtggtccgtgtaaatagtataaattctccaaattatcctctaattataaatgtaagcttatttccttagatcattatccagagactgccagaaggtgggtaggatgacctggggtttcaattgacttctgttccttgcttttagttttgatagaagggaagacctgcagtgcacggtttcttccaggctgaggtacctggatcttgggttcttcactgcagggacccagacaagtggatctgcttgccagagtcctttttgcccctccctgccacctccccgtgtttccaagtcagctttcctgcaagaagaaatcctggttaaaaaagtcttttgtattgggtcaggagttgaatttggggtgggaggatggatgcaactgaagcagagtgtgggtgcccagatgtgcgctattagatgtttctctgataatgtccccaatcataccagggagactggcattgacgagaactcaggtggaggcttgagaaggccgaaagggcccctgacctgcctggcttccttagcttgcccctcagctttgcaaagagccaccctaggccccagctgaccgcatgggtgtgagccagcttgagaacactaactactcaataaaagcgaaggtgga

SEQ ID NO: 367183 - DNA, 2866 bp, Homo sapiens
  misc_feature (27)..(27): n is a, c, g, or t
ggacgcgtgggtcgacccacgcgtcgntgaccctggagaccttgggaccaaaacctgcagctagggatgtgaatcttcctagaccacctggagccctttgcgagcagaaacgggagacctgtgcagatggtgaggcagcaggctgcactatcaacaatagcctatccaacatccagtggcttcgaaagatgagttctgatggactgggctcccgcagcatcaagcaagagatggaggaaaaggagaattgtcacctggagcagcgacaggttaaggttgaggagccttcgagaccatcagcgtcctggcagaactctgtgtctgagcggccaccctactcttacatggccatgatacaattcgccatcaacagcactgagaggaagcgcatgactttgaaagacatctatacgtggattgaggaccactttccctactttaagcacattgccaagccaggctggaagaactccatccgccacaacctttccctgcacgacatgtttgtccgggagacgtctgccaatggcaaggtctccttctggaccattcaccccagtgccaaccgctacttgacattggaccaggtgtttaagccactggacccagggtctccacaattgcccgagcacttggaatcacagcagaaacgaccgaatccagagctccgccggaacatgaccatcaaaaccgaactccccctgggcgcacggcggaagatgaagccactgctaccacgggtcagctcatacctggtacctatccagttcccggtgaaccagtcactggtgttgcagccctcggtgaaggtgccattgcccctggcggcttccctcatgagctcagagcttgcccgccatagcaagcgagtccgcattgcccccaaggtgctgctagctgaggaggggatagctcctctttcttctgcaggaccagggaaagaggagaaactcctgtttggagaagggttttctcctttgcttccagttcagactatcaaggaggaagaaatccagcctggggaggaaatgccacacttagcgagacccatcaaagtggagagccctcccttggaagagtggccctccccggccccatctttcaaagaggaatcatctcactcctgggaggattcgtcccaatctcccaccccaagacccaagaagtcctacagtgggcttaggtccccaacccggtgtgtctcggaaatgcttgtgattcaacacagggagaggagggagaggagccggtctcggaggaaacagcatctactgcctccctgtgtggatgagccggagctgctcttctcagaggggcccagtacttcccgctgggccgcagagctcccgttcccagcagactcctctgaccctgcctcccagctcagctactcccaggaagtgggaggaccttttaagacacccattaaggaaacgctgcccatctcctccaccccgagcaaatctgtcctccccagaacccctgaatcctggaggctcacgcccccagccaaagtagggggactggatttcagcccagtacaaacctcccagggtgcctctgaccccttgcctgaccccctggggctgatggatctcagcaccactcccttgcaaagtgctcccccccttgaatcaccgcaaaggctcctcagttcagaacccttagacctcatctccgtcccctttggcaactcttctccctcagatatagacgtccccaagccaggctccccggagccacaggtttctggccttgcagccaatcgttctctgacagaaggcctggtcctggacacaatgaatgacagcctcagcaagatcctgctggacatcagctttcctggcctggacgaggacccactgggccctgacaacatcaactggtcccagtttattcctgagctacagtagagccctgcccttgcccctgtgctcaagctgtccaccatcccgggcactccaaggctcagtgcaccccaagcctctgagtgaggacagcaggcagggactgttctgctcctcatagctccctgctgcctgattatgcaaaagtagcagtcacaccctagccactgctgggaccttgtgttccccaagagtatctgattcctctgctgtccctgccaggagctgaagggtgggaacaacaaaggcaatggtgaaaagagattaggaaccccccagcctgtttccattctctgcccagcagtctcttaccttccctgatctttgcagggtggtccgtgtaaatagtataaattctccaaattatcctctaattataaatgtaagcttatttccttagatcattatccagagactgccagaaggtgggtaggatgacctggggtttcaattgacttctgttccttgcttttagttttgatagaagggaagacctgcagtgcacggtttcttccaggctgaggtacctggatcttgggttcttcactgcagggacccagacaagtggatctgcttgccagagtcctttttgcccctccctgccacctccccgtgtttccaagtcagctttcctgcaagaagaaatcctggttaaaaaagtcttttgtattgggtcaggagttgaatttggggtgggaggatggatgcaactgaagcagagtgtgggtgcccagatgtgcgctattagatgtttctctgataatgtccccaatcataccagggagactggcattgacgagaactcaggtggaggcttgagaaggccgaaagggcccctgacctgcctggcttccttagcttgcccctcagctttgcaaagagccaccctaggccccagctgaccgcatgggtgtgagccagcttgagaacactaactactcaataaaagcgaaggtgga

SEQ ID NO: 367184 - DNA, 4431 bp, Homo sapiens
gccagaccccacccccggccccggcccgggaccccctcccctcccgggatcccccggggttcccaccccgcccgcaccgccggggacccggccggtccggcgcgagcccccgtccggggccctggctcggcccccaggttggaggagcccggagcccgccttcggagctacggcctaacggcggcggcgactgcagtctggagggtccacacttgtgattctcaatggagagtgaaaacgcagattcataatgaaaactagcccccgtcggccactgattctcaaaagacggaggctgccccttcctgttcaaaatgccccaagtgaaacatcagaggaggaacctaagagatcccctgcccaacaggagtctaatcaagcagaggcctccaaggaagtggcagagtccaactcttgcaagtttccagctgggatcaagattattaaccaccccaccatgcccaacacgcaagtagtggccatccccaacaatgctaatattcacagcatcatcacagcactgactgccaagggaaaagagagtggcagtagtgggcccaacaaattcatcctcatcagctgtgggggagccccaactcagcctccaggactccggcctcaaacccaaaccagctatgatgccaaaaggacagaagtgaccctggagaccttgggaccaaaacctgcagctagggatgtgaatcttcctagaccacctggagccctttgcgagcagaaacgggagacctgtgcagatggtgaggcagcaggctgcactatcaacaatagcctatccaacatccagtggcttcgaaagatgagttctgatggactgggctcccgcagcatcaagcaagagatggaggaaaaggagaattgtcacctggagcagcgacaggttaaggttgaggagccttcgagaccatcagcgtcctggcagaactctgtgtctgagcggccaccctactcttacatggccatgatacaattcgccatcaacagcactgagaggaagcgcatgactttgaaagacatctatacgtggattgaggaccactttccctactttaagcacattgccaagccaggctggaagaactccatccgccacaacctttccctgcacgacatgtttgtccgggagacgtctgccaatggcaaggtctccttctggaccattcaccccagtgccaaccgctacttgacattggaccaggtgtttaagccactggacccagggtctccacaattgcccgagcacttggaatcacagcagaaacgaccgaatccagagctccgccggaacatgaccatcaaaaccgaactccccctgggcgcacggcggaagatgaagccactgctaccacgggtcagctcatacctggtacctatccagttcccggtgaaccagtcactggtgttgcagccctcggtgaaggtgccattgcccctggcggcttccctcatgagctcagagcttgcccgccatagcaagcgagtccgcattgcccccaaggtgctgctagctgaggaggggatagctcctctttcttctgcaggaccagggaaagaggagaaactcctgtttggagaagggttttctcctttgcttccagttcagactatcaaggaggaagaaatccagcctggggaggaaatgccacacttagcgagacccatcaaagtggagagccctcccttggaagagtggccctccccggccccatctttcaaagaggaatcatctcactcctgggaggattcgtcccaatctcccaccccaagacccaagaagtcctacagtgggcttaggtccccaacccggtgtgtctcggaaatgcttgtgattcaacacagggagaggagggagaggagccggtctcggaggaaacagcatctactgcctccctgtgtggatgagccggagctgctcttctcagaggggcccagtacttcccgctgggccgcagagctcccgttcccagcagactcctctgaccctgcctcccagctcagctactcccaggaagtgggaggaccttttaagacacccattaaggaaacgctgcccatctcctccaccccgagcaaatctgtcctccccagaacccctgaatcctggaggctcacgcccccagccaaagtagggggactggatttcagcccagtacaaacctcccagggtgcctctgaccccttgcctgaccccctggggctgatggatctcagcaccactcccttgcaaagtgctcccccccttgaatcaccgcaaaggctcctcagttcagaacccttagacctcatctccgtcccctttggcaactcttctccctcagatatagacgtccccaagccaggctccccggagccacaggtttctggccttgcagccaatcgttctctgacagaaggcctggtcctggacacaatgaatgacagcctcagcaagatcctgctggacatcagctttcctggcctggacgaggacccactgggccctgacaacatcaactggtcccagtttattcctgagctacagtagagccctgcccttgcccctgtgctcaagctgtccaccatcccgggcactccaaggctcagtgcaccccaagcctctgagtgaggacagcaggcagggactgttctgctcctcatagctccctgctgcctgattatgcaaaagtagcagtcacaccctagccactgctgggaccttgtgttccccaagagtatctgattcctctgctgtccctgccaggagctgaagggtgggaacaacaaaggcaatggtgaaaagagattaggaaccccccagcctgtttccattctctgcccagcagtctcttaccttccctgatctttgcagggtggtccgtgtaaatagtataaattctccaaattatcctctaattataaatgtaagcttatttccttagatcattatccagagactgccagaaggtgggtaggatgacctggggtttcaattgacttctgttccttgcttttagttttgatagaagggaagacctgcagtgcacggtttcttccaggctgaggtacctggatcttgggttcttcactgcagggacccagacaagtggatctgcttgccagagtcctttttgcccctccctgccacctccccgtgtttccaagtcagctttcctgcaagaagaaatcctggttaaaaaagtcttttgtattgggtcaggagttgaatttggggtgggaggatggatgcaactgaagcagagtgtgggtgcccagatgtgcgctattagatgtttctctgataatgtccccaatcataccagggagactggcattgacgagaactcaggtggaggcttgagaaggccgaaagggcccctgacctgcctggcttccttagcttgcccctcagctttgcaaagagccaccctaggccccagctgaccgcatgggtgtgagccagcttgagaacactaactactcaataaaagcgaaggtggaaaaaaaaaaaagggggcgccaaagttccctcgagggccaagtacgggaccgtttggacagggcccaaggagcaaaaaaaagaaggcgggaacagccgccggaccgcccggctcggagaccctcgggggatgcgcccacgatagccggttaaacgacgtacgctggtggtgtgacttctcagcagtacaccacgagcgcacaaacacaacaaacaacacacacagcgcacacaccacacaaccaccaaccaagaaccagaacaacacgagcacacacaacaacacacaagaacaacaacgagaaacgacagagggaaggagagggaggcgaagagggaggacggccagcgagggaagccagagcagcagcgaaaggggagagcgggaggaacgacgagaggagaggaacggaggaagaggagcggagggaacggaaggaagcgaagaagacgaagaagacaaaagggacagaggcacggagaacagaaaacagcagcgaacggagaggagagaagagaaaaagcaagccgaagaagacaagagacaagcggacacgacaaaagcagagacagaagaacacagagcgagcgagacaagcacacgcaaagagaagaaaaggggaggaggagacaaggaaagaaggcgagaccggagagagaaaaagcaagaacaaggagaaacagatgacgagcagaagcgagaaagacagacaagcaacaggaaaccggacgcaagaagacagaaggagaagagccaacaagacggaagccaggacagaccgagagaaacgaacaagaccacagcgccggaagagaaccacgaagagggaggaggaaaaggaggaagagagcaagggaaaggaccaacgaatgagaacgaagcggaagaagaacaataacgaccgacacgaggaagaaccagaacaaagcgagacgaa

SEQ ID NO: 367185 - DNA, 4099 bp, Homo sapiens
  misc_feature (3924)..(3924): n is a, c, g, or t
gccagaccccacccccggccccggcccgggaccccctcccctcccgggatcccccggggttcccaccccgcccgcaccgccggggacccggccggtccggcgcgagcccccgtccggggccctggctcggcccccaggttggaggagcccggagcccgccttcggagctacggcctaacggcggcggcgactgcagtctggagggtccacacttgtgattctcaatggagagtgaaaacgcagattcataatgaaaactagcccccgtcggccactgattctcaaaagacggaggctgccccttcctgttcaaaatgccccaagtgaaacatcagaggaggaacctaagagatcccctgcccaacaggagtctaatcaagcagaggcctccaaggaagtggcagagtccaactcttgcaagtttccagctgggatcaagattattaaccaccccaccatgcccaacacgcaagtagtggccatccccaacaatgctaatattcacagcatcatcacagcactgactgccaagggaaaagagagtggcagtagtgggcccaacaaattcatcctcatcagctgtgggggagccccaactcagcctccaggactccggcctcaaacccaaaccagctatgatgccaaaaggacagaagtgaccctggagaccttgggaccaaaacctgcagctagggatgtgaatcttcctagaccacctggagccctttgcgagcagaaacgggagacctgtgcagatggtgaggcagcaggctgcactatcaacaatagcctatccaacatccagtggcttcgaaagatgagttctgatggactgggctcccgcagcatcaagcaagagatggaggaaaaggagaattgtcacctggagcagcgacaggttaaggttgaggagccttcgagaccatcagcgtcctggcagaactctgtgtctgagcggccaccctactcttacatggccatgatacaattcgccatcaacagcactgagaggaagcgcatgactttgaaagacatctatacgtggattgaggaccactttccctactttaagcacattgccaagccaggctggaagaactccatccgccacaacctttccctgcacgacatgtttgtccgggagacgtctgccaatggcaaggtctccttctggaccattcaccccagtgccaaccgctacttgacattggaccaggtgtttaagccactggacccagggtctccacaattgcccgagcacttggaatcacagcagaaacgaccgaatccagagctccgccggaacatgaccatcaaaaccgaactccccctgggcgcacggcggaagatgaagccactgctaccacgggtcagctcatacctggtacctatccagttcccggtgaaccagtcactggtgttgcagccctcggtgaaggtgccattgcccctggcggcttccctcatgagctcagagcttgcccgccatagcaagcgagtccgcattgcccccaaggtgctgctagctgaggaggggatagctcctctttcttctgcaggaccagggaaagaggagaaactcctgtttggagaagggttttctcctttgcttccagttcagactatcaaggaggaagaaatccagcctggggaggaaatgccacacttagcgagacccatcaaagtggagagccctcccttggaagagtggccctccccggccccatctttcaaagaggaatcatctcactcctgggaggattcgtcccaatctcccaccccaagacccaagaagtcctacagtgggcttaggtccccaacccggtgtgtctcggaaatgcttgtgattcaacacagggagaggagggagaggagccggtctcggaggaaacagcatctactgcctccctgtgtggatgagccggagctgctcttctcagaggggcccagtacttcccgctgggccgcagagctcccgttcccagcagactcctctgaccctgcctcccagctcagctactcccaggaagtgggaggaccttttaagacacccattaaggaaacgctgcccatctcctccaccccgagcaaatctgtcctccccagaacccctgaatcctggaggctcacgcccccagccaaagtagggggactggatttcagcccagtacaaacctcccagggtgcctctgaccccttgcctgaccccctggggctgatggatctcagcaccactcccttgcaaagtgctcccccccttgaatcaccgcaaaggctcctcagttcagaacccttagacctcatctccgtcccctttggcaactcttctccctcagatatagacgtccccaagccaggctccccggagccacaggtttctggccttgcagccaatcgttctctgacagaaggcctggtcctggacacaatgaatgacagcctcagcaagatcctgctggacatcagctttcctggcctggacgaggacccactgggccctgacaacatcaactggtcccagtttattcctgagctacagtagagccctgcccttgcccctgtgctcaagctgtccaccatcccgggcactccaaggctcagtgcaccccaagcctctgagtgaggacagcaggcagggactgttctgctcctcatagctccctgctgcctgattatgcaaaagtagcagtcacaccctagccactgctgggaccttgtgttccccaagagtatctgattcctctgctgtccctgccaggagctgaagggtgggaacaacaaaggcaatggtgaaaagagattaggaaccccccagcctgtttccattctctgcccagcagtctcttaccttccctgatctttgcagggtggtccgtgtaaatagtataaattctccaaattatcctctaattataaatgtaagcttatttccttagatcattatccagagactgccagaaggtgggtaggatgacctggggtttcaattgacttctgttccttgcttttagttttgatagaagggaagacctgcagtgcacggtttcttccaggctgaggtacctggatcttgggttcttcactgcagggacccagacaagtggatctgcttgccagagtcctttttgcccctccctgccacctccccgtgtttccaagtcagctttcctgcaagaagaaatcctggttaaaaaagtcttttgtattgggtcaggagttgaatttggggtgggaggatggatgcaactgaagcagagtgtgggtgcccagatgtgcgctattagatgtttctctgataatgtccccaatcataccagggagactggcattgacgagaactcaggtggaggcttgagaaggccgaaagggcccctgacctgcctggcttccttagcttgcccctcagctttgcaaagagccaccctaggccccagctgaccgcatgggtgtgagccagcttgagaacactaactactcaataaaagcgaaggtggaaaaaaaaaaaaaaaaaaaaaaaaaaaaaaaaaaaaaaaaaaaaaaaaaaaaaaaaaagggggggggcgaaaaaccccccggggggggccacacaataaatgctctgaaagcccgctgtttttttgcgtaagaagagggcgcccccaaaggggcggtgcatacattaaaacggaagagcagagcgcgcagattataaacaaagggctgacggggggaaagcaacggcaagtggacgacccttggggaggcaccccacatggcgggggagacaaaaaagcggacaacatcaccagaaatatacgaacggagaaataacagaagatggtaacggggggctacaccacagccaaatatgtgcggggagaaaaatgggccgccggggactaatgtgtgcgaacaatttaccgacgctcggtcttatacaagcgngagagaggtaccacaccaaatgacaggcagagcgagagctgcccgacacgagaaacgacaccacaataatcgatagacaataacaaacagagcacagaacacacgtcgagcaccaaacacagcacgagagagaagaaagggccacaccctcgacgagaagagggcacccagccaa

SEQ ID NO: 367186 - DNA, 3024 bp, Homo sapiens
gccagaccccacccccggccccggcccgggaccccctcccctcccgggatcccccggggttcccaccccgcccgcaccgccggggacccggccggtccggcgcgagcccccgtccggggccctggctcggcccccaggttggaggagcccggagcccgccttcggagctacggcctaacggcggcggcgactgcagtctggagggtccacacttgtgattctcaatggagagtgaaaacgcagattcataatgaaaactagcccccgtcggccactgattctcaaaagacggaggctgccccttcctgttcaaaatgccccaagtgaaacatcagaggaggaacctaagagatcccctgcccaacaggagtctaatcaagcagaggcctccaaggaagtggcagagtccaactcttgcaagtttccagctgggatcaagattattaaccaccccaccatgcccaacacgcaagtagtggccatccccaacaatgctaatattcacagcatcatcacagcactgactgccaagggaaaagagagtggcagtagtgggcccaacaaattcatcctcatcagctgtgggggagccccaactcagcctccaggactccggcctcaaacccaaaccagctatgatgccaaaaggacagaagtgaccctggagaccttgggaccaaaacctgcagctagggatgtgaatcttcctagaccacctggagccctttgcgagcagaaacgggagacctgtgcagatggtgaggcagcaggctgcactatcaacaatagcctatccaacatccagtggcttcgaaagatgagttctgatggactgggctcccgcagcatcaagcaagagatggaggaaaaggagaattgtcacctggagcagcgacaggttaaggttgaggagccttcgagaccatcagcgtcctggcagaactctgtgtctgagcggccaccctactcttacatggccatgatacaattcgccatcaacagcactgagaggaagcgcatgactttgaaagacatctatacgtggattgaggaccactttccctactttaagcacattgccaagccaggctggaagaactccatccgccacaacctttccctgcacgacatgtttgtccgggagacgtctgccaatggcaaggtctccttctggaccattcaccccagtgccaaccgctacttgacattggaccaggtgtttaagccactggacccagggtctccacaattgcccgagcacttggaatcacagcagaaacgaccgaatccagagctccgccggaacatgaccatcaaaaccgaactccccctgggcgcacggcggaagatgaagccactgctaccacgggtcagctcatacctggtacctatccagttcccggtgaaccagtcactggtgttgcagccctcggtgaaggtgccattgcccctggcggcttccctcatgagctcagagcttgcccgccatagcaagcgagtccgcattgcccccaaggtgctgctagctgaggaggggatagctcctctttcttctgcaggaccagggaaagaggagaaactcctgtttggagaagggttttctcctttgcttccagttcagactatcaaggaggaagaaatccagcctggggaggaaatgccacacttagcgagacccatcaaagtggagagccctcccttggaagagtggccctccccggccccatctttcaaagaggaatcatctcactcctgggaggattcgtcccaatctcccaccccaagacccaagaagtcctacagtgggcttaggtccccaacccggtgtgtctcggaaatgcttgtgattcaacacagggagaggagggagaggagccggtctcggaggaaacagcatctactgcctccctgtgtggatgagccggagctgctcttctcagaggggcccagtacttcccgctgggccgcagagctcccgttcccagcagactcctctgaccctgcctcccagctcagctactcccaggaagtgggaggaccttttaagacacccattaaggaaacgctgcccatctcctccaccccgagcaaatctgtcctccccagaacccctgaatcctggaggctcacgcccccagccaaagtagggggactggatttcagcccagtacaaacctcccagggtgcctctgaccccttgcctgaccccctggggctgatggatctcagcaccactcccttgcaaagtgctcccccccttgaatcaccgcaaaggctcctcagttcagaacccttagacctcatctccgtcccctttggcaactcttctccctcagatatagacgtccccaagccaggctccccggagccacaggtttctggccttgcagccaatcgttctctgacagaaggcctggtcctggacacaatgaatgacagcctcagcaagatcctgctggacatcagctttcctggcctggacgaggacccactgggccctgacaacatcaactggtcccagtttattcctgagctacagtagagccctgcccttgcccctgtgctcaagctgtccaccatcccgggcactccaaggctcagtgcaccccaagcctctgagtgaggacagcaggcagggactgttctgctcctcatagctccctgctgcctgattatgcaaaagtagcatcagctttcctgcaagaagaaatcctggttaaaaaagtcttttgtattgggtcaggagttgaatttggggtgggaggatggatgcaactgaagcagagtgtgggtgcccagatgtgcgctattagatgtttctctgataatgtccccaatcataccagggagactggcattgacgagaactcaggtggaggcttgagaaggccgaaagggcccctgacctgcctggcttccttagcttgcccctcagctttgcaaagagccaccctaggccccagctgaccgcatgggtgtgagccagcttgagaacactaactactcaataaaagcgaaggtgga

SEQ ID NO: 367187 - DNA, 2294 bp, Homo sapiens
gccagaccccacccccggccccggcccgggaccccctcccctcccgggatcccccggggttcccaccccgcccgcaccgccggggacccggccggtccggcgcgagcccccgtccggggccctggctcggcccccaggttggaggagcccggagcccgccttcggagctacggcctaacggcggcggcgactgcagtctggagggtccacacttgtgattctcaatggagagtgaaaacgcagattcataatgaaaactagcccccgtcggccactgattctcaaaagacggaggctgccccttcctgttcaaaatgccccaagtgaaacatcagaggaggaacctaagagatcccctgcccaacaggagtctaatcaagcagaggcctccaaggaagtggcagagtccaactcttgcaagtttccagctgggatcaagattattaaccaccccaccatgcccaacacgcaagtagtggccatccccaacaatgctaatattcacagcatcatcacagcactgactgccaagggaaaagagagtggcagtagtgggcccaacaaattcatcctcatcagctgtgggggagccccaactcagcctccaggactccggcctcaaacccaaaccagctatgatgccaaaaggacagaagtgaccctggagaccttgggaccaaaacctgcagctagggatgtgaatcttcctagaccacctggagccctttgcgagcagaaacgggagacctgtgcagatggtgaggcagcaggctgcactatcaacaatagcctatccaacatccagtggcttcgaaagatgagttctgatggactgggctcccgcagcatcaagcaagagatggaggaaaaggagaattgtcacctggagcagcgacaggttaaggttgaggagccttcgagaccatcagcgtcctggcagaactctgtgtctgagcggccaccctactcttacatggccatgatacaattcgccatcaacagcactgagaggaagcgcatgactttgaaagacatctatacgtggattgaggaccactttccctactttaagcacattgccaagccaggctggaagaactccatccgccacaacctttccctgcacgacatgtttgtccgggagacgtctgccaatggcaaggtctccttctggaccattcaccccagtgccaaccgctacttgacattggaccaggtgtttaagccactggacccagggtctccacaattgcccgagcacttggaatcacagcagaaacgaccgaatccagagctccgccggaacatgaccatcaaaaccgaactccccctgggcgcacggcggaagatgaagccactgctaccacgggtcagctcatacctggtacctatccagttcccggtgaaccagtcactggtgttgcagccctcggtgaaggtgccattgcccctggcggcttccctcatgagctcagagcttgcccgccatagcaagcgagtccgcattgcccccaaggtgctgctagctgaggaggggatagctcctctttcttctgcaggaccagggaaagaggagaaactcctgtttggagaagggttttctcctttgcttccagttcagactatcaaggaggaagaaatccagcctggggaggaaatgccacacttagcgagacccatcaaagtggagagccctcccttggaagagtggccctccccggccccatctttcaaagaggaatcatctcactcctgggaggattcgtcccaatctcccaccccaagacccaagaagtcctacagtgggcttaggtccccaacccggtgtgtctcggaaatgcttgtgattcaacacagggagaggagggagaggagccggtctcggaggaaacagcatctactgcctccctgtgtggatgagccggagctgctcttctcagaggggcccagtacttcccgctgggccgcagagctcccgttcccagcagactcctctgaccctgcctcccagctcagctactcccaggaagtgggaggaccttttaagacacgaacgtgcatttcctcaccgagaattgtctcccagaacctgatctggggttacgccccgcaaataggggctgtttcagccagtcaaccccagggcttgacctgtttgcccgggtgggtcagccatctggatggccctgtacgaaggtctggactaacttcggcttggatccgattatcaccggcggcagtgttaaccttcaggggatacgctgttgggggggagataaagcaccctagggtgt

SEQ ID NO: 367188 - DNA, 2042 bp, Homo sapiens
gccagaccccacccccggccccggcccgggaccccctcccctcccgggatcccccggggttcccaccccgcccgcaccgccggggacccggccggtccggcgcgagcccccgtccggggccctggctcggcccccaggttggaggagcccggagcccgccttcggagctacggcctaacggcggcggcgactgcagtctggagggtccacacttgtgattctcaatggagagtgaaaacgcagattcataatgaaaactagcccccgtcggccactgattctcaaaagacggaggctgccccttcctgttcaaaatgccccaagtgaaacatcagaggaggaacctaagagatcccctgcccaacaggagtctaatcaagcagaggcctccaaggaagtggcagagtccaactcttgcaagtttccagctgggatcaagattattaaccaccccaccatgcccaacacgcaagtagtggccatccccaacaatgctaatattcacagcatcatcacagcactgactgccaagggaaaagagagtggcagtagtgggcccaacaaattcatcctcatcagctgtgggggagccccaactcagcctccaggactccggcctcaaacccaaaccagctatgatgccaaaaggacagaagtgaccctggagaccttgggaccaaaacctgcagctagggatgtgaatcttcctagaccacctggagccctttgcgagcagaaacgggagacctgtgcagatggtgaggcagcaggctgcactatcaacaatagcctatccaacatccagtggcttcgaaagatgagttctgatggactgggctcccgcagcatcaagcaagagatggaggaaaaggagaattgtcacctggagcagcgacaggttaaggttgaggagccttcgagaccatcagcgtcctggcagaactctgtgtctgagcggccaccctactcttacatggccatgatacaattcgccatcaacagcactgagaggaagcgcatgactttgaaagacatctatacgtggattgaggaccactttccctactttaagcacattgccaagccaggctggaagaactccatccgccacaacctttccctgcacgacatgtttgtccgggagacgtctgccaatggcaaggtctccttctggaccattcaccccagtgccaaccgctacttgacattggaccaggtgtttaagcagcagaaacgaccgaatccagagctccgccggaacatgaccatcaaaaccgaactccccctgggcgcacggcggaagatgaagccactgctaccacgggtcagctcatacctggtacctatccagttcccggtgaaccagtcactggtgttgcagccctcggtgaaggtgccattgcccctggcggcttccctcatgagctcagagcttgcccgccatagcaagcgagtccgcattgcccccaaggtgggtgtcctattttcctctgaagagagattctggccaattaagaatgttggaccttcagcttgcaaagcactctgataagtgttccttgagagcttataaatctagttgggtagaaaaggcataaaaacatagggaagtgtaatagcattagaagagctaaaaaggtatttggattacaatgtaagtggtgtcagaaggcccataaatacctgatgagcttgtaagaattcagacaaaagtgattgtgatagatgggctaggattattaaggaagatacacaagggaggcaggccttagaaagagatggatttggccgggcgctgtggcttacacctgtaatcccagcactttgggaggccaaggcaggtggatcatgaggtcaggagtttgagaccagcctggccaacgtggcgaaaccccgtctctactaaaaaatacaaaaattagctgggcttggtggcacatgcctgtaatcccagctacttgggaggctgaggctggagaatcacatgagcccaggaagggaagttgcagtgagccgagatcactgcactccagcctgggtga

SEQ ID NO: 367189 - DNA, 1280 bp, Homo sapiens
gccagaccccacccccggccccggcccgggaccccctcccctcccgggatcccccggggttcccaccccgcccgcaccgccggggacccggccggtccggcgcgagcccccgtccggggccctggctcggcccccaggttggaggagcccggagcccgccttcggagctacggcctaacggcggcggcgactgcagtctggagggtccacacttgtgattctcaatggagagtgaaaacgcagattcataatgaaaactagcccccgtcggccactgattctcaaaagacggaggctgccccttcctgttcaaaatgccccaagtgaaacatcagaggaggaacctaagagatcccctgcccaacaggagtctaatcaagcagaggcctccaaggaagtggcagagtccaactcttgcaagtttccagctgggatcaagattattaaccaccccaccatgcccaacacgcaagtagtggccatccccaacaatgctaatattcacagcatcatcacagcactgactgccaagggaaaagagagtggcagtagtgggcccaacaaattcatcctcatcagctgtgggggagccccaactcagcctccaggactccggcctcaaacccaaaccagctatgatgccaaaaggacagaagtgaccctggagaccttgggaccaaaacctgcagctagggatgtgaatcttcctagaccacctggagccctttgcgagcagaaacgggagacctgtgcagatggtgaggcagcaggctgcactatcaacaatagcctatccaacatccagtggcttcgaaagatgagttctgatggactgggctcccgcagcatcaagcaagagatggaggaaaaggagaattgtcacctggagcagcgacaggttaaggttgaggagccttcgagaccatcagcgtcctggcagaactctgtgtctgagcggccaccctactcttacatggccatgatacaattcgccatcaacagcactgagaggaagcgcatgactttgaaagacatctatacgtggattgaggaccactttccctactttaagcacattgccaagccaggctggaagaactccatccgccacaacctttccctgcacgacatgtttgtccgggagacgtctgccaatggcaaggtctccttctggaccattcaccccagtgccaaccgctacttgacattggaccaggtgtttaagccactgacccaggtctccacaatgccccgcacagaagggatcctctagaacgacc

SEQ ID NO: 367190 - DNA, 507 bp, Homo sapiens
gattttaagacttcaaaacgacacaaagaggatcagaacccgtatgtgatatttttgtgcgtcctgtctggtgaccgttggttcaccttatctctgtttccctttcaggtgctgctagctgaggaggggatagctcctctttcttctgcaggaccagggaaagaggagaaactcctgtttggagaagggttttctcctttgcttccagttcagactatcaaggaggaagaaatccagcctggggaggaaatgccacacttagcgagacccatcaaagtggagagccctcccttggaagagtggccctccccggccccatctttcaaagaggaatcatctcactcctgggaggattcgtcccaatctcccaccccaagacccaagaagtcctacagtgggcttaggtccccaacccggtgtgtctcggaaatgcttgtgattcaacacagggagaggagggagaggagccggtctcggaggaaacagcatctactgcctccctgtgtg

SEQ ID NO: 367191 - DNA, 458 bp, Homo sapiens
caacctactctctctctcctcggaatctgacctcaactgcaccctttctgttccacttcacttctcctcaattctgacagcttgcagtgaccttccctagctacaaagagaaaactgtgttgggtttcatttgcaaaattctcaagtagaatccatcacaccttcagtcctgttctctaagggcccttttagcagtcacattattgccctcttattattggcagagagagtctgagtgaccttggatgaatctcaactgctttttgagcttaaccttgacagcccctcggtttcattacctaatgatttaggaatatcagactatctagaaaatcttttaagattacttccatttctaataacctgctcatattccttatctcagtgaaatgaccctaccaggtacttaaatcccaaaagtcacatggaaatcctctctctcactcatcctcatattc

SEQ ID NO: 367192 - DNA, 628 bp, Homo sapiens
taatttactgagcacccactaagcattgcaaattgctatctcattttatgcttcccaggaagaatgtgaagaattattctccccatgttagagatgagaaaactgagactaaaagactgacccaaagccacatagctagaaaatggacaagccaggattcaaagtcagatttgcctgacctcaaaattcatgtttctttttcactataattccttgaactaggtccttcacagctgggcctaggggacagttgggtgggaaagctcgatgtgaaccactttgacacccacagtgggactaggcactcccagagaaaggccagtccaggacctgggcccgttgtgtgctgtgtctgtgggtcctgccaccgattcatcctcctccctgaactttctaaaatcattcttgagacttttaaatgttttattgaggtgcaagtttacaatgacagcaaacctttcaaaccacagcaagagtaacctgcctccttggcatattaaaaaataatgttagtgtcggtttttacatcccatagtttggattgctgataagagtgcttccttgacaagattatttttgaggtttacagaaagcgtaataaaatatgtaagttacatttccacaaaca

SEQ ID NO: 367193 - DNA, 1733 bp, Homo sapiens
agcggtcaacgccagcgcctgcgcactgagggcggcctggtcgtcgtctgcggcggcggcggcggctgaggagcccggctgaggcgccagtacccggcccggtccgcatttcgccttccggcttcggtttccctcggcccagcacgccccggccccgccccagccctcctgatccctcgcagcccggctccggccgcccgcctctgccgccgcaatgatgatgatggcgctgagcaagaccttcgggcagaagcccgtgaagttccagctggaggacgacggcgagttctacatgatcggctccgaggtgggaaactacctccgtatgttccgaggttctctgtacaagagatacccctcactctggaggcgactagccactgtggaagagaggaagaaaatagttgcatcgtcacatgatcacggatacacgactctagccaccagtgtgaccctgttaaaagcctcggaagtggaagagattctggatggcaacgatgagaagtacaaggctgtgtccatcagcacagagccccccacctacctcagggaacagaaggccaagaggaacagccagtgggtacccaccctgcccaacagctcccaccacttagatgccgtgccatgctccacaaccatcaacaggaaccgcatgggccgagacaagaagagaaccttccccctttggtgtggatgcatcgctgcactcaccctccgtgctgattccgccttagttctccagctttgatgaccatgacccagctgtgatccatgagaacgcatctcagcccgaggtgctggtccccatccggctggacatggagatcgatgggcagaagctgcgagacgccttcacctggaacatgaatgagaagttgatgacgcctgagatgttttcagaaatcctctgtgacgatctggatttgaacccgctgacgtttgtgccagccatcgcctctgccatcagacagcagatcgagtcctaccccacggacagcatcctggaggaccagtcagaccagcgcgtcatcatcaagctgaacatccatgtgggaaacatttccctggtggaccagtttgagtgggacatgtcagagaaggagaactcaccagagaagtttgccctgaagctgtgctcggagctggggttgggcggggagtttgtcaccaccatcgcatacagcatccggggacagctgagctggcatcagaagacctacgccttcagcgagaaccctctgcccacagtggagattgccatccggaacacgggcgatgcggaccagtggtgcccactgctggagactctgacagacgctgagatggagaagaagatccgcgaccaggacaggaacacgaggcggatgaggcgtcttgccaacacggccccggcctggtaaccagcccatcagcacacggctcccacggagcatctcagaagattgggccgcctctcctccatcttctggcaaggacagaggcgaggggacagcccagcgccatcctgaggatcgggtgggggtggagtgggggcttccaggtggcccttcccggcacacattccatttgttgagccccagtcctgccccccaccccaccctccctacccctccccagtctctggggtcaggaagaaaccttattttaggttgtgttttgtttttgtataggagccccaggcagggctagtaacagtttttaaataaaaggcaacaggtcatgttcaatttctt

SEQ ID NO: 367194 - DNA, 1020 bp, Homo sapiens
  misc_feature (879)..(879): n is a, c, g, or t
  misc_feature (881)..(881): n is a, c, g, or t
  misc_feature (905)..(905): n is a, c, g, or t
  misc_feature (909)..(909): n is a, c, g, or t
  misc_feature (926)..(926): n is a, c, g, or t
  misc_feature (933)..(935): n is a, c, g, or t
  misc_feature (942)..(942): n is a, c, g, or t
  misc_feature (944)..(944): n is a, c, g, or t
  misc_feature (954)..(954): n is a, c, g, or t
  misc_feature (972)..(972): n is a, c, g, or t
  misc_feature (975)..(976): n is a, c, g, or t
  misc_feature (983)..(984): n is a, c, g, or t
  misc_feature (990)..(990): n is a, c, g, or t
  misc_feature (994)..(994): n is a, c, g, or t
caacttaggctaggtacgaggctgggtggctggctttgatgaccatgacccagctgtgatccatgagaacgcatctcagcccgaggtgctggtccccatccggctggacatggagatcgatgggcagaagctgcgagacgccttcacctggaacatgaatgagaagttgatgacgcctgagatgttttcagaaatcctctgtgacgatctggatttgaacccgctgacgtttgtgccagccatcgcctctgccatcagacagcagatcgagtcctaccccacggacagcatcctggaggaccagtcagaccagcgcgtcatcatcaagctgaacatccatgtgggaaacatttccctggtggaccagtttgagtgggacatgtcagagaaggagaactcaccagagaagtttgccctgaagctgtgctcggagctggggttgggcggggagtttgtcaccaccatcgcatacagcatccggggacagctgagctggcatcagaagacctacgccttcagcgagaaccctctgcccacagtggagattgccatccggaacacgggcgatgcggaccagtggtgcccactgctggagactctgacagacgctgagatggagaagaagatccgcgaccaggacaggaacacgaggcggatgaggcgtcttgccaacacggccccggcctggtaaccagcccatcagcacacggctcccacggagcatctcagaagattgggccgcctctcctccatcttctggcaaggacagaggcgaggggacagcccagcgccatcctgaggatcgggtgggggtggagtgggggcttccaggtggcccttcccggcacatcattttgttggccctcttgtgcccccccncnttcttacccccggtttggggctgngaancctttttggtggtttgnttgtttnnncccgggntncttataggcnggctttttttcaaaaaanccnnttttggnnggaacncttncccctttaggacgcttgtaataaagt

SEQ ID NO: 367195 - DNA, 432 bp, Homo sapiens
aaggacctaaaacagaagatagccgaagtcatggccgtcatgcccagcataacatacagtgccgccaccagccccctgagccctgtttccccccactactcttccaaatttgtggagaccagcccctctggacttgaccccaatgcctctgtttaccagcccctgaagaaatgaaggccagctgtgtgttgtgcccaaaaatttggttaccggaaggcattgcaaaggagcgtctctggcagtcaagataaaaaaacagtttctattgtattttgtggaactgtatctgttgtccaccctccctacccctccccagtctctggggtcaggaagaaaccttattttaggttgtgttttgtttttgtataggagccccaggcagggctagtaacagtttttaaataaaaggcaacaggtcatgttcaatttctt

SEQ ID NO: 367196 - DNA, 749 bp, Homo sapiens
tggcactgtggcatcagcatggtccagcccgtgctgtcctgtcaaggaccacctccacagccagtggccccttcctccatctcagagacagagagacgctgggcacaaaagccctgttgaaagttcactttgaagggaagcccatggggtcatggcgacaacacttgttatggaaaggccctggcgcctccagcagctcccttgaggttcaggtgactggagcatccactgggtgccagcagtgctgctgggaggagcagggcacagacaggggccaaagctttctgaggattctccatctatagctggaaaagtcattcctctcactgcctcccctcctcgtagcgagaaccctctgcccacagtggagattgccatccggaacacgggcgatgcggaccagtggtgcccactgctggagactctgacagacgctgagatggagaagaagatccgcgaccaggacaggaacacgaggtacccctggccctgtggtcctgggctctgcacacaggcacctggctttccaggcagaggcagggccattgcctttcccagtctcccatggtctctgagacagagtacctctagtgctgctagaggcaggcaggcttctgggtgataaggccccatccaaacgccagggtatgtttccctgcatggaacaaacataattcctcaggctgagggtctgaccacagcccagatccaggttttggggtccctggagtgatgagcagggcctgagt

SEQ ID NO: 367197 - DNA, 1678 bp, Homo sapiens
agcggtcaacgccagcgcctgcgcactgagggcggcctggtcgtcgtctgcggcggcggcggcggctgaggagcccggctgaggcgccagtacccggcccggtccgcatttcgccttccggcttcggtttccctcggcccagcacgccccggccccgccccagccctcctgatccctcgcagcccggctccggccgcccgcctctgccgccgcaatgatgatgatggcgctgagcaagaccttcgggcagaagcccgtgaagttccagctggaggacgacggcgagttctacatgatcggctccgaggtgggaaactacctccgtatgttccgaggttctctgtacaagagatacccctcactctggaggcgactagccactgtggaagagaggaagaaaatagttgcatcgtcacatgatcacggatacacgactctagccaccagtgtgaccctgttaaaagcctcggaagtggaagagattctggatggcaacgatgagaagtacaaggctgtgtccatcagcacagagccccccacctacctcagggaacagaaggccaagaggaacagccagtgggtacccaccctgcccaacagctcccaccacttagatgccgtgccatgctccacaaccatcaacaggaaccgcatgggccgagacaagaagagaaccttccccctttgctttgatgaccatgacccagctgtgatccatgagaacgcatctcagcccgaggtgctggtccccatccggctggacatggagatcgatgggcagaagctgcgagacgccttcacctggaacatgaatgagaagttgatgacgcctgagatgttttcagaaatcctctgtgacgatctggatttgaacccgctgacgtttgtgccagccatcgcctctgccatcagacagcagatcgagtcctaccccacggacagcatcctggaggaccagtcagaccagcgcgtcatcatcaagctgaacatccatgtgggaaacatttccctggtggaccagtttgagtgggacatgtcagagaaggagaactcaccagagaagtttgccctgaagctgtgctcggagctggggttgggcggggagtttgtcaccaccatcgcatacagcatccggggacagctgagctggcatcagaagacctacgccttcagcgagaaccctctgcccacagtggagattgccatccggaacacgggcgatgcggaccagtggtgcccactgctggagactctgacagacgctgagatggagaagaagatccgcgaccaggacaggaacacgaggcggatgaggcgtcttgccaacacggccccggcctggtaaccagcccatcagcacacggctcccacggagcatctcagaagattgggccgcctctcctccatcttctggcaaggacagaggcgaggggacagcccagcgccatcctgaggatcgggtgggggtggagtgggggcttccaggtggcccttcccggcacacattccatttgttgagccccagtcctgccccccaccccaccctccctacccctccccagtctctggggtcaggaagaaaccttattttaggttgtgttttgtttttgtataggagccccaggcagggctagtaacagtttttaaataaaaggcaacaggtcatgttcaatttctt

SEQ ID NO: 367198 - DNA, 1697 bp, Homo sapiens
aacttcggctaaggtacgaggctggtgttgggtcgtcgtctgcggcggcggcggcggctgaggagcccggctgaggcgccagtacccggcccggtccgcatttcgccttccggcttcggtttccctcggcccagcacgccccggccccgccccagccctcctgatccctcgcagcccggctccggccgcccgcctctgccgccgcaatgatgatgatggcgctgagcaagaccttcgggcagaagcccgtgaagttccagctggaggacgacggcgagttctacatgatcggctccgaggtgggaaactacctccgtatgttccgaggttctctgtacaagagatacccctcactctggaggcgactagccactgtggaagagaggaagaaaatagttgcatcgtcacatggtaaaaaaacaaaacctaacactaaggatcacggatacacgactctagccaccagtgtgaccctgttaaaagcctcggaagtggaagagattctggatggcaacgatgagaagtacaaggctgtgtccatcagcacagagccccccacctacctcagggaacagaaggccaagaggaacagccagtgggtacccaccctgcccaacagctcccaccacttagatgccgtgccatgctccacaaccatcaacaggaaccgcatgggccgagacaagaagagaaccttccccctttgctttgatgaccatgacccagctgtgatccatgagaacgcatctcagcccgaggtgctggtccccatccggctggacatggagatcgatgggcagaagctgcgagacgccttcacctggaacatgaatgagaagttgatgacgcctgagatgttttcagaaatcctctgtgacgatctggatttgaacccgctgacgtttgtgccagccatcgcctctgccatcagacagcagatcgagtcctaccccacggacagcatcctggaggaccagtcagaccagcgcgtcatcatcaagctgaacatccatgtgggaaacatttccctggtggaccagtttgagtgggacatgtcagagaaggagaactcaccagagaagtttgccctgaagctgtgctcggagctggggttgggcggggagtttgtcaccaccatcgcatacagcatccggggacagctgagctggcatcagaagacctacgccttcagcgagaaccctctgcccacagtggagattgccatccggaacacgggcgatgcggaccagtggtgcccactgctggagactctgacagacgctgagatggagaagaagatccgcgaccaggacaggaacacgaggcggatgaggcgtcttgccaacacggccccggcctggtaaccagcccatcagcacacggctcccacggagcatctcagaagattgggccgcctctcctccatcttctggcaaggacagaggcgaggggacagcccagcgccatcctgaggatcgggtgggggtggagtgggggcttccaggtggcccttcccggcacacattccatttgttgagccccagtcctgccccccaccccaccctccctacccctccccagtctctggggtcaggaagaaaccttattttaggttgtgttttgtttttgtataggagccccaggcagggctagtaacagtttttaaataaaaggcaacaggtcatgttcaatttctt

SEQ ID NO: 367199 - DNA, 1994 bp, Homo sapiens
aacttcggctaaggtacgaggctggtgttgggtcgtcgtctgcggcggcggcggcggctgaggagcccggctgaggcgccagtacccggcccggtccgcatttcgccttccggcttcggtttccctcggcccagcacgccccggccccgccccagccctcctgatccctcgcagcccggctccggccgcccgcctctgccgccgcaatgatgatgatggcgctgagcaagaccttcgggcagaagcccgtgaagttccagctggaggacgacggcgagttctacatgatcggctccgaggtgggaaactacctccgtatgttccgaggttctctgtacaagagatacccctcactctggaggcgactagccactgtggaagagaggaagaaaatagttgcatcgtcacatggtaaaaaaacaaaacctaacactaaggatcacggatacacgactctagccaccagtgtgaccctgttaaaagcctcggaagtggaagagattctggatggcaacgatgagaagtacaaggctgtgtccatcagcacagagccccccacctacctcagggaacagaaggccaagaggaacagccagtgggtacccaccctgcccaacagctcccaccacttagatgccgtgccatgctccacaaccatcaacaggaaccgcatgggccgagacaagaagagaaccttccccctttgctttgatgaccatgacccagctgtgatccatgagaacgcatctcagcccgaggtgctggtccccatccggctggacatggagatcgatgggcagaagctgcgagacgccttcacctggaacatgaatgagaagttgatgacgcctgagatgttttcagaaatcctctgtgacgatctggatttgaacccgctgacgtttgtgccagccatcgcctctgccatcagacagcagatcgagtcctaccccacggacagcatcctggaggaccagtcagaccagcgcgtcatcatcaagctgaacatccatgtgggaaacatttccctggtggaccagtttgagtgggacatgtcagagaaggagaactcaccagagaagtttgccctgaagctgtgctcggagctggggttgggcggggagtttgtcaccaccatcgcatacagcatccggggacagctgagctggcatcagaagacctacgccttcagcgagaaccctctgcccacagtggagattgccatccggaacacgggcgatgcggaccagtggtgcccactgctggagactctgacagacgctgagatggagaagaagatccgcgaccaggacaggaacacgaggcggatgaggcgtcttgccaacacggccccggcctggtaaccagcccatcagcacacggctcccacggagcatctcagaagattgggccgcctctcctccatcttctggcaaggacagaggcgaggggacagcccagcgccatcctgaggatcgggtgggggtggagtgggggcttccaggtggcccttcccggcacacattccatttgttgagccccagtcctgccccccaccccaccctccctacccctccccagtctctggggtcaggaagaaaccttattttaggttgtgttttgtttttgtataggagccccaggcagggctagtaacagtttttaaataaaaggcaacaggtcatgttcaatttcttaaatctagtgtctttatttcttctgttacaatagtgttgcttgtgtaagcaggttagagtgcacagtgtccccaattgttcctggcactgcaaaaccaaattaaacaatcccacaaagaattctgacatcaatgtgttttcctcagtcaggtctatttcaagattctagaagttccttttgtaaaacttgcctttaaaactcttcctcctaatgccatcagatctcttaacattggctcactgtgggatctttcctcttaggttgaatttctacgtgaatatcaaagtgcctttttc

SEQ ID NO: 367200 - DNA, 2078 bp, Homo sapiens
agcggtcaacgccagcgcctgcgcactgagggcggcctggtcgtcgtctgcggcggcggcggcggctgaggagcccggctgaggcgccagtacccggcccggtccgcatttcgccttccggcttcggtttccctcggcccagcacgccccggccccgccccagccctcctgatccctcgcagcccggctccggccgcccgcctctgccgccgcaatgatgatgatggcgctgagcaagaccttcgggcagaagcccgtgaagttccagctggaggacgacggcgagttctacatgatcggctccgaggtgggaaactacctccgtatgttccgaggttctctgtacaagagatacccctcactctggaggcgactagccactgtggaagagaggaagaaaatagttgcatcgtcacatgatcacggatacacgactctagccaccagtgtgaccctgttaaaagcctcggaagtggaagagattctggatggcaacgatgagaagtacaaggctgtgtccatcagcacagagccccccacctacctcagggaacagaaggccaagaggaacagccagtgggtacccaccctgcccaacagctcccaccacttagatgccgtgccatgctccacaaccatcaacaggaaccgcatgggccgagacaagaagagaaccttccccctttgctttgatgaccatgacccagctgtgatccatgagaacgcatctcagcccgaggtgctggtccccatccggctggacatggagatcgatgggcagaagctgcgagacgccttcacctggaacatgaatgagaagttgatgacgcctgagatgttttcagaaatcctctgtgacgatctggatttgaacccgctgacgtttgtgccagccatcgcctctgccatcagacagcagatcgagtcctaccccacggacagcatcctggaggaccagtcagaccagcgcgtcatcatcaagctgaacatccatgtgggaaacatttccctggtggaccagtttgagtgggacatgtcagagaaggagaactcaccagagaagtttgccctgaagctgtgctcggagctggggttgggcggggagtttgtcaccaccatcgcatacagcatccggggacagctgagctggcatcagaagacctacgccttcagcgagaaccctctgcccacagtggagattgccatccggaacacgggcgatgcggaccagtggtgcccactgctggagactctgacagacgctgagatggagaagaagatccgcgaccaggacaggaacacgaggcggatgaggcgtcttgccaacacggccccggcctggtaaccagcccatcagcacacggctcccacggagcatctcagaagattgggccgcctctcctccatcttctggcaaggacagaggcgaggggacagcccagcgccatcctgaggatcgggtgggggtggagtgggggcttccaggtggcccttcccggcacacattccatttgttgagccccagtcctgccccccaccccaccctccctacccctccccagtctctggggtcaggaagaaaccttattttaggttgtgttttgtttttgtataggagccccaggcagggctagtaacagtttttaaataaaaggcaacaggtcatgttcaatttcttcaacaggtcatgttcaatttcttcaaagttttaacataaaaataatgagagccaggagtggggccggggcctggggggacgaaggtggtatgtgaacaaggttggcacacaggcctcaccctcctctgcctcagattcccaagtgggcaggtgggggtgaatggggctccgggtagcacctcagctcctctcagctcccctcagcctgttctccttccagacccagagagctgagaagagtagctgtgaggctcagggcagaggctctctgcctttcaggaacagccctaaccctgctccccttgcttggcctcaggaaggtgccgcgagctctcctgccgtccctgggccgccctgggctctgctgtgtccagatggtcaggctactgccagctggggc

SEQ ID NO: 367201 - DNA, 1683 bp, Homo sapiens
  misc_feature (1506)..(1506): n is a, c, g, or t
  misc_feature (1508)..(1509): n is a, c, g, or t
  misc_feature (1511)..(1511): n is a, c, g, or t
  misc_feature (1520)..(1520): n is a, c, g, or t
agcggtcaacgccagcgcctgcgcactgagggcggcctggtcgtcgtctgcggcggcggcggcggctgaggagcccggctgaggcgccagtacccggcccggtccgcatttcgccttccggcttcggtttccctcggcccagcacgccccggccccgccccagccctcctgatccctcgcagcccggctccggccgcccgcctctgccgccgcaatgatgatgatggcgctgagcaagaccttcgggcagaagcccgtgaagttccagctggaggacgacggcgagttctacatgatcggctccgaggtgggaaactacctccgtatgttccgaggttctctgtacaagagatacccctcactctggaggcgactagccactgtggaagagaggaagaaaatagttgcatcgtcacatgatcacggatacacgactctagccaccagtgtgaccctgttaaaagcctcggaagtggaagagattctggatggcaacgatgagaagtacaaggctgtgtccatcagcacagagccccccacctacctcagggaacagaaggccaagaggaacagccagtgggtacccaccctgcccaacagctcccaccacttagatgccgtgccatgctccacaaccatcaacaggaaccgcatgggccgagacaagaagagaaccttccccctttgctttgatgaccatgacccagctgtgatccatgagaacgcatctcagcccgaggtgctggtccccatccggctggacatggagatcgatgggcagaagctgcgagacgccttcacctggaacatgaatgagaagttgatgacgcctgagatgttttcagaaatcctctgtgacgatctggatttgaacccgctgacgtttgtgccagccatcgcctctgccatcagacagcagatcgagtcctaccccacggacagcatcctggaggaccagtcagaccagcgcgtcatcatcaagctgaacatccatgtgggaaacatttccctggtggaccagtttgagtgggacatgtcagagaaggagaactcaccagagaagtttgccctgaagctgtgctcggagctggggttgggcggggagtttgtcaccaccatcgcatacagcatccggggacagctgagctggcatcagaagacctacgccttcagcgagaaccctctgcccacagtggagattgccatccggaacacgggcgatgcggaccagtggtgcccactgctggagactctgacagacgctgagatggagaagaagatccgcgaccaggacaggaacacgaggcggatgaggcgtcttgccaacacggccccggcctggtaaccagcccatcagcacacggctcccacggagcatctcagaagattgggccgcctctcctccatcttctggcaaggacagaggcgaggggacagcccagcgccatcctgaggatcgggtgggggtggagtgggggcttccaggtggcccttcccggcacatcntnntntgggccagnctggcccacaacctcctacctcccagttggggagagaaccataggggggtgggtagaccaggggaaaagttaaaggagcttgttcaaaaaacggcttcgggaagaatgttcctttagaaggctgatagacttgtcctcggagagaggccctcttgattttccc

SEQ ID NO: 367202 - DNA, 1231 bp, Homo sapiens
ctctgtgctgatggacacagccccccacctacctcttggccttctgttccctgaggtaggtggggggctctgtgctgatggacacagccttgtactcctcagggaacagaaggccaagaggaacagccagtgggtacccaccctgcccaacagctcccaccacttagatgccgtgccatgctccacaaccatcaacaggaaccgcatgggccgagacaagaagagaaccttccccctttgctttgatgaccatgacccagctgtgatccatgagaacgcatctcagcccgaggtgctggtccccatccggctggacatggagatcgatgggcagaagctgcgagacgccttcacctggaacatgaatgagaagttgatgacgcctgagatgttttcagaaatcctctgtgacgatctggatttgaacccgctgacgtttgtgccagccatcgcctctgccatcagacagcagatcgagtcctaccccacggacagcatcctggaggaccagtcagaccagcgcgtcatcatcaagctgaacatccatgtgggaaacatttccctggtggaccagtttgagtgggacatgtcagagaaggagaactcaccagagaagtttgccctgaagctgtgctcggagctggggttgggcggggagtttgtcaccaccatcgcatacagcatccggggacagctgagctggcatcagaagacctacgccttcagcgagaaccctctgcccacagtggagattgccatccggaacacgggcgatgcggaccagtggtgcccactgctggagactctgacagacgctgagatggagaagaagatccgcgaccaggacaggaacacgaggcggatgaggcgtcttgccaacacggccccggcctggtaaccagcccatcagcacacggctcccacggagcatctcagaagattgggccgcctctcctccatcttctggcaaggacagaggcgaggggacagcccagcgccatcctgaggatcgggtgggggtggagtgggggcttccaggtggcccttcccggcacacattccatttgttgagccccagtcctgccccccaccccaccctccctacccctccccagtctctggggtcaggaagaaaccttattttaggttgtgttttgtttttgtataggagccccaggcagggctagtaacagtttttaaataaaaggcaacaggtcatgttcaatttctt

SEQ ID NO: 367203 - DNA, 1112 bp, Homo sapiens
gctgttctgaggatacccgactgctgagcgaatacgaacactgtgagagttcgtggccatgctccacaaccatcaacaggaaccgcatgggccgagacaagaagagaaccttccccctttgctttgatgaccatgacccagctgtgatccatgagaacgcatctcagcccgaggtgctggtccccatccggctggacatggagatcgatgggcagaagctgcgagacgccttcacctggaacatgaatgagaagttgatgacgcctgagatgttttcagaaatcctctgtgacgatctggatttgaacccgctgacgtttgtgccagccatcgcctctgccatcagacagcagatcgagtcctaccccacggacagcatcctggaggaccagtcagaccagcgcgtcatcatcaagctgaacatccatgtgggaaacatttccctggtggaccagtttgagtgggacatgtcagagaaggagaactcaccagagaagtttgccctgaagctgtgctcggagctggggttgggcggggagtttgtcaccaccatcgcatacagcatccggggacagctgagctggcatcagaagacctacgccttcagcgagaaccctctgcccacagtggagattgccatccggaacacgggcgatgcggaccagtggtgcccactgctggagactctgacagacgctgagatggagaagaagatccgcgaccaggacaggaacacgaggcggatgaggcgtcttgccaacacggccccggcctggtaaccagcccatcagcacacggctcccacggagcatctcagaagattgggccgcctctcctccatcttctggcaaggacagaggcgaggggacagcccagcgccatcctgaggatcgggtgggggtggagtgggggcttccaggtggcccttcccggcacacattccatttgttgagccccagtcctgccccccaccccaccctccctacccctccccagtctctggggtcaggaagaaaccttattttaggttgtgttttgtttttgtataggagccccaggcagggctagtaacagtttttaaataaaaggcaacaggtcatgttcaatttctt

SEQ ID NO: 367204 - DNA, 2019 bp, Homo sapiens
gagcggctgagagccgtggagagggtgctcggggtcatctgccttgtcttctcctggccctgtccccctgagagagctttccaggtctccaccctcccaagctcccagcgctgtcctttcctccttccttccttccatcattcctccttccctccctcccatcctaccccctcctccttttccttctgtcttccttccctctatctcctcttcccatccctagttgactgtccccttctcccttagagtggccaccccttttctgcagcatccctgcccctttccctgtctgtttcccagcgcattcatgcctggcactcagctcacttttctctgtcttccatctacctcccaaggtcactgggggcctttcgcagccctctccatgctcccagacgcccttaggtgtcctgtgtcctccagctccatttcaccaacctgcctgccggactcttccctctttatcttcccaaagtactccattgcttggaatcctcctgggactccctcagggcagtggccagtttgcatagcctgagggaagaactgtgggtgcttcgacacccgctagctttgcagcatccctgaccactgctcctcacggaatctgtgctctgtggtctgtttgtacgtcctcagcagttcctccattcacctgccttggccttgctagaatatttcctcttctggaaatgcccttctcctttcccatagccttccatgaaagtcctgccaaatttcaggcttaaatatcccttcacaggatgtctgggtgttgttccaacactgcccaggtcgattctattgcagacagactggtgcttgttatttatggccccaactgtccccattagaccgtggccccgggacccctgctagcctcgtctgctgcctcagctgttagctgacaagcggccatcttccccagatgggtttgcagaagcctgctgtgcagagagagaggctgaaaatttgcatacctagggctccggccccctcgctgactgttgcttccatttcactttcagctttgatgaccatgacccagctgtgatccatgagaacgcatctcagcccgaggtgctggtccccatccggctggacatggagatcgatgggcagaagctgcgagacgccttcacctggaacatgaatgagaagttgatgacgcctgagatgttttcagaaatcctctgtgacgatctggatttgaacccgctgacgtttgtgccagccatcgcctctgccatcagacagcagatcgagtcctaccccacggacagcatcctggaggaccagtcagaccagcgcgtcatcatcaagctgaacatccatgtgggaaacatttccctggtggaccagtttgagtgggacatgtcagagaaggagaactcaccagagaagtttgccctgaagctgtgctcggagctggggttgggcggggagtttgtcaccaccatcgcatacagcatccggggacagctgagctggcatcagaagacctacgccttcagcgagaaccctctgcccacagtggagattgccatccggaacacgggcgatgcggaccagtggtgcccactgctggagactctgacagacgctgagatggagaagaagatccgcgaccaggacaggaacacgaggcggatgaggcgtcttgccaacacggccccggcctggtaaccagcccatcagcacacggctcccacggagcatctcagaagattgggccgcctctcctccatcttctggcaaggacagaggcgaggggacagcccagcgccatcctgaggatcgggtgggggtggagtgggggcttccaggtggcccttcccggcacacattccatttgttgagccccagtcctgccccccaccccaccctccctacccctccccagtctctggggtcaggaagaaaccttattttaggttgtgttttgtttttgtataggagccccaggcagggctagtaacagtttttaaataaaaggcaacaggtcatgttcaatttctt

SEQ ID NO: 367205 - DNA, 1482 bp, Homo sapiens
  misc_feature (1439)..(1439): n is a, c, g, or t
  misc_feature (1475)..(1475): n is a, c, g, or t
  misc_feature (1478)..(1478): n is a, c, g, or t
agcggtcaacgccagcgcctgcgcactgagggcggcctggtcgtcgtctgcggcggcggcggcggctgaggagcccggctgaggcgccagtacccggcccggtccgcatttcgccttccggcttcggtttccctcggcccagcacgccccggccccgccccagccctcctgatccctcgcagcccggctccggccgcccgcctctgccgccgcaatgatgatgatggcgctgagcaagaccttcgggcagaagcccgtgaagttccagctggaggacgacggcgagttctacatgatcggctccgaggtgggaaactacctccgtatgttccgaggttctctgtacaagagatacccctcactctggaggcgactagccactgtggaagagaggaagaaaatagttgcatcgtcacatgatcacggatacacgactctagccaccagtgtgaccctgttaaaagcctcggaagtggaagagattctggatggcaacgatgagaagtacaaggctgtgtccatcagcacagagccccccacctacctcagggaacagaaggccaagaggaacagccagtgggtacccaccctgcccaacagctcccaccacttagatgccgtgccatgctccacaaccatcaacaggaaccgcatgggccgagacaagaagagaaccttccccctttgctttgatgaccatgacccagctgtgatccatgagaacgcatctcagcccgaggtgctggtccccatccggctggacatggagatcgatgggcagaagctgcgagacgccttcacctggaacatgaatgagaagttgatgacgcctgagatgttttcagaaatcctctgtgacgatctggatttgaacccgctgacgtttgtgccagccatcgcctctgccatcagacagcagatcgagtcctaccccacggacagcatcctggaggaccagtcagaccagcgcgtcatcatcaagctgaacatccatgtgggaaacatttccctggtggaccagtttgagtgggacatgtcagagaaggagaactcaccagagaagtttgccctgaagctgtgctcggagctggggttgggcggggagtttgtcaccaccatcgcatacagcatccggggacagctgagctggcatcagaagacctacgccttcagcgagaaccctctgcccacagtggagattgccatccggaacacgggcgatgcggaccagtggtgcccactgctggagactctgacagacgcctctgccgccgcaatgatgatgatggcgctgagcaagaccttcgggcagaagcccgtgaagttccagctggaggacgacggcgagttctacatgatcggctccgaggtgggaaactacctccgtatgttccgaggttctctgtacaagagatacccctcactctggaggcgactanccactgtggaagagaggaagaaaatagtgcatcgtnacnttgt

SEQ ID NO: 367206 - DNA, 1021 bp, Homo sapiens
  misc_feature (33)..(33): n is a, c, g, or t
caacccttacggctaggtacgaggctgtgtgtncaattcagtacatggtccagtattacgcgtcatcagtgcgaggtgcacgatccccaatacgactggatgtgagatcgatgttcgcgaagctgatagactcctaacttctgggacattgaattagaatttaattgatatccttgaactgttttcagaaatcctctgtgacgatctggatttgaacccgctgacgtttgtgccagccatcgcctctgccatcagacagcagatcgagtcctaccccacggacagcatcctggaggaccagtcagaccagcgcgtcatcatcaagctgaacatccatgtgggaaacatttccctggtggaccagtttgagtgggacatgtcagagaaggagaactcaccagagaagtttgccctgaagctgtgctcggagctggggttgggcggggagtttgtcaccaccatcgcatacagcatccggggacagctgagctggcatcagaagacctacgccttcagcgagaaccctctgcccacagtggagattgccatccggaacacgggcgatgcggaccagtggtgcccactgctggagactctgacagacgctgagatggagaagaagatccgcgaccaggacaggaacacgaggcggatgaggcgtcttgccaacacggccccggcctggtaaccagcccatcagcacacggctcccacggagcatctcagaagattgggccgcctctcctccatcttctggcaaggacagaggcgaggggacagcccagcgccatcctgaggatcgggtgggggtggagtgggggcttccaggtggcccttcccggcacacattccatttgttgagccccagtcctgccccccaccccaccctccctacccctccccagtctctggggtcaggaagaaaccttattttaggttgtgttttgtttttgtataggagccccaggcagggctagtaacagtttttaaataaaaggcaacaggtcatgttcaatttctt

SEQ ID NO: 367207 - DNA, 1050 bp, Homo sapiens
agcggtcaacgccagcgcctgcgcactgagggcggcctggtcgtcgtctgcggcggcggcggcggctgaggagcccggctgaggcgccagtacccggcccggtccgcatttcgccttccggcttcggtttccctcggcccagcacgccccggccccgccccagccctcctgatccctcgcagcccggctccggccgcccgcctctgccgccgcaatgatgatgatggcgctgagcaagaccttcgggcagaagcccgtgaagttccagctggaggacgacggcgagttctacatgatcggctccgaggtgggaaactacctccgtatgttccgaggttctctgtacaagagatacccctcactctggaggcgactagccactgtggaagagaggaagaaaatagttgcatcgtcacatgatcacggatacacgactctagccaccagtgtgaccctgttaaaagcctcggaagtggaagagattctggatggcaacgatgagaagtacaaggctgtgtccatcagcacagagccccccacctacctcagggaacagaaggccaagaggaacagccagtgggtacccaccctgcccaacagctcccaccacttagatgccgtgccatgctccacaaccatcaacaggaaccgcatgggccgagacaagaagagaaccttccccctttgctttgatgaccatgacccagctgtgatccatgagaacgcatctcagcccgaggtgctggtccccatccggctggacatggagatcgatgggcagaagctgcgagacgccttcacctggaacatgaatggtacaaggcagtcgggcttggctgggcctggccccaacccctgtgtgttacgtgggaacagtcccgtttcctgccagctgcctgtcaggcagattctggacctgacacgcaggacatcggggcatagttttggagggtgtgggctctgggttcagtcctggttctgttgctgttcactgtggattgggcctgtgaactttggactctttccccatactgaggttgggtggcccaa

SEQ ID NO: 367208 - DNA, 831 bp, Homo sapiens
agcggtcaacgccagcgcctgcgcactgagggcggcctggtcgtcgtctgcggcggcggcggcggctgaggagcccggctgaggcgccagtacccggcccggtccgcatttcgccttccggcttcggtttccctcggcccagcacgccccggccccgccccagccctcctgatccctcgcagcccggctccggccgcccgcctctgccgccgcaatgatgatgatggcgctgagcaagaccttcgggcagaagcccgtgaagttccagctggaggacgacggcgagttctacatgatcggctccgaggtgggaaactacctccgtatgttccgaggttctctgtacaagagatacccctcactctggaggcgactagccactgtggaagagaggaagaaaatagttgcatcgtcacatgatcacggatacacgactctagccaccagtgtgaccctgttaaaagcctcggaagtggaagagattctggatggcaacgatgagaagtacaaggctgtgtccatcagcacagagccccccacctacctcagggaacagaaggccaagaggaacagccagtgggtacccaccctgcccaacagctcccaccacttagatgccgtgccatgctccacaaccatcaacaggaaccgcatgggccgagacaagaagagaaccttccccctttgctttgatgaccatgacccagctgtgatccatgagaacgcatctcagcccgaggtgctggtccccatccggctggacatggagatcgatgggcagggctagtaacagtttttaaataaaaggcaacaggtcatgttcaatttctt

SEQ ID NO: 367209 - DNA, 1105 bp, Homo sapiens
agcggtcaacgccagcgcctgcgcactgagggcggcctggtcgtcgtctgcggcggcggcggcggctgaggagcccggctgaggcgccagtacccggcccggtccgcatttcgccttccggcttcggtttccctcggcccagcacgccccggccccgccccagccctcctgatccctcgcagcccggctccggccgcccgcctctgccgccgcaatgatgatgatggcgctgagcaagaccttcgggcagaagcccgtgaagttccagctggaggacgacggcgagttctacatgatcggctccgaggtgggaaactacctccgtatgttccgaggttctctgtacaagagatacccctcactctggaggcgactagccactgtggaagagaggaagaaaatagttgcatcgtcacatgatcacggatacacgactctagccaccagtgtgaccctgttaaaagcctcggaagtggaagagattctggatggcaacgatgagaagtacaaggctgtgtccatcagcacagagccccccacctacctcagggaacagaaggccaagaggaacagccagtgggtacccaccctgcccaacagctcccaccacttagatgccgtgccatgctccacaaccatcaacaggaaccgcatgggccgagacaagaagagaaccttccccctttggtgtggatgcatcgctgcactcaccctccgtgctgattccgccttagttctccagctttgatgaccatgacccagctgtgatccatgagaacgcatctcagcccgaggtgctggtccccatccggctggacatggagatcgatgggcagaagctgcgagacgccttcacctggaacatgaatggtacaaggcagtcgggcttggctgggcctggccccaacccctgtgtgttacgtgggaacagtcccgtttcctgccagctgcctgtcaggcagattctggacctgacacgcaggacatcggggcatagttttggagggtgtgggctctgggttcagtcctggttctgttgctgttcactgtggattgggcctgtgaactttggactctttccccatactgaggttgggtggcccaa

SEQ ID NO: 367210 - DNA, 850 bp, Homo sapiens
tggcactgtggcatcagcatggtccagcccgtgctgtcctgtcaaggaccacctccacagccagtggccccttcctccatctcagagacagagagacgctgggcacaaaagccctgttgaaagttcactttgaagggaagcccatggggtcatggcgacaacacttgttatggaaaggccctggcgcctccagcagctcccttgaggttcaggtgactggagcatccactgggtgccagcagtgctgctgggaggagcagggcacagacaggggccaaagctttctgaggattctccatctatagctggaaaagtcattcctctcactgcctcccctcctcgtagcgagaaccctctgcccacagtggagattgccatccggaacacgggcgatgcggaccagtggtgcccactgctggagactctgacagacgctgagatggagaagaagatccgcgaccaggacaggaacacgaggcggatgaggcgtcttgccaacacggccccggcctggtaaccagcccatcagcacacggctcccacggagcatctcagaagattgggccgcctctcctccatcttctggcaaggacagaggcgaggggacagcccagcgccatcctgaggatcgggtgggggtggagtgggggcttccaggtggcccttcccggcacacattccatttgttgagccccagtcctgccccccaccccaccctccctacccctccccagtctctggggtcaggaagaaaccttattttaggttgtgttttgtttttgtataggagccccaggcagggctagtaacagtttttaaataaaaggcaacaggtcatgttcaatttctt

SEQ ID NO: 367211 - DNA, 850 bp, Homo sapiens
aacttcggctaaggtacgaggctggtgttgggtcgtcgtctgcggcggcggcggcggctgaggagcccggctgaggcgccagtacccggcccggtccgcatttcgccttccggcttcggtttccctcggcccagcacgccccggccccgccccagccctcctgatccctcgcagcccggctccggccgcccgcctctgccgccgcaatgatgatgatggcgctgagcaagaccttcgggcagaagcccgtgaagttccagctggaggacgacggcgagttctacatgatcggctccgaggtgggaaactacctccgtatgttccgaggttctctgtacaagagatacccctcactctggaggcgactagccactgtggaagagaggaagaaaatagttgcatcgtcacatggtaaaaaaacaaaacctaacactaaggatcacggatacacgactctagccaccagtgtgaccctgttaaaagcctcggaagtggaagagattctggatggcaacgatgagaagtacaaggctgtgtccatcagcacagagccccccacctacctcagggaacagaaggccaagaggaacagccagtgggtacccaccctgcccaacagctcccaccacttagatgccgtgccatgctccacaaccatcaacaggaaccgcatgggccgagacaagaagagaaccttccccctttgctttgatgaccatgacccagctgtgatccatgagaacgcatctcagcccgaggtgctggtccccatccggctggacatggagatcgatgggcagggctagtaacagtttttaaataaaaggcaacaggtcatgttcaatttctt

SEQ ID NO: 367212 - DNA, 1307 bp, Homo sapiens
ccttgatgtgctgcatccacttggctggctgctgtgtgccaccgccaccagcagagtgacccagtgatgtttgtctgttacagatcacggatacacgactctagccaccagtgtgaccctgttaaaagcctcggaagtggaagagattctggatggcaacgatgagaagtacaaggctgtgtccatcagcacagagccccccacctacctcagggaacagaaggccaagaggaacagccagtgggtacccaccctgcccaacagctcccaccacttagatgccgtgccatgctccacaaccatcaacaggaaccgcatgggccgagacaagaagagaaccttccccctttggtgtggatgcatcgctgcactcaccctccgtgctgattccgccttagttctccagcacgtttcagttccttcctccccagaaaaacactctgctttgaccttgtgctccccacaacgccacagtacctcctcgcctttgaactgttgtgtttccctgacttccaggacattgtccatagcctccttggctctgtctgctgtcaccttgccatgtcctcctcacctctctggcccctcaagtggagttactcagggcgcggtccttgggccctttctctgccctcagtttcacatgagtgggccacagccagtctgatggtgcagatgccatccacgtgactcccactgtgccaccatttcccagagcctgctggagtaaaccaccacaaactggtggcttcgagcagagcacatttcttccctcacagttctggggcccaggagcctggatttagtttcactagaccagactcatgtgtggacagggccatgctccctccagaggccatcgaggcgattcggtccttgcttcttccagctttgggggctgccacgttccagtctcagcctctgtggtcacgtggccttctctgcatgaaacttccctgtctctctcttagaaggacacttggcgatgtaatttagggcccttctggttaatctctcaggatctttcacttaatcgtatcttcaaagtctccttttttggccatatgagctgacagtcacaggttttggggattaagttgtagatgtcttcggggtctgttttttacctctgtggcccagacttcctcagctgccctcaccccctcagcctcatgctgcctgaagacctctccatctcggcgcgtggagatccagccctctccttgctcaggctgtaggtttctttcccaaggcctgccttttcctcacacagcaagtccagtctctgccaggttctcccctgggac

SEQ ID NO: 367213 - DNA, 1670 bp, Homo sapiens
aacttcggctaaggtacgaggctggtgttgggtcgtcgtctgcggcggcggcggcggctgaggagcccggctgaggcgccagtacccggcccggtccgcatttcgccttccggcttcggtttccctcggcccagcacgccccggccccgccccagccctcctgatccctcgcagcccggctccggccgcccgcctctgccgccgcaatgatgatgatggcgctgagcaagaccttcgggcagaagcccgtgaagttccagctggaggacgacggcgagttctacatgatcggctccgaggtgggaaactacctccgtatgttccgaggttctctgtacaagagatacccctcactctggaggcgactagccactgtggaagagaggaagaaaatagttgcatcgtcacatgatcacggatacacgactctagccaccagtgtgaccctgttaaaagcctcggaagtggaagagattctggatggcaacgatgagaagtacaaggctgtgtccatcagcacagagccccccacctacctcagggaacagaaggccaagaggaacagccagtgggtacccaccctgcccaacagctcccaccacttagatgccgtgccatgctccacaaccatcaacaggaaccgcatgggccgagacaagaagagaaccttccccctttgctttgatgaccatgacccagctgtgatccatgagaacgcatctcagcccgaggtgctggtccccatccggctggacatggagatcgatgggcagaagctgcgagacgccttcacctggaacatgaatgagaagttgatgacgcctgagatgttttcagaaatcctctgtgacgatctggatttgaacccgctgacgtttgtgccagccatcgcctctgccatcagacagcagatcgagtcctaccccacggacagcatcctggaggaccagtcagaccagcgcgtcatcatcaagctgaacatccatgtgggaaacatttccctggtggaccagtttgagtgggacatgtcagagaaggagaactcaccagagaagtttgccctgaagctgtgctcggagctggggttgggcggggagtttgtcaccaccatcgcatacagcatccggggacagctgagctggcatcagaagacctacgccttcagcgagaaccctctgcccacagtggagattgccatccggaacacgggcgatgcggaccagtggtgcccactgctggagactctgacagacgctgagatggagaagaagatccgcgaccaggacaggaacacgaggcggatgaggcgtcttgccaacacggccccggcctggtaaccagcccatcagcacacggctcccacggagcatctcagaagattgggccgcctctcctccatcttctggcaaggacagaggcgaggggacagcccagcgccatcctgaggatcgggtgggggtggagtgggggcttccaggtggcccttcccggcacacattccatttgttgagccccagtcctgccccccaccccaccctccctacccctccccagtctctggggtcaggaagaaaccttattttaggttgtgttttgtttttgtataggagccccaggcagggctagtaacagtttttaaataaaaggcaacaggtcatgttcaatttctt

SEQ ID NO: 367214 - DNA, 1672 bp, Homo sapiens
cagatgtcccatcgctgtagtctctctggataagacccttggtggccagtgaggcacttcgccggagctcctgcagattgtggacctcggtggccatgatccgggggcgctcggaggctgtcgcggggccttgtacgcgtacaaggccccgccccagccctcctgatccctcgcagcccggctccggccgcccgcctctgccgccgcaatgatgatgatggcgctgagcaagaccttcgggcagaagcccgtgaagttccagctggaggacgacggcgagttctacatgatcggctccgaggtgggaaactacctccgtatgttccgaggttctctgtacaagagatacccctcactctggaggcgactagccactgtggaagagaggaagaaaatagttgcatcgtcacatgatcacggatacacgactctagccaccagtgtgaccctgttaaaagcctcggaagtggaagagattctggatggcaacgatgagaagtacaaggctgtgtccatcagcacagagccccccacctacctcagggaacagaaggccaagaggaacagccagtgggtacccaccctgcccaacagctcccaccacttagatgccgtgccatgctccacaaccatcaacaggaaccgcatgggccgagacaagaagagaaccttccccctttgctttgatgaccatgacccagctgtgatccatgagaacgcatctcagcccgaggtgctggtccccatccggctggacatggagatcgatgggcagaagctgcgagacgccttcacctggaacatgaatgagaagttgatgacgcctgagatgttttcagaaatcctctgtgacgatctggatttgaacccgctgacgtttgtgccagccatcgcctctgccatcagacagcagatcgagtcctaccccacggacagcatcctggaggaccagtcagaccagcgcgtcatcatcaagctgaacatccatgtgggaaacatttccctggtggaccagtttgagtgggacatgtcagagaaggagaactcaccagagaagtttgccctgaagctgtgctcggagctggggttgggcggggagtttgtcaccaccatcgcatacagcatccggggacagctgagctggcatcagaagacctacgccttcagcgagaaccctctgcccacagtggagattgccatccggaacacgggcgatgcggaccagtggtgcccactgctggagactctgacagacgctgagatggagaagaagatccgcgaccaggacaggaacacgaggcggatgaggcgtcttgccaacacggccccggcctggtaaccagcccatcagcacacggctcccacggagcatctcagaagattgggccgcctctcctccatcttctggcaaggacagaggcgaggggacagcccagcgccatcctgaggatcgggtgggggtggagtgggggcttccaggtggcccttcccggcacacattccatttgttgagccccagtcctgccccccaccccaccctccctacccctccccagtctctggggtcaggaagaaaccttattttaggttgtgttttgtttttgtataggagccccaggcagggctagtaacagtttttaaataaaaggcaacaggtcatgttcaatttctt

SEQ ID NO: 367215 - DNA, 1647 bp, Homo sapiens
agcggtcaacgccagcgcctgcgcactgagggcggcctggtcgtcgtctgcggcggcggcggcggctgaggagcccggctgaggcgccagtacccggcccggtccgcatttcgccttccggcttcggtttccctcggcccagcacgccccggccccgccccagccctcctgatccctcgcagcccggctccggccgcccgcctctgccgccgcaatgatgatgatggcgctgagcaagaccttcgggcagaagcccgtgaagttccagctggaggacgacggcgagttctacatgatcggctccgaggtgggaaactacctccgtatgttccgaggttctctgtacaagagatacccctcactctggaggcgactagccactgtggaagagaggaagaaaatagttgcatcgtcacatgatcacggatacacgactctagccaccagtgtgaccctgttaaaagcctcggaagtggaagagattctggatggcaacgatgagaagtacaaggctgtgtccatcagcacagagccccccacctacctcagggaacagaaggccaagaggaacagccagtgggtacccaccctgcccaacagctcccaccacttagatgccgtgccatgctccacaaccatcaacaggaaccgcatgggccgagacaagaagagaaccttccccctttgctttgatgaccatgacccagctgtgatccatgagaacgcatctcagcccgaggtgctggtccccatccggctggacatggagatcgatgggcagaagctgcgagacgccttcacctggaacatgaatgagaagttgatgacgcctgagatgttttcagaaatcctctgtgacgatctggatttgaacccgctgacgtttgtgccagccatcgcctctgccatcagacagcagatcgagtcctaccccacggacagcatcctggaggaccagtcagaccagcgcgtcatcatcaagctgaacatccatgtgggaaacatttccctggtggaccagtttgagtgggacatgtcagagaaggagaactcaccagagaagtttgccctgaagctgtgctcggagctggggttgggcggggagtttgtcaccaccatcgcatacagcatccggggacagctgagctggcatcagaagacctacgccttcagcgagaaccctctgcccacagtggagattgccatccggaacacgggcgatgcggaccagtggtgcccactgctggagactctgacagacgctgagatggagaagaagatccgcgaccaggacaggaacacgaggcggatgaggcgtcttgccaacacggccccggcctggtaaccagcccatcagcacacggctcccacggagcatctcagaagattgggccgcctctcctccatcttctggcaaggacagaggcgaggggacagcccagcgccatcctgaggatcgggtgggggtggagtgggggcttccaggtggcccttcccggcacacattccatttgttgagccccagtcctgccccccaccagcgacctcctagctcccattctggtaaaaactttagtgttttggtgtagaccggcagggctagtaacagtttttaaataaaaggcaacaggtcatgttcaatttctt

SEQ ID NO: 367216 - DNA, 1674 bp, Homo sapiens
  misc_feature (1533)..(1533): n is a, c, g, or t
  misc_feature (1535)..(1535): n is a, c, g, or t
  misc_feature (1559)..(1559): n is a, c, g, or t
  misc_feature (1563)..(1563): n is a, c, g, or t
  misc_feature (1580)..(1580): n is a, c, g, or t
  misc_feature (1587)..(1589): n is a, c, g, or t
  misc_feature (1596)..(1596): n is a, c, g, or t
  misc_feature (1598)..(1598): n is a, c, g, or t
  misc_feature (1608)..(1608): n is a, c, g, or t
  misc_feature (1626)..(1626): n is a, c, g, or t
  misc_feature (1629)..(1630): n is a, c, g, or t
  misc_feature (1637)..(1638): n is a, c, g, or t
  misc_feature (1644)..(1644): n is a, c, g, or t
  misc_feature (1648)..(1648): n is a, c, g, or t
agcggtcaacgccagcgcctgcgcactgagggcggcctggtcgtcgtctgcggcggcggcggcggctgaggagcccggctgaggcgccagtacccggcccggtccgcatttcgccttccggcttcggtttccctcggcccagcacgccccggccccgccccagccctcctgatccctcgcagcccggctccggccgcccgcctctgccgccgcaatgatgatgatggcgctgagcaagaccttcgggcagaagcccgtgaagttccagctggaggacgacggcgagttctacatgatcggctccgaggtgggaaactacctccgtatgttccgaggttctctgtacaagagatacccctcactctggaggcgactagccactgtggaagagaggaagaaaatagttgcatcgtcacatgatcacggatacacgactctagccaccagtgtgaccctgttaaaagcctcggaagtggaagagattctggatggcaacgatgagaagtacaaggctgtgtccatcagcacagagccccccacctacctcagggaacagaaggccaagaggaacagccagtgggtacccaccctgcccaacagctcccaccacttagatgccgtgccatgctccacaaccatcaacaggaaccgcatgggccgagacaagaagagaaccttccccctttgctttgatgaccatgacccagctgtgatccatgagaacgcatctcagcccgaggtgctggtccccatccggctggacatggagatcgatgggcagaagctgcgagacgccttcacctggaacatgaatgagaagttgatgacgcctgagatgttttcagaaatcctctgtgacgatctggatttgaacccgctgacgtttgtgccagccatcgcctctgccatcagacagcagatcgagtcctaccccacggacagcatcctggaggaccagtcagaccagcgcgtcatcatcaagctgaacatccatgtgggaaacatttccctggtggaccagtttgagtgggacatgtcagagaaggagaactcaccagagaagtttgccctgaagctgtgctcggagctggggttgggcggggagtttgtcaccaccatcgcatacagcatccggggacagctgagctggcatcagaagacctacgccttcagcgagaaccctctgcccacagtggagattgccatccggaacacgggcgatgcggaccagtggtgcccactgctggagactctgacagacgctgagatggagaagaagatccgcgaccaggacaggaacacgaggcggatgaggcgtcttgccaacacggccccggcctggtaaccagcccatcagcacacggctcccacggagcatctcagaagattgggccgcctctcctccatcttctggcaaggacagaggcgaggggacagcccagcgccatcctgaggatcgggtgggggtggagtgggggcttccaggtggcccttcccggcacatcattttgttggccctcttgtgcccccccncnttcttacccccggtttggggctgngaancctttttggtggtttgnttgtttnnncccgggntncttataggcnggctttttttcaaaaaanccnnttttggnnggaacncttncccctttaggacgcttgtaataaagt

SEQ ID NO: 367217 - DNA, 1024 bp, Homo sapiens
caacttaggctaggtacgaggctgggtggctggctttgatgaccatgacccagctgtgatccatgagaacgcatctcagcccgaggtgctggtccccatccggctggacatggagatcgatgggcagaagctgcgagacgccttcacctggaacatgaatgagaagttgatgacgcctgagatgttttcagaaatcctctgtgacgatctggatttgaacccgctgacgtttgtgccagccatcgcctctgccatcagacagcagatcgagtcctaccccacggacagcatcctggaggaccagtcagaccagcgcgtcatcatcaagctgaacatccatgtgggaaacatttccctggtggaccagtttgagtgggacatgtcagagaaggagaactcaccagagaagtttgccctgaagctgtgctcggagctggggttgggcggggagtttgtcaccaccatcgcatacagcatccggggacagctgagctggcatcagaagacctacgccttcagcgagaaccctctgcccacagtggagattgccatccggaacacgggcgatgcggaccagtggtgcccactgctggagactctgacagacgctgagatggagaagaagatccgcgaccaggacaggaacacgaggcggatgaggcgtcttgccaacacggccccggcctggtaaccagcccatcagcacacggctcccacggagcatctcagaagattgggccgcctctcctccatcttctggcaaggacagaggcgaggggacagcccagcgccatcctgaggatcgggtgggggtggagtgggggcttccaggtggcccttcccggcacacattccatttgttgagccccagtcctgccccccaccccaccctccctacccctccccagtctctggggtcaggaagaaaccttattttaggttgtgttttgtttttgtataggagccccaggcagggctagtaacagtttttaaataaaaggcaacaggtcatgttcaatttctt

SEQ ID NO: 367218 - DNA, 1304 bp, Homo sapiens
  misc_feature (1261)..(1261): n is a, c, g, or t
  misc_feature (1297)..(1297): n is a, c, g, or t
  misc_feature (1300)..(1300): n is a, c, g, or t
agcggtcaacgccagcgcctgcgcactgagggcggcctggtcgtcgtctgcggcggcggcggcggctgaggagcccggctgaggcgccagtacccggcccggtccgcatttcgccttccggcttcggtttccctcggcccagcacgccccggccccgccccagccctcctgatccctcgcagcccggctccggccgcccgcctctgccgccgcaatgatgatgatggcgctgagcaagaccttcgggcagaagcccgtgaagttccagctggaggacgacggcgagttctacatgatcggctccgaggtgggaaactacctccgtatgttccgaggttctctgtacaagagatacccctcactctggaggcgactagccactgtggaagagaggaagaaaatagttgcatcgtcacatgatcacggatacacgactctagccaccagtgtgaccctgttaaaagcctcggaagtggaagagattctggatggcaacgatgagaagtacaaggctgtgtccatcagcacagagccccccacctacctcagggaacagaaggccaagaggaacagccagtgggtacccaccctgcccaacagctcccaccacttagatgccgtgccatgctccacaaccatcaacaggaaccgcatgggccgagacaagaagagaaccttccccctttgctttgatgaccatgacccagctgtgatccatgagaacgcatctcagcccgaggtgctggtccccatccggctggacatggagatcgatgggcagaagctgcgagacgccttcacctggaacatgaatgagaagttgatgacgcctgagatgttttcagaaatcctctgtgacgatctggatttgaacccgctgacgtttgtgccagccatcgcctctgccatcagacagcagatcgagtcctaccccacggacagcatcctggaggaccagtcagaccagcgcgtcatcatcaagctgaacatccatgtgggaaacatttccctggtggaccagtttgagtgggacatgtcagagaaggagaactcaccagagaagtttgccctgaagctgtgctcggagctggggttgggcggggagtttgtcaccaccatcgcatacagcatccggggacagctgagctggcatcagaagacctacgccttcagcgagaaccctctgcccacagtggaaactacctccgtatgttccgaggttctctgtacaagagatacccctcactctggaggcgactanccactgtggaagagaggaagaaaatagtgcatcgtnacnttgt

SEQ ID NO: 367219 - DNA, 1231 bp, Homo sapiens
agcggtcaacgccagcgcctgcgcactgagggcggcctggtcgtcgtctgcggcggcggcggcggctgaggagcccggctgaggcgccagtacccggcccggtccgcatttcgccttccggcttcggtttccctcggcccagcacgccccggccccgccccagccctcctgatccctcgcagcccggctccggccgcccgcctctgccgccgcaatgatgatgatggcgctgagcaagaccttcgggcagaagcccgtgaagttccagctggaggacgacggcgagttctacatgatcggctccgaggtgggaaactacctccgtatgttccgaggttctctgtacaagagatacccctcactctggaggcgactagccactgtggaagagaggaagaaaatagttgcatcgtcacatgatcacggatacacgactctagccaccagtgtgaccctgttaaaagcctcggaagtggaagagattctggatggcaacgatgagaagtacaaggctgtgtccatcagcacagagccccccacctacctcagggaacagaaggccaagaggaacagccagtgggtacccaccctgcccaacagctcccaccacttagatgccgtgccatgctccacaaccatcaacaggaaccgcatgggccgagacaagaagagaaccttccccctttgctttgatgaccatgacccagctgtgatccatgagaacgcatctcagcccgaggtgctggtccccatccggctggacatggagatcgatgggcagggctagtaacagtttttaaataaaaggcaacaggtcatgttcaatttcttcaacaggtcatgttcaatttcttcaaagttttaacataaaaataatgagagccaggagtggggccggggcctggggggacgaaggtggtatgtgaacaaggttggcacacaggcctcaccctcctctgcctcagattcccaagtgggcaggtgggggtgaatggggctccgggtagcacctcagctcctctcagctcccctcagcctgttctccttccagacccagagagctgagaagagtagctgtgaggctcagggcagaggctctctgcctttcaggaacagccctaaccctgctccccttgcttggcctcaggaaggtgccgcgagctctcctgccgtccctgggccgccctgggctctgctgtgtccagatggtcaggctactgccagctggggc

SEQ ID NO: 367220 - DNA, 1643 bp, Homo sapiens
agcggtcaacgccagcgcctgcgcactgagggcggcctggtcgtcgtctgcggcggcggcggcggctgaggagcccggctgaggcgccagtacccggcccggtccgcatttcgccttccggcttcggtttccctcggcccagcacgccccggccccgccccagccctcctgatccctcgcagcccggctccggccgcccgcctctgccgccgcaatgatgatgatggcgctgagcaagaccttcgggcagaagcccgtgaagttccagctggaggacgacggcgagttctacatgatcggctccgaggtgggaaactacctccgtatgttccgaggttctctgtacaagagatacccctcactctggaggcgactagccactgtggaagagaggaagaaaatagttgcatcgtcacatgatcacggatacacgactctagccaccagtgtgaccctgttaaaagcctcggaagtggaagagattctggatggcaacgatgagaagtacaaggctgtgtccatcagcacagagccccccacctacctcagggaacagaaggccaagaggaacagccagtgggtacccaccctgcccaacagctcccaccacttagatgccgtgccatgctccacaaccatcaacaggaaccgcatgggccgagacaagaagagaaccttccccctttggtgtggatgcatcgctgcactcaccctccgtgctgattccgccttagttctccagcacgtttcagttccttcctccccagaaaaacactctgctttgaccttgtgctccccacaacgccacagtacctcctcgcctttgaactgttgtgtttccctgacttccaggacattgtccatagcctccttggctctgtctgctgtcaccttgccatgtcctcctcacctctctggcccctcaagtggagttactcagggcgcggtccttgggccctttctctgccctcagtttcacatgagtgggccacagccagtctgatggtgcagatgccatccacgtgactcccactgtgccaccatttcccagagcctgctggagtaaaccaccacaaactggtggcttcgagcagagcacatttcttccctcacagttctggggcccaggagcctggatttagtttcactagaccagactcatgtgtggacagggccatgctccctccagaggccatcgaggcgattcggtccttgcttcttccagctttgggggctgccacgttccagtctcagcctctgtggtcacgtggccttctctgcatgaaacttccctgtctctctcttagaaggacacttggcgatgtaatttagggcccttctggttaatctctcaggatctttcacttaatcgtatcttcaaagtctccttttttggccatatgagctgacagtcacaggttttggggattaagttgtagatgtcttcggggtctgttttttacctctgtggcccagacttcctcagctgccctcaccccctcagcctcatgctgcctgaagacctctccatctcggcgcgtggagatccagccctctccttgctcaggctgtaggtttctttcccaaggcctgccttttcctcacacagcaagtccagtctctgccaggttctcccctgggac

SEQ ID NO: 367221 - DNA, 8168 bp, Homo sapiens
ggaaagactatgttttaggtgacccgtgtggcctttttgttgaggcctttaggatacaaggcccccacctaaagacgcgaccctcccgtaggaggggggcagggcccgggggcgggagcacagcggggccccagcctcaggcggcgcgtcactgagcacaaaggagacaacagcgaggcggcagcgggcgctgatcttcgctcgccagccactcgcaattgcggttacagacctgcagctccccctcccccagccggcccgcccgcctttctgtctcctctctccctccgtactggacggccccggtccatttccgggctccggatatttggtatcgattggggccggggacgcggagcaggtggccgcggcggggcagctgggccgccagcttggtgcctcggggaccgtctcccgctgctttggtcaccagcccctgcccgcccgacccgctccgttctccggcctgcgagccctgccggccggactttgcgccgcgtccggcgctgctgctgcgctcggggccccgctcggcgccggcggtgaccgggaagcccgcgttaaaggggcaaccgggaccctggcccggtatggctgaagtcagcatcgaccagtccaagctgcctggagtcaaggaagtatgccgagattttgctgtcctggaggaccacaccctggctcacagcctgcaggaacaagagattgagcatcatttggcatcgaacgttcagcggaaccgtttggtccagcatgatctccaggtggctaagcagctccaagaggaagatctgaaagcgcaggcccagctccagaagcgctacaaagaccttgaacaacaagactgtgaaattgctcaggaaattcaggagaagctggctattgaggcagagagacgacgcattcaggagaagaaggatgaggacatagctcgccttttgcaagaaaaggagttacaggaagagaaaaagagaaagaaacactttccagagttccctgcaacccgtgcttatgcagatagttactattatgaagatggaggaatgaagccaagagtgatgaaagaagctgtatctactccatcacgaatggcccacagggatcaggaatggtatgatgctgaaattgccagaaaactgcaagaagaagaacttttggctacccaggtggacatgagagccgctcaagtagctcaagatgaagaaatcgctcgacttctaatggctgaagaaaagaaagcttacaaaaaagccaaggagcgggagaaatcatctttggacaaaagaaagcaagaccccgagtggaagccaaaaacagctaaagcagcaaattccaagtcaaaagagagtgatgaacctcaccattctaagaatgaaaggccagcacggccaccaccacctatcatgacagatggtgaagatgcggattacactcattttacaaaccagcagagttccacacggcatttctcaaaatcagagtcctctcataaaggttttcattacaaacattaaaaacctaggaatctgccttgaaaatggactcactatagcaaatattactgggtgatacagaatgaattctacacttactttttttctcctgtgtttgcattcctgggatttatcctcaagtgcatttctgaccataagtaattttaattcatttcaaatgttttggttattcatgatcacttgggcagtataagaaaatgtagcttctgaatattggccacctctatgctgcatatacttcttgggatatagtatctaagacctttgtaaactgccattttgttaggtatggagtttggtatctagggagtaggccttatttagcaattcaaattttatggagatgaatgatcaaagtgaaacaatgtttggatgcaacgcagaataaaagaatataagaaatagctttttgttgcattaatgtatgatattttgaaggacagagcctttgctttttgtattctttaagaaaagcacaaccataaagtattttaaaaaaagaaacacttggagcaattgaaatatgttattctgactagatggactgtagaggttttgcatttctcagccctcctggggagattggcctagatagcattctttaacacttcctctgcttttgcctcagtagcaaggctttcctaagctcctgggcaatggaacatttattagtatttattgacaaaaatttagttctctgaaattttaactcatatatatgaaaaactttgtattccatctcttctttttcatttacttgtagagccaaggaaatggaattgaaagatgattgcataagtaatgatgccatccttctctctggctgtagactgaggcttttctcttgcttcaagtcagagcagtatttgttgataacctctcaataatgtttggtttacatgccagtaattaaattaattcaacatgaagttgaatttgatgaagtggtcatctatccaagtatttggtttttgttttgttttgttttgtttttggagttggagtctcgccctgtcacacaggctggagtgcagtggtgcaatcttggctcactgcaacctccgccacctgggctggagcaattcccctgcctcagcctcccaagtagctggaattacaggcatgtgtcaccacacccggctaatttttgtatttttagtaaagagcgggtttcaccatgttggccaggctggtctcgaacccctgacctcaagtgatccacctgccttggcctcccaaggtgctgggattacaggcttaagccaccatgtccagccagccaagtatttggttttaaacatttgtattcctttgtgcaagggattgtattcctctgtacaagacctttaagcacctcttcaagaaatttagtctttgtgtagctgctaaccttactgcaatatttattttcccttattttcccatactacttagttgacaaatggcaatcaagctcacttgttctccctctctctgtctcccccccatgtacacatatatatatcccttcagcttgacttgctattatttttcattgtataaatatgaaattcttggcatttcaatatggcatttgtttagggaaaaaatatgtaggtcactagagaaaaatgttaatttttttcccactgtgaattgccttctgtttgccttatcttttcagatagtctttaaagttgggcaatattcaggcagctatttagaacagtttctcagagtggatttgggtctctcatttgagaaagatttgtagtttcaatgaagtttgtatattataggaatttaagtaaaatcatctgagttaagttttgggcaaatgttaatcagaaagataatctacatccctactttatgtagtcattttggagaaatggaggaaaaggaaaataacaggactttttatagctgtgataaaatgggtaaagaaaaacctccatttaaataaggaaggggagacaaaatggaaggtcctggccttaagtcaaattccagatagtgctttcaatatccaaagcttaggccttgtttacttatagtaatgctatatttttctttatctgccctgtgatttcgcttcgtgtccttcaaagtttttttattgtaattttaaaggaaaaaaacaatgtatttttatttgataactaggcaaaatcatttgccattttttatttcataaatatttatttttctatctcatacaatgatcagttttactttaaaaattctgcatttctcttgcctctcatgtacttcatccagttatttattattgtaaaatgttaactggagatactgcattcaaaaaaaagtcggaccacttaacacttaccaggaatgttagtgtttcagctgttttagtaagtgaccaagtaagctatcaccttgtgatagctaattccatctttattgtttgttctttttttggtttttaaaagattacaattttaaaatatttatgtttattttatttttgtgtaaagcaaacactttttaaataatatcagagtaattattaccctatgaataaggagatagaaatgaaattcagccagttaaatcctcatactctttctcattcaaataatataataatgtttgagactatagaagcaactcaactgtattttaatgaactgccagacacttttcactgtgttctctgctttttactttgtcatttttatataaatgtgaaagcattttgttgttgttgttgttgttcctgctgctagaacacatgcagtttaatttttaggcccacagtgtattatgctttaatgttgtgatgtaaactaatacttctggcctgggaaaacctttctgtttctgtatctttgtcctttggaggccaggcctcattaacaccagtattgttgaataagcacaatatatgacggagccttatcataaggctgcttgacatagacacccactctcctccacattttataaatcattgtttggaagtaaagttagataagagtcaaattaaatgttttgacttgaaaaatatttgacttttgcgttcaaaccactgttagacgtaagtattttattagacataagtattttattttgggactagacagttgctttacatgtatttaagggaacattgtgattttcagaaagtggctttacatactattgaattgctatttcccaagttactttacaaccaccagcagcataccaataaattacaaaagcagaaaatgaaaattaaccctaggtgttctgatgatagagaaatagctaaattagaaaagaaagatatggatagatgcttttaggaggaaaacctttttagaatggcaatgaccacttggatctaggtcaacatattccaaaatgtgtgaccttgggctttgtgtttactgaactcactctagaaaattctggacctgattcattaaccccgcttttcttctctaatgtgtcctgaagctgagctagatgatgagtaaattctttgctgactgttgctcatcactttctctcaaagttagaacttttcagtataaaaataattagcttttaactgattattaattttctttaatagtttctgtcaaaacttgtctaaaatttgtgttgtgccaaattggaaatacccactataatatggtgcattcagtttactccacaagtggttaacattttaagtcctagatttttgatgtcttgcctttgtataagcatcgctttggggaataccaagatgattcattattcagtgattattttcttgaaagataactatgatgattggctgtaaaatcttcaccctaataaaggagtgagatctctgtgtaaacagctttctgaaggactgataatagaatagaacttgcagccaaaggctttttcccttttgagaagacggtatttgtgtaaggagtgctaaggtagacttcattgtacatagagtgccatattctgttgaaacgatcataacaaaatcaaaacctcatgcttcagcaaaaaggaaaaaagatttttaaattactttgtctattacttactgctcatagagaagtgactatataaaatggtccaattttctcatttctggtggtgcctgtgagtcttaaagccatatctgcttatcttactgttgatagaatactttttttctttttagcccatgataagtaatatgggcaggtagaagcaaactggagactgtcctgttaatgctgcatggggcacaatgtctttcaaattattggtggaagaatctcttttatccatggcgagaggtaagaatattaaagagtcaggatattgttgctcctggtatttaacaactgtcattagaaatgctgaaatttaattgtagagaagtcaagaaagaaagagtaaactgagaaaatcttactactacagagtcacttttacaatgagacctgcactttatgccagcactgtttgtgaggagcagtactgccttaaattagtttgactctgactgatgtcagtgtacgttacttcctttatgtgactgacagtcagctttccattgagatataacattcacagatgatccccaagtatccttgtcatcagaagctttggaccttttctgccactgacttgtggctgatctgtaacacaataaatacataattttatttcatgttgtctgtccacctctgaataagcagtggcatgaccaaaaagactggtagaaggagagaatttcttggccaaatccttcataccaggtaccacttcttgagtaactgagagttgactgtcttctatggtgactacatagaagatatttccaaaggttctgttatgcagtgaagacattcagattatttgtaagaatttcaccaacacccttgtgtattgaaatgcttaaccattaacagggaaaaaaaaggagaaaaccgaacaaaacagagacatttacttgaaatgggaggtttgctaatgtgaagagtgtttctgttttattacttataagagaaaagcaggaaaacttttgctttgataagaaagacaccagagtggtgattctatttgatgccacaggctaacacaatcgtgtaatcatgttgagttgtagaaatatatggccctaaaaaccattctctttcccttatatatataaatatgtgaacactgcctagtaacattttaatagatttaagatgcatttgtacattctcagcaaactagaagaaaatgttttttctctttttgagttaacttcatagcatagagaaccagcactgtgcaggtttcagcatttcagataagggcataattaattgtgtaacttaatgccctgttattcattgctgaggttcatataaagaatagaaaaattgaaagatgggtttgggcgacattttcttcccaaaagatcaagtaaggagtaagaacaagtaagggaagacagctaagagaacatactatgacatatcatagaattgggatacatttttgttgcactggatttcaggctatactgctaaaataatttctacctgttaaattttgtgagagggtttttgacatcagaatttttgtatttctggtcaaattggtcttggaaatccctatggtctctaatttcagctcttgctgtaaactgcaagccaaatgctctttctcagaaagagctatatttttctcttcttacaggcaacccaatatttatttcataaagtgttataaatattgagaagatacactggggagatagcatataaaaatgatgctccaaaatgagaattctatatggggctttccctaagaagaatccatcccagcacatattttgaaaaggtgctgaattaaaaagtacaagagtttgctcatataaatcaagttgcccaggaaacctgaggtgatgctatcatttgtctcataatttagaaacgtgatctcttgagagagagactacgcattgcctgggcactttcagattccttaggaagtgcccctttgatatttggaatgtggatatatttataaaacaaatggattgttattccaaatccacatggatttataaccaagccccagaagaataggcagctttgaaatagctagttcgtggaattgaacagaaccttgatggaatgcagttgcctgtgtgaggacagaaaacaaagaggctgcctcagaccacatgcctatctagagattaagtgaatttgtgagggacattttgtggatgccttaaagatgaccagtggtgggttctgatgggaatatatacactcatctggactaggccaatggaagcagtctctttcagttcacctccgtacagcacaagttgttcctgctcatgacctcattgaggaaaatgagaattgtggtgctggtgactttcatgtgtcttgggaggttgaggtgttcaacatcgttaaggcactcccaaaacgcaaacctccttttttaaatgccaattgtacatctacattaattcatctatgcaaacttgtgttttcatggtttgttttttacactatatttctcattaggttctttaaacatcaggtttaatattgatattatgaataatttttaaaccaaagtattctataagtctgtgtgctttgttttcctggatggtttgaccaaggtaaacatcagtcttgtccttctctcttaataaagtcatccatttgttaa

SEQ ID NO: 367222 - DNA, 8114 bp, Homo sapiens
ggaaagactatgttttaggtgacccgtgtggcctttttgttgaggcctttaggatacaaggcccccacctaaagacgcgaccctcccgtaggaggggggcagggcccgggggcgggagcacagcggggccccagcctcaggcggcgcgtcactgagcacaaaggagacaacagcgaggcggcagcgggcgctgatcttcgctcgccagccactcgcaattgcggttacagacctgcagctccccctcccccagccggcccgcccgcctttctgtctcctctctccctccgtactggacggccccggtccatttccgggctccggatatttggtatcgattggggccggggacgcggagcaggtggccgcggcggggcagctgggccgccagcttggtgcctcggggaccgtctcccgctgctttggtcaccagcccctgcccgcccgacccgctccgttctccggcctgcgagccctgccggccggactttgcgccgcgtccggcgctgctgctgcgctcggggccccgctcggcgccggcggtgaccgggaagcccgcgttaaaggggcaaccgggaccctggcccggtatggctgaagtcagcatcgaccagtccaagctgcctggagtcaaggaagtatgccgagattttgctgtcctggaggaccacaccctggctcacagcctgcaggaacaagagattgagcatcatttggcatcgaacgttcagcggaaccgtttggtccagcatgatctccaggtggctaagcagctccaagaggaagatctgaaagcgcaggcccagctccagaagcgctacaaagaccttgaacaacaagactgtgaaattgctcaggaaattcaggagaagctggctattgaggcagagagacgacgcattcaggagaagaaggatgaggacatagctcgccttttgcaagaaaaggagttacaggaagagaaaaagagaaagaaacactttccagagttccctgcaacccgtgcttatgcagatagttactattatgaagatggaggaatgaagccaagagtgatgaaagaagctgtatctactccatcacgaatggcccacagggatcaggaatggtatgatgctgaaattgccagaaaactgcaagaagaagaacttttggctacccaggtggacatgagagccgctcaagtagctcaagatgaagaaatcgctcgacttctaatggctgaagaaaagaaagcttacaaaaaagccaaggagcgggagaaatcatctttggacaaaagaaagcaagaccccgagtggaagccaaaaacagctaaagcagcaaattccaagtcaaaagagagtgatgaacctcaccattctaagaatgaaaggccagcacggccaccaccacctatcatgacagatggtgaagatgcggattacactcattttacaaaccagcagagttccacacggcatttctcaaaatcagagtcctctcataaaggttttcattacaaacattaaaaacctaggaatctgccttgaaaatggactcactatagcaaatattactgggtgatacagaatgaattctacacttactttttttctcctgtgtttgcattcctgggatttatcctcaagtgcatttctgaccataagtaattttaattcatttcaaatgttttggttattcatgatcacttgggcagtataagaaaatgtagcttctgaatattggccacctctatgctgcatatacttcttgggatatagtatctaagacctttgtaaactgccattttgttaggtatggagtttggtatctagggagtaggccttatttagcaattcaaattttatggagatgaatgatcaaagtgaaacaatgtttggatgcaacgcagaataaaagaatataagaaatagctttttgttgcattaatgtatgatattttgaaggacagagcctttgctttttgtattctttaagaaaagcacaaccataaagtattttaaaaaaagaaacacttggagcaattgaaatatgttattctgactagatggactgtagaggttttgcatttctcagccctcctggggagattggcctagatagcattctttaacacttcctctgcttttgcctcagtagcaaggctttcctaagctcctgggcaatggaacatttattagtatttattgacaaaaatttagttctctgaaattttaactcatatatatgaaaaactttgtattccatctcttctttttcatttacttgtagagccaaggaaatggaattgaaagatgattgcataagtaatgatgccatccttctctctggctgtagactgaggcttttctcttgcttcaagtcagagcagtatttgttgataacctctcaataatgtttggtttacatgccagtaattaaattaattcaacatgaagttgaatttgatgaagtggtcatctatccaagtatttggtttttgttttgttttgttttgtttttggagttggagtctcgccctgtcacacaggctggagtgcagtggtgcaatcttggctcactgcaacctccgccacctgggctggagcaattcccctgcctcagcctcccaagtagctggaattacaggcatgtgtcaccacacccggctaatttttgtatttttagtaaagagcgggtttcaccatgttggccaggctggtctcgaacccctgacctcaagtgatccacctgccttggcctcccaaggtgctgggattacaggcttaagccaccatgtccagccagccaagtatttggttttaaacatttgtattcctttgtgcaagggattgtattcctctgtacaagacctttaagcacctcttcaagaaatttagtctttgtgtagctgctaaccttactgcaatatttattttcccttattttcccatactacttagttgacaaatggcaatcaagctcacttgttctccctctctctgtctcccccccatgtacacatatatatatcccttcagcttgacttgctattatttttcattgtataaatatgaaattcttggcatttcaatatggcatttgtttagggaaaaaatatgtaggtcactagagaaaaatgttaatttttttcccactgtgaattgccttctgtttgccttatcttttcagatagtctttaaagttgggcaatattcaggcagctatttagaacagtttctcagagtggatttgggtctctcatttgagaaagatttgtagtttcaatgaagtttgtatattataggaatttaagtaaaatcatctgagttaagttttgggcaaatgttaatcagaaagataatctacatccctactttatgtagtcattttggagaaatggaggaaaaggaaaataacaggactttttatagctgtgataaaatgggtaaagaaaaacctccatttaaataaggaaggggagacaaaatggaaggtcctggccttaagtcaaattccagatagtgctttcaatatccaaagcttaggccttgtttacttatagtaatgctatatttttctttatctgccctgtgatttcgcttcgtgtccttcaaagtttttttattgtaattttaaaggaaaaaaacaatgtatttttatttgataactaggcaaaatcatttgccattttttatttcataaatatttatttttctatctcatacaatgatcagttttactttaaaaattctgcatttctcttgcctctcatgtacttcatccagttatttattattgtaaaatgttaactggagatactgcattcaaaaaaaagtcggaccacttaacacttaccaggaatgttagtgtttcagctgttttagtaagtgaccaagtaagctatcaccttgtgatagctaattccatctttattgtttgttctttttttggtttttaaaagattacaattttaaaatatttatgtttattttatttttgtgtaaagcaaacacttttcagccagttaaatcctcatactctttctcattcaaataatataataatgtttgagactatagaagcaactcaactgtattttaatgaactgccagacacttttcactgtgttctctgctttttactttgtcatttttatataaatgtgaaagcattttgttgttgttgttgttgttcctgctgctagaacacatgcagtttaatttttaggcccacagtgtattatgctttaatgttgtgatgtaaactaatacttctggcctgggaaaacctttctgtttctgtatctttgtcctttggaggccaggcctcattaacaccagtattgttgaataagcacaatatatgacggagccttatcataaggctgcttgacatagacacccactctcctccacattttataaatcattgtttggaagtaaagttagataagagtcaaattaaatgttttgacttgaaaaatatttgacttttgcgttcaaaccactgttagacgtaagtattttattagacataagtattttattttgggactagacagttgctttacatgtatttaagggaacattgtgattttcagaaagtggctttacatactattgaattgctatttcccaagttactttacaaccaccagcagcataccaataaattacaaaagcagaaaatgaaaattaaccctaggtgttctgatgatagagaaatagctaaattagaaaagaaagatatggatagatgcttttaggaggaaaacctttttagaatggcaatgaccacttggatctaggtcaacatattccaaaatgtgtgaccttgggctttgtgtttactgaactcactctagaaaattctggacctgattcattaaccccgcttttcttctctaatgtgtcctgaagctgagctagatgatgagtaaattctttgctgactgttgctcatcactttctctcaaagttagaacttttcagtataaaaataattagcttttaactgattattaattttctttaatagtttctgtcaaaacttgtctaaaatttgtgttgtgccaaattggaaatacccactataatatggtgcattcagtttactccacaagtggttaacattttaagtcctagatttttgatgtcttgcctttgtataagcatcgctttggggaataccaagatgattcattattcagtgattattttcttgaaagataactatgatgattggctgtaaaatcttcaccctaataaaggagtgagatctctgtgtaaacagctttctgaaggactgataatagaatagaacttgcagccaaaggctttttcccttttgagaagacggtatttgtgtaaggagtgctaaggtagacttcattgtacatagagtgccatattctgttgaaacgatcataacaaaatcaaaacctcatgcttcagcaaaaaggaaaaaagatttttaaattactttgtctattacttactgctcatagagaagtgactatataaaatggtccaattttctcatttctggtggtgcctgtgagtcttaaagccatatctgcttatcttactgttgatagaatactttttttctttttagcccatgataagtaatatgggcaggtagaagcaaactggagactgtcctgttaatgctgcatggggcacaatgtctttcaaattattggtggaagaatctcttttatccatggcgagaggtaagaatattaaagagtcaggatattgttgctcctggtatttaacaactgtcattagaaatgctgaaatttaattgtagagaagtcaagaaagaaagagtaaactgagaaaatcttactactacagagtcacttttacaatgagacctgcactttatgccagcactgtttgtgaggagcagtactgccttaaattagtttgactctgactgatgtcagtgtacgttacttcctttatgtgactgacagtcagctttccattgagatataacattcacagatgatccccaagtatccttgtcatcagaagctttggaccttttctgccactgacttgtggctgatctgtaacacaataaatacataattttatttcatgttgtctgtccacctctgaataagcagtggcatgaccaaaaagactggtagaaggagagaatttcttggccaaatccttcataccaggtaccacttcttgagtaactgagagttgactgtcttctatggtgactacatagaagatatttccaaaggttctgttatgcagtgaagacattcagattatttgtaagaatttcaccaacacccttgtgtattgaaatgcttaaccattaacagggaaaaaaaaggagaaaaccgaacaaaacagagacatttacttgaaatgggaggtttgctaatgtgaagagtgtttctgttttattacttataagagaaaagcaggaaaacttttgctttgataagaaagacaccagagtggtgattctatttgatgccacaggctaacacaatcgtgtaatcatgttgagttgtagaaatatatggccctaaaaaccattctctttcccttatatatataaatatgtgaacactgcctagtaacattttaatagatttaagatgcatttgtacattctcagcaaactagaagaaaatgttttttctctttttgagttaacttcatagcatagagaaccagcactgtgcaggtttcagcatttcagataagggcataattaattgtgtaacttaatgccctgttattcattgctgaggttcatataaagaatagaaaaattgaaagatgggtttgggcgacattttcttcccaaaagatcaagtaaggagtaagaacaagtaagggaagacagctaagagaacatactatgacatatcatagaattgggatacatttttgttgcactggatttcaggctatactgctaaaataatttctacctgttaaattttgtgagagggtttttgacatcagaatttttgtatttctggtcaaattggtcttggaaatccctatggtctctaatttcagctcttgctgtaaactgcaagccaaatgctctttctcagaaagagctatatttttctcttcttacaggcaacccaatatttatttcataaagtgttataaatattgagaagatacactggggagatagcatataaaaatgatgctccaaaatgagaattctatatggggctttccctaagaagaatccatcccagcacatattttgaaaaggtgctgaattaaaaagtacaagagtttgctcatataaatcaagttgcccaggaaacctgaggtgatgctatcatttgtctcataatttagaaacgtgatctcttgagagagagactacgcattgcctgggcactttcagattccttaggaagtgcccctttgatatttggaatgtggatatatttataaaacaaatggattgttattccaaatccacatggatttataaccaagccccagaagaataggcagctttgaaatagctagttcgtggaattgaacagaaccttgatggaatgcagttgcctgtgtgaggacagaaaacaaagaggctgcctcagaccacatgcctatctagagattaagtgaatttgtgagggacattttgtggatgccttaaagatgaccagtggtgggttctgatgggaatatatacactcatctggactaggccaatggaagcagtctctttcagttcacctccgtacagcacaagttgttcctgctcatgacctcattgaggaaaatgagaattgtggtgctggtgactttcatgtgtcttgggaggttgaggtgttcaacatcgttaaggcactcccaaaacgcaaacctccttttttaaatgccaattgtacatctacattaattcatctatgcaaacttgtgttttcatggtttgttttttacactatatttctcattaggttctttaaacatcaggtttaatattgatattatgaataatttttaaaccaaagtattctataagtctgtgtgctttgttttcctggatggtttgaccaaggtaaacatcagtcttgtccttctctcttaataaagtcatccatttgttaa

SEQ ID NO: 367223 - DNA, 8113 bp, Homo sapiens
ggaaagactatgttttaggtgacccgtgtggcctttttgttgaggcctttaggatacaaggcccccacctaaagacgcgaccctcccgtaggaggggggcagggcccgggggcgggagcacagcggggccccagcctcaggcggcgcgtcactgagcacaaaggagacaacagcgaggcggcagcgggcgctgatcttcgctcgccagccactcgcaattgcggttacagacctgcagctccccctcccccagccggcccgcccgcctttctgtctcctctctccctccgtactggacggccccggtccatttccgggctccggatatttggtatcgattggggccggggacgcggagcaggtggccgcggcggggcagctgggccgccagcttggtgcctcggggaccgtctcccgctgctttggtcaccagcccctgcccgcccgacccgctccgttctccggcctgcgagccctgccggccggactttgcgccgcgtccggcgctgctgctgcgctcggggccccgctcggcgccggcggtgaccgggaagcccgcgttaaaggggcaaccgggaccctggcccggtatggctgaagtcagcatcgaccagtccaagctgcctggagtcaaggaagtatgccgagattttgctgtcctggaggaccacaccctggctcacagcctgcaggaacaagagattgagcatcatttggcatcgaacgttcagcggaaccgtttggtccagcatgatctccaggtggctaagcagctccaagaggaagatctgaaagcgcaggcccagctccagaagcgctacaaagaccttgaacaacaagactgtgaaattgctcaggaaattcaggagaagctggctattgaggcagagagacgacgcattcaggagaagaaggatgaggacatagctcgccttttgcaagaaaaggagttacaggaagagaaaaagagaaagaaacactttccagagttccctgcaacccgtgcttatgcagatagttactattatgaagatggaggaatgaagccaagagtgatgaaagaagctgtatctactccatcacgaatggcccacagggatcaggaatggtatgatgctgaaattgccagaaaactgcaagaagaagaacttttggctacccaggtggacatgagagccgctcaagtagctcaagatgaagaaatcgctcgacttctaatggctgaagaaaagaaagcttacaaaaaagccaaggagcgggagaaatcatctttggacaaaagaaagcaagaccccgagtggaagccaaaaacagctaaagcagcaaattccaagtcaaaagagagtgatgaacctcaccattctaagaatgaaaggccagcacggccaccaccacctatcatgacagatggtgaagatgcggattacactcattttacaaaccagcagagttccacacggcatttctcaaaatcagagtcctctcataaaggttttcattacaaacattaaaaacctaggaatctgccttgaaaatggactcactatagcaaatattactgggtgatacagaatgaattctacacttactttttttctcctgtgtttgcattcctgggatttatcctcaagtgcatttctgaccataagtaattttaattcatttcaaatgttttggttattcatgatcacttgggcagtataagaaaatgtagcttctgaatattggccacctctatgctgcatatacttcttgggatatagtatctaagacctttgtaaactgccattttgttaggtatggagtttggtatctagggagtaggccttatttagcaattcaaattttatggagatgaatgatcaaagtgaaacaatgtttggatgcaacgcagaataaaagaatataagaaatagctttttgttgcattaatgtatgatattttgaaggacagagcctttgctttttgtattctttaagaaaagcacaaccataaagtattttaaaaaaagaaacacttggagcaattgaaatatgttattctgactagatggactgtagaggttttgcatttctcagccctcctggggagattggcctagatagcattctttaacacttcctctgcttttgcctcagtagcaaggctttcctaagctcctgggcaatggaacatttattagtatttattgacaaaaatttagttctctgaaattttaactcatatatatgaaaaactttgtattccatctcttctttttcatttacttgtagagccaaggaaatggaattgaaagatgattgcataagtaatgatgccatccttctctctggctgtagactgaggcttttctcttgcttcaagtcagagcagtatttgttgataacctctcaataatgtttggtttacatgccagtaattaaattaattcaacatgaagttgaatttgatgaagtggtcatctatccaagtatttggtttttgttttgttttgttttgtttttggagttggagtctcgccctgtcacacaggctggagtgcagtggtgcaatcttggctcactgcaacctccgccacctgggctggagcaattcccctgcctcagcctcccaagtagctggaattacaggcatgtgtcaccacacccggctaatttttgtatttttagtaaagagcgggtttcaccatgttggccaggctggtctcgaacccctgacctcaagtgatccacctgccttggcctcccaaggtgctgggattacaggcttaagccaccatgtccagccagccaagtatttggttttaaacatttgtattcctttgtgcaagggattgtattcctctgtacaagacctttaagcacctcttcaagaaatttagtctttgtgtagctgctaaccttactgcaatatttattttcccttattttcccatactacttagttgacaaatggcaatcaagctcacttgttctccctctctctgtctcccccccatgtacacatatatatatcccttcagcttgacttgctattatttttcattgtataaatatgaaattcttggcatttcaatatggcatttgtttagggaaaaaatatgtaggtcactagagaaaaatgttaatttttttcccactgtgaattgccttctgtttgccttatcttttcagatagtctttaaagttgggcaatattcaggcagctatttagaacagtttctcagagtggatttgggtctctcatttgagaaagatttgtagtttcaatgaagtttgtatattataggaatttaagtaaaatcatctgagttaagttttgggcaaatgttaatcagaaagataatctacatccctactttatgtagtcattttggagaaatggaggaaaaggaaaataacaggactttttatagctgtgataaaatgggtaaagaaaaacctccatttaaataaggaaggggagacaaaatggaaggtcctggccttaagtcaaattccagatagtgctttcaatatccaaagcttaggccttgtttacttatagtaatgctatatttttctttatctgccctgtgatttcgcttcgtgtccttcaaagtttttttattgtaattttaaaggaaaaaaacaatgtatttttatttgataactaggcaaaatcatttgccattttttatttcataaatatttatttttctatctcatacaatgatcagttttactttaaaaattctgcatttctcttgcctctcatgtacttcatccagttatttattattgtaaaatgttaactggagatactgcattcaaaaaaaagtcggaccacttaacacttaccaggaatgttagtgtttcagctgttttagtaagtgaccaagtaagctatcaccttgtgatagctaattccatctttattgtttgttctttttttggtttttaaaagattacaattttaaaatatttatgtttattttatttttgtgtaaagcaaacactttttaaataatatcagagtaattattaccctatgaataaggagatagaaatgaaattcagccagttaaatcctcatactctttctcattcaaataatataataatgtttgagactatagaagcaactcaactgtattttaatgaactgccagacacttttcactgtgttctctgctttttactttgtcatttttatataaatgtgaaagcattttgttgttgttgttgttgttcctgctgctagaacacatgcagtttaatttttaggcccacagtgtattatgctttaatgttgtgatgtaaactaatacttctggcctgggaaaacctttctgtttctgtatctttgtcctttggaggccaggcctcattaacaccagtattgttgaataagcacaatatatgacggagccttatcataaggctgcttgacatagacacccactctcctccacattttataaatcattgtttggaagtaaagttagataagagtcaaattaaatgttttgacttgaaaaatatttgacttttgcgttcaaaccactgttagacgtaagtattttattagacataagtattttattttgggactagacagttgctttacatgtatttaagggaacattgtgattttcagaaagtggctttacatactattgaattgctatttcccaagttactttacaaccaccagcagcataccaataaattacaaaagcagaaaatgaaaattaaccctaggtgttctgatgatagagaaatagctaaattagaaaagaaagatatggatagatgcttttaggaggaaaacctttttagaatggcaatgaccacttggatctaggtcaacatattccaaaatgtgtgaccttgggctttgtgtttactgaactcactctagaaaattctggacctgattcattaaccccgcttttcttctctaatgtgtcctgaagctgagctagatgatgagtaaattctttgctgactgttgctcatcactttctctcaaagttagaacttttcagtataaaaataattagcttttaactgattattaattttctttaatagtttctgtcaaaacttgtctaaaatttgtgttgtgccaaattggaaatacccactataatatggtgcattcagtttactccacaagtggttaacattttaagtcctagatttttgatgtcttgcctttgtataagcatcgctttggggaataccaagatgattcattattcagtgattattttcttgaaagataactatgatgattggctgtaaaatcttcaccctaataaaggagtgagatctctgtgtaaacagctttctgaaggactgataatagaatagaacttgcagccaaaggctttttcccttttgagaagacggtatttgtgtaaggagtgctaaggtagacttcattgtacatagagtgccatattctgttgaaacgatcataacaaaatcaaaacctcatgcttcagcaaaaaggaaaaaagatttttaaattactttgtctattacttactgctcatagagaagtgactatataaaatggtccaattttctcatttctggtggtgcctgtgagtcttaaagccatatctgcttatcttactgttgatagaatactttttttctttttagcccatgataagtaatatgggcaggtagaagcaaactggagactgtcctgttaatgctgcatggggcacaatgtctttcaaattattggtggaagaatctcttttatccatggcgagaggtaagaatattaaagagtcaggatattgttgctcctggtatttaacaactgtcattagaaatgctgaaatttaattgtagagaagtcaagaaagaaagagtaaactgagaaaatcttactactacagagtcacttttacaatgagacctgcactttatgccagcactgtttgtgaggagcagtactgccttaaattagtttgactctgactgatgtcagtgtacgttacttcctttatgtgactgacagtcagctttccattgagatataacattcacagatgatccccaagtatccttgtcatcagaagctttggaccttttctgccactgacttgtggctgatctgtaacacaataaatacataattttatttcatgttgtctgtccacctctgaataagcagtggcatgaccaaaaagactggtagaaggagagaatttcttggccaaatccttcataccaggtaccacttcttgagtaactgagagttgactgtcttctatggtgactacatagaagatatttccaaaggttctgttatgcagtgaagacattcagattatttgtaagaatttcaccaacacccttgtgtattgaaatgcttaaccattaacagggaaaaaaaaggagaaaaccgaacaaaacagagacatttacttgaaatgggaggtttgctaatgtgaagagtgtttctgttttattacttataagagaaaagcaggaaaacttttgctttgataagaaagacaccagagtggtgattctatttgatgccacaggctaacacaatcgtgtaatcatgttgagttgtagaaatatatggccctaaaaaccattctctttcccttatatatataaatatgtgaacactgcctagtaacattttaatagatttaagatgcatttgtacattctcagcaaactagaagaaaatgttttttctctttttgagttaacttcatagcatagagaaccagcactgtgcaggtttcagcatttcagataagggcataattaattgtgtaacttaatgccctgttattcattgctgaggttcatataaagaatagaaaaattgaaagatgggtttgggcgacattttcttcccaaaagatcaagtaaggagtaagaacaagtaagggaagacagctaagagaacatactatgacatatcatagaattgggatacatttttgttgcactggatttcaggctatactgttgtatttctggtcaaattggtcttggaaatccctatggtctctaatttcagctcttgctgtaaactgcaagccaaatgctctttctcagaaagagctatatttttctcttcttacaggcaacccaatatttatttcataaagtgttataaatattgagaagatacactggggagatagcatataaaaatgatgctccaaaatgagaattctatatggggctttccctaagaagaatccatcccagcacatattttgaaaaggtgctgaattaaaaagtacaagagtttgctcatataaatcaagttgcccaggaaacctgaggtgatgctatcatttgtctcataatttagaaacgtgatctcttgagagagagactacgcattgcctgggcactttcagattccttaggaagtgcccctttgatatttggaatgtggatatatttataaaacaaatggattgttattccaaatccacatggatttataaccaagccccagaagaataggcagctttgaaatagctagttcgtggaattgaacagaaccttgatggaatgcagttgcctgtgtgaggacagaaaacaaagaggctgcctcagaccacatgcctatctagagattaagtgaatttgtgagggacattttgtggatgccttaaagatgaccagtggtgggttctgatgggaatatatacactcatctggactaggccaatggaagcagtctctttcagttcacctccgtacagcacaagttgttcctgctcatgacctcattgaggaaaatgagaattgtggtgctggtgactttcatgtgtcttgggaggttgaggtgttcaacatcgttaaggcactcccaaaacgcaaacctccttttttaaatgccaattgtacatctacattaattcatctatgcaaacttgtgttttcatggtttgttttttacactatatttctcattaggttctttaaacatcaggtttaatattgatattatgaataatttttaaaccaaagtattctataagtctgtgtgctttgttttcctggatggtttgaccaaggtaaacatcagtcttgtccttctctcttaataaagtcatccatttgttaa

SEQ ID NO: 367224 - DNA, 8414 bp, Homo sapiens
ggaaagactatgttttaggtgacccgtgtggcctttttgttgaggcctttaggatacaaggcccccacctaaagacgcgaccctcccgtaggaggggggcagggcccgggggcgggagcacagcggggccccagcctcaggcggcgcgtcactgagcacaaaggagacaacagcgaggcggcagcgggcgctgatcttcgctcgccagccactcgcaattgcggttacagacctgcagctccccctcccccagccggcccgcccgcctttctgtctcctctctccctccgtactggacggccccggtccatttccgggctccggatatttggtatcgattggggccggggacgcggagcaggtggccgcggcggggcagctgggccgccagcttggtgcctcggggaccgtctcccgctgctttggtcaccagcccctgcccgcccgacccgctccgttctccggcctgcgagccctgccggccggactttgcgccgcgtccggcgctgctgctgcgctcggggccccgctcggcgccggcggtgaccgggaagcccgcgttaaaggggcaaccgggaccctggcccggtatggctgaagtcagcatcgaccagtccaagctgcctggagtcaaggaagtatgccgagattttgctgtcctggaggaccacaccctggctcacagcctgcaggaacaagagattgagcatcatttggcatcgaacgttcagcggaaccgtttggtccagcatgatctccaggtggctaagcagctccaagaggaagatctgaaagcgcaggcccagctccagaagcgctacaaagaccttgaacaacaagactgtgaaattgctcaggaaattcaggagaagctggctattgaggcagagagacgacgcattcaggagaagaaggatgaggacatagctcgccttttgcaagaaaaggagttacaggaagagaaaaagagaaagaaacactttccagagttccctgcaacccgtgcttatgcagatagttactattatgaagatggaggaatgaagccaagagtgatgaaagaagctgtatctactccatcacgaatggcccacagggatcaggaatggtatgatgctgaaattgccagaaaactgcaagaagaagaacttttggctacccaggtggacatgagagccgctcaagtagctcaagatgaagaaatcgctcgacttctaatggctgaagaaaagaaagcttacaaaaaagccaaggagcgggagaaatcatctttggacaaaagaaagcaagaccccgagtggaagccaaaaacagctaaagcagcaaattccaagtcaaaagagagtgatgaacctcaccattctaagaatgaaaggccagcacggccaccaccacctatcatgacagatggtgaagatgcggattacactcattttacaaaccagcagagttccacacggcatttctcaaaatcagagtcctctcataaaggttttcattacaaacattaaaaacctaggaatctgccttgaaaatggactcactatagcaaatattactgggtgatacagaatgaattctacacttactttttttctcctgtgtttgcattcctgggatttatcctcaagtgcatttctgaccataagtaattttaattcatttcaaatgttttggttattcatgatcacttgggcagtataagaaaatgtagcttctgaatattggccacctctatgctgcatatacttcttgggatatagtatctaagacctttgtaaactgccattttgttaggtatggagtttggtatctagggagtaggccttatttagcaattcaaattttatggagatgaatgatcaaagtgaaacaatgtttggatgcaacgcagaataaaagaatataagaaatagctttttgttgcattaatgtatgatattttgaaggacagagcctttgctttttgtattctttaagaaaagcacaaccataaagtattttaaaaaaagaaacacttggagcaattgaaatatgttattctgactagatggactgtagaggttttgcatttctcagccctcctggggagattggcctagatagcattctttaacacttcctctgcttttgcctcagtagcaaggctttcctaagctcctgggcaatggaacatttattagtatttattgacaaaaatttagttctctgaaattttaactcatatatatgaaaaactttgtattccatctcttctttttcatttacttgtagagccaaggaaatggaattgaaagatgattgcataagtaatgatgccatccttctctctggctgtagactgaggcttttctcttgcttcaagtcagagcagtatttgttgataacctctcaataatgtttggtttacatgccagtaattaaattaattcaacatgaagttgaatttgatgaagtggtcatctatccaagtatttggtttttgttttgttttgttttgtttttggagttggagtctcgccctgtcacacaggctggagtgcagtggtgcaatcttggctcactgcaacctccgccacctgggctggagcaattcccctgcctcagcctcccaagtagctggaattacaggcatgtgtcaccacacccggctaatttttgtatttttagtaaagagcgggtttcaccatgttggccaggctggtctcgaacccctgacctcaagtgatccacctgccttggcctcccaaggtgctgggattacaggcttaagccaccatgtccagccagccaagtatttggttttaaacatttgtattcctttgtgcaagggattgtattcctctgtacaagacctttaagcacctcttcaagaaatttagtctttgtgtagctgctaaccttactgcaatatttattttcccttattttcccatactacttagttgacaaatggcaatcaagctcacttgttctccctctctctgtctcccccccatgtacacatatatatatcccttcagcttgacttgctattatttttcattgtataaatatgaaattcttggcatttcaatatggcatttgtttagggaaaaaatatgtaggtcactagagaaaaatgttaatttttttcccactgtgaattgccttctgtttgccttatcttttcagatagtctttaaagttgggcaatattcaggcagctatttagaacagtttctcagagtggatttgggtctctcatttgagaaagatttgtagtttcaatgaagtttgtatattataggaatttaagtaaaatcatctgagttaagttttgggcaaatgttaatcagaaagataatctacatccctactttatgtagtcattttggagaaatggaggaaaaggaaaataacaggactttttatagctgtgataaaatgggtaaagaaaaacctccatttaaataaggaaggggagacaaaatggaaggtcctggccttaagtcaaattccagatagtgctttcaatatccaaagcttaggccttgtttacttatagtaatgctatatttttctttatctgccctgtgatttcgcttcgtgtccttcaaagtttttttattgtaattttaaaggaaaaaaacaatgtatttttatttgataactaggcaaaatcatttgccattttttatttcataaatatttatttttctatctcatacaatgatcagttttactttaaaaattctgcatttctcttgcctctcatgtacttcatccagttatttattattgtaaaatgttaactggagatactgcattcaaaaaaaagtcggaccacttaacacttaccaggaatgttagtgtttcagctgttttagtaagtgaccaagtaagctatcaccttgtgatagctaattccatctttattgtttgttctttttttggtttttaaaagattacaattttaaaatatttatgtttattttatttttgtgtaaagcaaacactttttaaataatatcagagtaattattaccctatgaataaggagatagaaatgaaattcagccagttaaatcctcatactctttctcattcaaataatataataatgtttgagactatagaagcaactcaactgtattttaatgaactgccagacacttttcactgtgttctctgctttttactttgtcatttttatataaatgtgaaagcattttgttgttgttgttgttgttcctgctgctagaacacatgcagtttaatttttaggcccacagtgtattatgctttaatgttgtgatgtaaactaatacttctggcctgggaaaacctttctgtttctgtatctttgtcctttggaggccaggcctcattaacaccagtattgttgaataagcacaatatatgacggagccttatcataaggctgcttgacatagacacccactctcctccacattttataaatcattgtttggaagtaaagttagataagagtcaaattaaatgttttgacttgaaaaatatttgacttttgcgttcaaaccactgttagacgtaagtattttattagacataagtattttattttgggactagacagttgctttacatgtatttaagggaacattgtgattttcagaaagtggctttacatactattgaattgctatttcccaagttactttacaaccaccagcagcataccaataaattacaaaagcagaaaatgaaaattaaccctaggtgttctgatgatagagaaatagctaaattagaaaagaaagatatggatagatgcttttaggaggaaaacctttttagaatggcaatgaccacttggatctaggtcaacatattccaaaatgtgtgaccttgggctttgtgtttactgaactcactctagaaaattctggacctgattcattaaccccgcttttcttctctaatgtgtcctgaagctgagctagatgatgagtaaattctttgctgactgttgctcatcactttctctcaaagttagaacttttcagtataaaaataattagcttttaactgattattaattttctttaatagtttctgtcaaaacttgtctaaaatttgtgttgtgccaaattggaaatacccactataatatggtgcattcagtttactccacaagtggttaacattttaagtcctagatttttgatgtcttgcctttgtataagcatcgctttggggaataccaagatgattcattattcagtgattattttcttgaaagataactatgatgattggctgtaaaatcttcaccctaataaaggagtgagatctctgtgtaaacagctttctgaaggactgataatagaatagaacttgcagccaaaggctttttcccttttgagaagacggtatttgtgtaaggagtgctaaggtagacttcattgtacatagagtgccatattctgttgaaacgatcataacaaaatcaaaacctcatgcttcagcaaaaaggaaaaaagatttttaaattactttgtctattacttactgctcatagagaagtgactatataaaatggtccaattttctcatttctggtggtgcctgtgagtcttaaagccatatctgcttatcttactgttgatagaatactttttttctttttagcccatgataagtaatatgggcaggtagaagcaaactggagactgtcctgttaatgctgcatggggcacaatgtctttcaaattattggtggaagaatctcttttatccatggcgagaggtaagaatattaaagagtcaggatattgttgctcctggtatttaacaactgtcattagaaatgctgaaatttaattgtagagaagtcaagaaagaaagagtaaactgagaaaatcttactactacagagtcacttttacaatgagacctgcactttatgccagcactgtttgtgaggagcagtactgccttaaattagtttgactctgactgatgtcagtgtacgttacttcctttatgtgactgacagtcagctttccattgagatataacattcacagatgatccccaagtatccttgtcatcagaagctttggaccttttctgccactgacttgtggctgatctgtaacacaataaatacataattttatttcatgttgtctgtccacctctgaataagcagtggcatgaccaaaaagactggtagaaggagagaatttcttggccaaatccttcataccaggtaccacttcttgagtaactgagagttgactgtcttctatggtgactacatagaagatatttccaaaggttctgttatgcagtgaagacattcagattatttgtaagaatttcaccaacacccttgtgtattgaaatgcttaaccattaacagggaaaaaaaaggagaaaaccgaacaaaacagagacatttacttgaaatgggaggtttgctaatgtgaagagtgtttctgttttattacttataagagaaaagcaggaaaacttttgctttgataagaaagacaccagagtggtgattctatttgatgccacaggctaacacaatcgtgtaatcatgttgagttgtagaaatatatggccctaaaaaccattctctttcccttatatatataaatatgtgaacactgcctagtaacattttaatagatttaagatgcatttgtacattctcagcaaactagaagaaaatgttttttctctttttgagttaacttcatagcatagagaaccagcactgtgcaggtttcagcatttcagataagggcataattaattgtgtaacttaatgccctgttattcattgctgaggttcatataaagaatagaaaaattgaaagatgggtttgggcgacattttcttcccaaaagatcaagtaaggagtaagaacaagtaagggaagacagctaagagaacatactatgacatatcatagaattgggatacatttttgttgcactggatttcaggctatactgctaaaataatttctacctgttaaattttgtgagagggtttttgacatcagaatttttgtatttctggtcaaattggtcttggaaatccctatggtctctaatttcagctcttgctgtaaactgcaagccaaatgctctttctcagaaagagctatatttttctcttcttacaggcaacccaatatttatttcataaagtgttataaatattgagaagatacactggggagatagcatataaaaatgatgctccaaaatgagaattctatatggggctttccctaagaagaatccatcccagcacatattttgaaaaggtgctgaattaaaaagtacaagagtttgctcatataaatcaagttgcccaggaaacctgaggtgatgctatcatttgtctcataatttagaaacgtgatctcttgagagagagactacgcattgcctgggcactttcagattccttaggaagtgcccctttgatatttggaatgtggatatatttataaaacaaatggattgttattccaaatccacatggatttataaccaagccccagaagaataggcagctttgaaatagctagttcgtggaattgaacagaaccttgatggaatgcagttgcctgtgtgaggacagaaaacaaagaggctgcctcagaccacatgcctatctagagattaagtgaatttgtgagggacattttgtggatgccttaaagatgaccagtggtgggttctgatgggaatatatacactcatctggactaggccaatggaagcagtctctttcagttcacctccgtacagcacaagttgttcctgctcatgacctcattgaggaaaatgagaattgtggtgctggtgactttcatgtgtcttgggaggttgaggtgttcaacatcgttaaggcactcccaaaacgcaaacctccttttttaaatgccaattgtacatctacattaattcatctatgcaaacttgtgttttcatggtttgttttttacactatatttctcattaggttctttaaacatcaggtttaatattgatattatgaataatttttaaaccaaagtattctataagtctgtgtgctttgttttcctggatggtttgaccaaggtaaacatcagtcttgtccttctctcttaataaagtcatccatttgttaagtcagtggtctctgtctcatgtttttgttttgtttctttacagcattcaaggacagggaaacttacgagagtcttattataattattattatttacaaaatgaccctaataggtctgtttagtaacagtgaaattttttcttactccatttccatacactttctgtaaatatgtataacatgataatgatgcctggtgtattgaaatcctcaataaatactgccaagtgtggatcagttggaaaag

SEQ ID NO: 367225 - DNA, 8698 bp, Homo sapiens
ggaaagactatgttttaggtgacccgtgtggcctttttgttgaggcctttaggatacaaggcccccacctaaagacgcgaccctcccgtaggaggggggcagggcccgggggcgggagcacagcggggccccagcctcaggcggcgcgtcactgagcacaaaggagacaacagcgaggcggcagcgggcgctgatcttcgctcgccagccactcgcaattgcggttacagacctgcagctccccctcccccagccggcccgcccgcctttctgtctcctctctccctccgtactggacggccccggtccatttccgggctccggatatttggtatcgattggggccggggacgcggagcaggtggccgcggcggggcagctgggccgccagcttggtgcctcggggaccgtctcccgctgctttggtcaccagcccctgcccgcccgacccgctccgttctccggcctgcgagccctgccggccggactttgcgccgcgtccggcgctgctgctgcgctcggggccccgctcggcgccggcggtgaccgggaagcccgcgttaaaggggcaaccgggaccctggcccggtatggctgaagtcagcatcgaccagtccaagctgcctggagtcaaggaagtatgccgagattttgctgtcctggaggaccacaccctggctcacagcctgcaggaacaagagattgagcatcatttggcatcgaacgttcagcggaaccgtttggtccagcatgatctccaggtggctaagcagctccaagaggaagatctgaaagcgcaggcccagctccagaagcgctacaaagaccttgaacaacaagactgtgaaattgctcaggaaattcaggagaagctggctattgaggcagagagacgacgcattcaggagaagaaggatgaggacatagctcgccttttgcaagaaaaggagttacaggaagagaaaaagagaaagaaacactttccagagttccctgcaacccgtgcttatgcagatagttactattatgaagatggagagaccaaccagggtcaaggagggccagggaattgggttctggattctcaagaccttgtagactccaaagagatggaaagactgtgaagcacaagaaagagaaaccagaacatccactggagaacttggaagagccagaacaacattgttcatcgaagagatccctgtcatcctctagctcgggcaaagggagggacaatccccacattaacaatgagcagcatgaaaggaaacggtccactcaggagaggcctcggagacctctgcttcccacgatcagtggtgaagtgtttctgagcactgaatgtgatgactgggagactaagaataaccatcagactcgaaattgggaaaaacagtctcgacaccaagatcgactttcacccaagtcctcacaaaaagcagggcttcactgcaaggaagttgtatatgggagggaccatgggcaaggtgagcacagaagaaggagacacaggcccaggactcctccattctcagagagtgaggagcagctccacctccatgacgcaggaatgaagccaagagtgatgaaagaagctgtatctactccatcacgaatggcccacagggatcaggaatggtatgatgctgaaattgccagaaaactgcaagaagaagaacttttggctacccaggtggacatgagagccgctcaagtagctcaagatgaagaaatcgctcgacttctaatggctgaagaaaagaaagcttacaaaaaagccaaggagcgggagaaatcatctttggacaaaagaaagcaagaccccgagtggaagccaaaaacagctaaagcagcaaattccaagtcaaaagagagtgatgaacctcaccattctaagaatgaaaggccagcacggccaccaccacctatcatgacagatggtgaagatgcggattacactcattttacaaaccagcagagttccacacggcatttctcaaaatcagagtcctctcataaaggttttcattacaaacattaaaaacctaggaatctgccttgaaaatggactcactatagcaaatattactgggtgatacagaatgaattctacacttactttttttctcctgtgtttgcattcctgggatttatcctcaagtgcatttctgaccataagtaattttaattcatttcaaatgttttggttattcatgatcacttgggcagtataagaaaatgtagcttctgaatattggccacctctatgctgcatatacttcttgggatatagtatctaagacctttgtaaactgccattttgttaggtatggagtttggtatctagggagtaggccttatttagcaattcaaattttatggagatgaatgatcaaagtgaaacaatgtttggatgcaacgcagaataaaagaatataagaaatagctttttgttgcattaatgtatgatattttgaaggacagagcctttgctttttgtattctttaagaaaagcacaaccataaagtattttaaaaaaagaaacacttggagcaattgaaatatgttattctgactagatggactgtagaggttttgcatttctcagccctcctggggagattggcctagatagcattctttaacacttcctctgcttttgcctcagtagcaaggctttcctaagctcctgggcaatggaacatttattagtatttattgacaaaaatttagttctctgaaattttaactcatatatatgaaaaactttgtattccatctcttctttttcatttacttgtagagccaaggaaatggaattgaaagatgattgcataagtaatgatgccatccttctctctggctgtagactgaggcttttctcttgcttcaagtcagagcagtatttgttgataacctctcaataatgtttggtttacatgccagtaattaaattaattcaacatgaagttgaatttgatgaagtggtcatctatccaagtatttggtttttgttttgttttgttttgtttttggagttggagtctcgccctgtcacacaggctggagtgcagtggtgcaatcttggctcactgcaacctccgccacctgggctggagcaattcccctgcctcagcctcccaagtagctggaattacaggcatgtgtcaccacacccggctaatttttgtatttttagtaaagagcgggtttcaccatgttggccaggctggtctcgaacccctgacctcaagtgatccacctgccttggcctcccaaggtgctgggattacaggcttaagccaccatgtccagccagccaagtatttggttttaaacatttgtattcctttgtgcaagggattgtattcctctgtacaagacctttaagcacctcttcaagaaatttagtctttgtgtagctgctaaccttactgcaatatttattttcccttattttcccatactacttagttgacaaatggcaatcaagctcacttgttctccctctctctgtctcccccccatgtacacatatatatatcccttcagcttgacttgctattatttttcattgtataaatatgaaattcttggcatttcaatatggcatttgtttagggaaaaaatatgtaggtcactagagaaaaatgttaatttttttcccactgtgaattgccttctgtttgccttatcttttcagatagtctttaaagttgggcaatattcaggcagctatttagaacagtttctcagagtggatttgggtctctcatttgagaaagatttgtagtttcaatgaagtttgtatattataggaatttaagtaaaatcatctgagttaagttttgggcaaatgttaatcagaaagataatctacatccctactttatgtagtcattttggagaaatggaggaaaaggaaaataacaggactttttatagctgtgataaaatgggtaaagaaaaacctccatttaaataaggaaggggagacaaaatggaaggtcctggccttaagtcaaattccagatagtgctttcaatatccaaagcttaggccttgtttacttatagtaatgctatatttttctttatctgccctgtgatttcgcttcgtgtccttcaaagtttttttattgtaattttaaaggaaaaaaacaatgtatttttatttgataactaggcaaaatcatttgccattttttatttcataaatatttatttttctatctcatacaatgatcagttttactttaaaaattctgcatttctcttgcctctcatgtacttcatccagttatttattattgtaaaatgttaactggagatactgcattcaaaaaaaagtcggaccacttaacacttaccaggaatgttagtgtttcagctgttttagtaagtgaccaagtaagctatcaccttgtgatagctaattccatctttattgtttgttctttttttggtttttaaaagattacaattttaaaatatttatgtttattttatttttgtgtaaagcaaacactttttaaataatatcagagtaattattaccctatgaataaggagatagaaatgaaattcagccagttaaatcctcatactctttctcattcaaataatataataatgtttgagactatagaagcaactcaactgtattttaatgaactgccagacacttttcactgtgttctctgctttttactttgtcatttttatataaatgtgaaagcattttgttgttgttgttgttgttcctgctgctagaacacatgcagtttaatttttaggcccacagtgtattatgctttaatgttgtgatgtaaactaatacttctggcctgggaaaacctttctgtttctgtatctttgtcctttggaggccaggcctcattaacaccagtattgttgaataagcacaatatatgacggagccttatcataaggctgcttgacatagacacccactctcctccacattttataaatcattgtttggaagtaaagttagataagagtcaaattaaatgttttgacttgaaaaatatttgacttttgcgttcaaaccactgttagacgtaagtattttattagacataagtattttattttgggactagacagttgctttacatgtatttaagggaacattgtgattttcagaaagtggctttacatactattgaattgctatttcccaagttactttacaaccaccagcagcataccaataaattacaaaagcagaaaatgaaaattaaccctaggtgttctgatgatagagaaatagctaaattagaaaagaaagatatggatagatgcttttaggaggaaaacctttttagaatggcaatgaccacttggatctaggtcaacatattccaaaatgtgtgaccttgggctttgtgtttactgaactcactctagaaaattctggacctgattcattaaccccgcttttcttctctaatgtgtcctgaagctgagctagatgatgagtaaattctttgctgactgttgctcatcactttctctcaaagttagaacttttcagtataaaaataattagcttttaactgattattaattttctttaatagtttctgtcaaaacttgtctaaaatttgtgttgtgccaaattggaaatacccactataatatggtgcattcagtttactccacaagtggttaacattttaagtcctagatttttgatgtcttgcctttgtataagcatcgctttggggaataccaagatgattcattattcagtgattattttcttgaaagataactatgatgattggctgtaaaatcttcaccctaataaaggagtgagatctctgtgtaaacagctttctgaaggactgataatagaatagaacttgcagccaaaggctttttcccttttgagaagacggtatttgtgtaaggagtgctaaggtagacttcattgtacatagagtgccatattctgttgaaacgatcataacaaaatcaaaacctcatgcttcagcaaaaaggaaaaaagatttttaaattactttgtctattacttactgctcatagagaagtgactatataaaatggtccaattttctcatttctggtggtgcctgtgagtcttaaagccatatctgcttatcttactgttgatagaatactttttttctttttagcccatgataagtaatatgggcaggtagaagcaaactggagactgtcctgttaatgctgcatggggcacaatgtctttcaaattattggtggaagaatctcttttatccatggcgagaggtaagaatattaaagagtcaggatattgttgctcctggtatttaacaactgtcattagaaatgctgaaatttaattgtagagaagtcaagaaagaaagagtaaactgagaaaatcttactactacagagtcacttttacaatgagacctgcactttatgccagcactgtttgtgaggagcagtactgccttaaattagtttgactctgactgatgtcagtgtacgttacttcctttatgtgactgacagtcagctttccattgagatataacattcacagatgatccccaagtatccttgtcatcagaagctttggaccttttctgccactgacttgtggctgatctgtaacacaataaatacataattttatttcatgttgtctgtccacctctgaataagcagtggcatgaccaaaaagactggtagaaggagagaatttcttggccaaatccttcataccaggtaccacttcttgagtaactgagagttgactgtcttctatggtgactacatagaagatatttccaaaggttctgttatgcagtgaagacattcagattatttgtaagaatttcaccaacacccttgtgtattgaaatgcttaaccattaacagggaaaaaaaaggagaaaaccgaacaaaacagagacatttacttgaaatgggaggtttgctaatgtgaagagtgtttctgttttattacttataagagaaaagcaggaaaacttttgctttgataagaaagacaccagagtggtgattctatttgatgccacaggctaacacaatcgtgtaatcatgttgagttgtagaaatatatggccctaaaaaccattctctttcccttatatatataaatatgtgaacactgcctagtaacattttaatagatttaagatgcatttgtacattctcagcaaactagaagaaaatgttttttctctttttgagttaacttcatagcatagagaaccagcactgtgcaggtttcagcatttcagataagggcataattaattgtgtaacttaatgccctgttattcattgctgaggttcatataaagaatagaaaaattgaaagatgggtttgggcgacattttcttcccaaaagatcaagtaaggagtaagaacaagtaagggaagacagctaagagaacatactatgacatatcatagaattgggatacatttttgttgcactggatttcaggctatactgctaaaataatttctacctgttaaattttgtgagagggtttttgacatcagaatttttgtatttctggtcaaattggtcttggaaatccctatggtctctaatttcagctcttgctgtaaactgcaagccaaatgctctttctcagaaagagctatatttttctcttcttacaggcaacccaatatttatttcataaagtgttataaatattgagaagatacactggggagatagcatataaaaatgatgctccaaaatgagaattctatatggggctttccctaagaagaatccatcccagcacatattttgaaaaggtgctgaattaaaaagtacaagagtttgctcatataaatcaagttgcccaggaaacctgaggtgatgctatcatttgtctcataatttagaaacgtgatctcttgagagagagactacgcattgcctgggcactttcagattccttaggaagtgcccctttgatatttggaatgtggatatatttataaaacaaatggattgttattccaaatccacatggatttataaccaagccccagaagaataggcagctttgaaatagctagttcgtggaattgaacagaaccttgatggaatgcagttgcctgtgtgaggacagaaaacaaagaggctgcctcagaccacatgcctatctagagattaagtgaatttgtgagggacattttgtggatgccttaaagatgaccagtggtgggttctgatgggaatatatacactcatctggactaggccaatggaagcagtctctttcagttcacctccgtacagcacaagttgttcctgctcatgacctcattgaggaaaatgagaattgtggtgctggtgactttcatgtgtcttgggaggttgaggtgttcaacatcgttaaggcactcccaaaacgcaaacctccttttttaaatgccaattgtacatctacattaattcatctatgcaaacttgtgttttcatggtttgttttttacactatatttctcattaggttctttaaacatcaggtttaatattgatattatgaataatttttaaaccaaagtattctataagtctgtgtgctttgttttcctggatggtttgaccaaggtaaacatcagtcttgtccttctctcttaataaagtcatccatttgttaa

SEQ ID NO: 367226 - DNA, 7539 bp, Homo sapiens
ctactccagcctgggcaataagagctattccagcctgggcaataagagctactccagcctgggcaataagagcttgagcatcatttggcatcgaacgttcagcggaaccgtttggtccagcatgatctccaggtggctaagcagctccaagaggaagatctgaaagcgcaggcccagctccagaagcgctacaaagaccttgaacaacaagactgtgaaattgctcaggaaattcaggagaagctggctattgaggcagagagacgacgcattcaggagaagaaggatgaggacatagctcgccttttgcaagaaaaggagttacaggaagagaaaaagagaaagaaacactttccagagttccctgcaacccgtgcttatgcagatagttactattatgaagatggaggaatgaagccaagagtgatgaaagaagctgtatctactccatcacgaatggcccacagggatcaggaatggtatgatgctgaaattgccagaaaactgcaagaagaagaacttttggctacccaggtggacatgagagccgctcaagtagctcaagatgaagaaatcgctcgacttctaatggctgaagaaaagaaagcttacaaaaaagccaaggagcgggagaaatcatctttggacaaaagaaagcaagaccccgagtggaagccaaaaacagctaaagcagcaaattccaagtcaaaagagagtgatgaacctcaccattctaagaatgaaaggccagcacggccaccaccacctatcatgacagatggtgaagatgcggattacactcattttacaaaccagcagagttccacacggcatttctcaaaatcagagtcctctcataaaggttttcattacaaacattaaaaacctaggaatctgccttgaaaatggactcactatagcaaatattactgggtgatacagaatgaattctacacttactttttttctcctgtgtttgcattcctgggatttatcctcaagtgcatttctgaccataagtaattttaattcatttcaaatgttttggttattcatgatcacttgggcagtataagaaaatgtagcttctgaatattggccacctctatgctgcatatacttcttgggatatagtatctaagacctttgtaaactgccattttgttaggtatggagtttggtatctagggagtaggccttatttagcaattcaaattttatggagatgaatgatcaaagtgaaacaatgtttggatgcaacgcagaataaaagaatataagaaatagctttttgttgcattaatgtatgatattttgaaggacagagcctttgctttttgtattctttaagaaaagcacaaccataaagtattttaaaaaaagaaacacttggagcaattgaaatatgttattctgactagatggactgtagaggttttgcatttctcagccctcctggggagattggcctagatagcattctttaacacttcctctgcttttgcctcagtagcaaggctttcctaagctcctgggcaatggaacatttattagtatttattgacaaaaatttagttctctgaaattttaactcatatatatgaaaaactttgtattccatctcttctttttcatttacttgtagagccaaggaaatggaattgaaagatgattgcataagtaatgatgccatccttctctctggctgtagactgaggcttttctcttgcttcaagtcagagcagtatttgttgataacctctcaataatgtttggtttacatgccagtaattaaattaattcaacatgaagttgaatttgatgaagtggtcatctatccaagtatttggtttttgttttgttttgttttgtttttggagttggagtctcgccctgtcacacaggctggagtgcagtggtgcaatcttggctcactgcaacctccgccacctgggctggagcaattcccctgcctcagcctcccaagtagctggaattacaggcatgtgtcaccacacccggctaatttttgtatttttagtaaagagcgggtttcaccatgttggccaggctggtctcgaacccctgacctcaagtgatccacctgccttggcctcccaaggtgctgggattacaggcttaagccaccatgtccagccagccaagtatttggttttaaacatttgtattcctttgtgcaagggattgtattcctctgtacaagacctttaagcacctcttcaagaaatttagtctttgtgtagctgctaaccttactgcaatatttattttcccttattttcccatactacttagttgacaaatggcaatcaagctcacttgttctccctctctctgtctcccccccatgtacacatatatatatcccttcagcttgacttgctattatttttcattgtataaatatgaaattcttggcatttcaatatggcatttgtttagggaaaaaatatgtaggtcactagagaaaaatgttaatttttttcccactgtgaattgccttctgtttgccttatcttttcagatagtctttaaagttgggcaatattcaggcagctatttagaacagtttctcagagtggatttgggtctctcatttgagaaagatttgtagtttcaatgaagtttgtatattataggaatttaagtaaaatcatctgagttaagttttgggcaaatgttaatcagaaagataatctacatccctactttatgtagtcattttggagaaatggaggaaaaggaaaataacaggactttttatagctgtgataaaatgggtaaagaaaaacctccatttaaataaggaaggggagacaaaatggaaggtcctggccttaagtcaaattccagatagtgctttcaatatccaaagcttaggccttgtttacttatagtaatgctatatttttctttatctgccctgtgatttcgcttcgtgtccttcaaagtttttttattgtaattttaaaggaaaaaaacaatgtatttttatttgataactaggcaaaatcatttgccattttttatttcataaatatttatttttctatctcatacaatgatcagttttactttaaaaattctgcatttctcttgcctctcatgtacttcatccagttatttattattgtaaaatgttaactggagatactgcattcaaaaaaaagtcggaccacttaacacttaccaggaatgttagtgtttcagctgttttagtaagtgaccaagtaagctatcaccttgtgatagctaattccatctttattgtttgttctttttttggtttttaaaagattacaattttaaaatatttatgtttattttatttttgtgtaaagcaaacactttttaaataatatcagagtaattattaccctatgaataaggagatagaaatgaaattcagccagttaaatcctcatactctttctcattcaaataatataataatgtttgagactatagaagcaactcaactgtattttaatgaactgccagacacttttcactgtgttctctgctttttactttgtcatttttatataaatgtgaaagcattttgttgttgttgttgttgttcctgctgctagaacacatgcagtttaatttttaggcccacagtgtattatgctttaatgttgtgatgtaaactaatacttctggcctgggaaaacctttctgtttctgtatctttgtcctttggaggccaggcctcattaacaccagtattgttgaataagcacaatatatgacggagccttatcataaggctgcttgacatagacacccactctcctccacattttataaatcattgtttggaagtaaagttagataagagtcaaattaaatgttttgacttgaaaaatatttgacttttgcgttcaaaccactgttagacgtaagtattttattagacataagtattttattttgggactagacagttgctttacatgtatttaagggaacattgtgattttcagaaagtggctttacatactattgaattgctatttcccaagttactttacaaccaccagcagcataccaataaattacaaaagcagaaaatgaaaattaaccctaggtgttctgatgatagagaaatagctaaattagaaaagaaagatatggatagatgcttttaggaggaaaacctttttagaatggcaatgaccacttggatctaggtcaacatattccaaaatgtgtgaccttgggctttgtgtttactgaactcactctagaaaattctggacctgattcattaaccccgcttttcttctctaatgtgtcctgaagctgagctagatgatgagtaaattctttgctgactgttgctcatcactttctctcaaagttagaacttttcagtataaaaataattagcttttaactgattattaattttctttaatagtttctgtcaaaacttgtctaaaatttgtgttgtgccaaattggaaatacccactataatatggtgcattcagtttactccacaagtggttaacattttaagtcctagatttttgatgtcttgcctttgtataagcatcgctttggggaataccaagatgattcattattcagtgattattttcttgaaagataactatgatgattggctgtaaaatcttcaccctaataaaggagtgagatctctgtgtaaacagctttctgaaggactgataatagaatagaacttgcagccaaaggctttttcccttttgagaagacggtatttgtgtaaggagtgctaaggtagacttcattgtacatagagtgccatattctgttgaaacgatcataacaaaatcaaaacctcatgcttcagcaaaaaggaaaaaagatttttaaattactttgtctattacttactgctcatagagaagtgactatataaaatggtccaattttctcatttctggtggtgcctgtgagtcttaaagccatatctgcttatcttactgttgatagaatactttttttctttttagcccatgataagtaatatgggcaggtagaagcaaactggagactgtcctgttaatgctgcatggggcacaatgtctttcaaattattggtggaagaatctcttttatccatggcgagaggtaagaatattaaagagtcaggatattgttgctcctggtatttaacaactgtcattagaaatgctgaaatttaattgtagagaagtcaagaaagaaagagtaaactgagaaaatcttactactacagagtcacttttacaatgagacctgcactttatgccagcactgtttgtgaggagcagtactgccttaaattagtttgactctgactgatgtcagtgtacgttacttcctttatgtgactgacagtcagctttccattgagatataacattcacagatgatccccaagtatccttgtcatcagaagctttggaccttttctgccactgacttgtggctgatctgtaacacaataaatacataattttatttcatgttgtctgtccacctctgaataagcagtggcatgaccaaaaagactggtagaaggagagaatttcttggccaaatccttcataccaggtaccacttcttgagtaactgagagttgactgtcttctatggtgactacatagaagatatttccaaaggttctgttatgcagtgaagacattcagattatttgtaagaatttcaccaacacccttgtgtattgaaatgcttaaccattaacagggaaaaaaaaggagaaaaccgaacaaaacagagacatttacttgaaatgggaggtttgctaatgtgaagagtgtttctgttttattacttataagagaaaagcaggaaaacttttgctttgataagaaagacaccagagtggtgattctatttgatgccacaggctaacacaatcgtgtaatcatgttgagttgtagaaatatatggccctaaaaaccattctctttcccttatatatataaatatgtgaacactgcctagtaacattttaatagatttaagatgcatttgtacattctcagcaaactagaagaaaatgttttttctctttttgagttaacttcatagcatagagaaccagcactgtgcaggtttcagcatttcagataagggcataattaattgtgtaacttaatgccctgttattcattgctgaggttcatataaagaatagaaaaattgaaagatgggtttgggcgacattttcttcccaaaagatcaagtaaggagtaagaacaagtaagggaagacagctaagagaacatactatgacatatcatagaattgggatacatttttgttgcactggatttcaggctatactgctaaaataatttctacctgttaaattttgtgagagggtttttgacatcagaatttttgtatttctggtcaaattggtcttggaaatccctatggtctctaatttcagctcttgctgtaaactgcaagccaaatgctctttctcagaaagagctatatttttctcttcttacaggcaacccaatatttatttcataaagtgttataaatattgagaagatacactggggagatagcatataaaaatgatgctccaaaatgagaattctatatggggctttccctaagaagaatccatcccagcacatattttgaaaaggtgctgaattaaaaagtacaagagtttgctcatataaatcaagttgcccaggaaacctgaggtgatgctatcatttgtctcataatttagaaacgtgatctcttgagagagagactacgcattgcctgggcactttcagattccttaggaagtgcccctttgatatttggaatgtggatatatttataaaacaaatggattgttattccaaatccacatggatttataaccaagccccagaagaataggcagctttgaaatagctagttcgtggaattgaacagaaccttgatggaatgcagttgcctgtgtgaggacagaaaacaaagaggctgcctcagaccacatgcctatctagagattaagtgaatttgtgagggacattttgtggatgccttaaagatgaccagtggtgggttctgatgggaatatatacactcatctggactaggccaatggaagcagtctctttcagttcacctccgtacagcacaagttgttcctgctcatgacctcattgaggaaaatgagaattgtggtgctggtgactttcatgtgtcttgggaggttgaggtgttcaacatcgttaaggcactcccaaaacgcaaacctccttttttaaatgccaattgtacatctacattaattcatctatgcaaacttgtgttttcatggtttgttttttacactatatttctcattaggttctttaaacatcaggtttaatattgatattatgaataatttttaaaccaaagtattctataagtctgtgtgctttgttttcctggatggtttgaccaaggtaaacatcagtcttgtccttctctcttaataaagtcatccatttgttaa

SEQ ID NO: 367227 - DNA, 7291 bp, Homo sapiens
ctcggtaccaacttcgacggagcatcaggagaagaaggatgaggacatagctcgccttttgcaagaaaaggagttacaggaagagaaaaagagaaagaaacactttccagagttccctgcaacccgtgcttatgcagatagttactattatgaagatggaggaatgaagccaagagtgatgaaagaagctgtatctactccatcacgaatggcccacagggatcaggaatggtatgatgctgaaattgccagaaaactgcaagaagaagaacttttggctacccaggtggacatgagagccgctcaagtagctcaagatgaagaaatcgctcgacttctaatggctgaagaaaagaaagcttacaaaaaagccaaggagcgggagaaatcatctttggacaaaagaaagcaagaccccgagtggaagccaaaaacagctaaagcagcaaattccaagtcaaaagagagtgatgaacctcaccattctaagaatgaaaggccagcacggccaccaccacctatcatgacagatggtgaagatgcggattacactcattttacaaaccagcagagttccacacggcatttctcaaaatcagagtcctctcataaaggttttcattacaaacattaaaaacctaggaatctgccttgaaaatggactcactatagcaaatattactgggtgatacagaatgaattctacacttactttttttctcctgtgtttgcattcctgggatttatcctcaagtgcatttctgaccataagtaattttaattcatttcaaatgttttggttattcatgatcacttgggcagtataagaaaatgtagcttctgaatattggccacctctatgctgcatatacttcttgggatatagtatctaagacctttgtaaactgccattttgttaggtatggagtttggtatctagggagtaggccttatttagcaattcaaattttatggagatgaatgatcaaagtgaaacaatgtttggatgcaacgcagaataaaagaatataagaaatagctttttgttgcattaatgtatgatattttgaaggacagagcctttgctttttgtattctttaagaaaagcacaaccataaagtattttaaaaaaagaaacacttggagcaattgaaatatgttattctgactagatggactgtagaggttttgcatttctcagccctcctggggagattggcctagatagcattctttaacacttcctctgcttttgcctcagtagcaaggctttcctaagctcctgggcaatggaacatttattagtatttattgacaaaaatttagttctctgaaattttaactcatatatatgaaaaactttgtattccatctcttctttttcatttacttgtagagccaaggaaatggaattgaaagatgattgcataagtaatgatgccatccttctctctggctgtagactgaggcttttctcttgcttcaagtcagagcagtatttgttgataacctctcaataatgtttggtttacatgccagtaattaaattaattcaacatgaagttgaatttgatgaagtggtcatctatccaagtatttggtttttgttttgttttgttttgtttttggagttggagtctcgccctgtcacacaggctggagtgcagtggtgcaatcttggctcactgcaacctccgccacctgggctggagcaattcccctgcctcagcctcccaagtagctggaattacaggcatgtgtcaccacacccggctaatttttgtatttttagtaaagagcgggtttcaccatgttggccaggctggtctcgaacccctgacctcaagtgatccacctgccttggcctcccaaggtgctgggattacaggcttaagccaccatgtccagccagccaagtatttggttttaaacatttgtattcctttgtgcaagggattgtattcctctgtacaagacctttaagcacctcttcaagaaatttagtctttgtgtagctgctaaccttactgcaatatttattttcccttattttcccatactacttagttgacaaatggcaatcaagctcacttgttctccctctctctgtctcccccccatgtacacatatatatatcccttcagcttgacttgctattatttttcattgtataaatatgaaattcttggcatttcaatatggcatttgtttagggaaaaaatatgtaggtcactagagaaaaatgttaatttttttcccactgtgaattgccttctgtttgccttatcttttcagatagtctttaaagttgggcaatattcaggcagctatttagaacagtttctcagagtggatttgggtctctcatttgagaaagatttgtagtttcaatgaagtttgtatattataggaatttaagtaaaatcatctgagttaagttttgggcaaatgttaatcagaaagataatctacatccctactttatgtagtcattttggagaaatggaggaaaaggaaaataacaggactttttatagctgtgataaaatgggtaaagaaaaacctccatttaaataaggaaggggagacaaaatggaaggtcctggccttaagtcaaattccagatagtgctttcaatatccaaagcttaggccttgtttacttatagtaatgctatatttttctttatctgccctgtgatttcgcttcgtgtccttcaaagtttttttattgtaattttaaaggaaaaaaacaatgtatttttatttgataactaggcaaaatcatttgccattttttatttcataaatatttatttttctatctcatacaatgatcagttttactttaaaaattctgcatttctcttgcctctcatgtacttcatccagttatttattattgtaaaatgttaactggagatactgcattcaaaaaaaagtcggaccacttaacacttaccaggaatgttagtgtttcagctgttttagtaagtgaccaagtaagctatcaccttgtgatagctaattccatctttattgtttgttctttttttggtttttaaaagattacaattttaaaatatttatgtttattttatttttgtgtaaagcaaacactttttaaataatatcagagtaattattaccctatgaataaggagatagaaatgaaattcagccagttaaatcctcatactctttctcattcaaataatataataatgtttgagactatagaagcaactcaactgtattttaatgaactgccagacacttttcactgtgttctctgctttttactttgtcatttttatataaatgtgaaagcattttgttgttgttgttgttgttcctgctgctagaacacatgcagtttaatttttaggcccacagtgtattatgctttaatgttgtgatgtaaactaatacttctggcctgggaaaacctttctgtttctgtatctttgtcctttggaggccaggcctcattaacaccagtattgttgaataagcacaatatatgacggagccttatcataaggctgcttgacatagacacccactctcctccacattttataaatcattgtttggaagtaaagttagataagagtcaaattaaatgttttgacttgaaaaatatttgacttttgcgttcaaaccactgttagacgtaagtattttattagacataagtattttattttgggactagacagttgctttacatgtatttaagggaacattgtgattttcagaaagtggctttacatactattgaattgctatttcccaagttactttacaaccaccagcagcataccaataaattacaaaagcagaaaatgaaaattaaccctaggtgttctgatgatagagaaatagctaaattagaaaagaaagatatggatagatgcttttaggaggaaaacctttttagaatggcaatgaccacttggatctaggtcaacatattccaaaatgtgtgaccttgggctttgtgtttactgaactcactctagaaaattctggacctgattcattaaccccgcttttcttctctaatgtgtcctgaagctgagctagatgatgagtaaattctttgctgactgttgctcatcactttctctcaaagttagaacttttcagtataaaaataattagcttttaactgattattaattttctttaatagtttctgtcaaaacttgtctaaaatttgtgttgtgccaaattggaaatacccactataatatggtgcattcagtttactccacaagtggttaacattttaagtcctagatttttgatgtcttgcctttgtataagcatcgctttggggaataccaagatgattcattattcagtgattattttcttgaaagataactatgatgattggctgtaaaatcttcaccctaataaaggagtgagatctctgtgtaaacagctttctgaaggactgataatagaatagaacttgcagccaaaggctttttcccttttgagaagacggtatttgtgtaaggagtgctaaggtagacttcattgtacatagagtgccatattctgttgaaacgatcataacaaaatcaaaacctcatgcttcagcaaaaaggaaaaaagatttttaaattactttgtctattacttactgctcatagagaagtgactatataaaatggtccaattttctcatttctggtggtgcctgtgagtcttaaagccatatctgcttatcttactgttgatagaatactttttttctttttagcccatgataagtaatatgggcaggtagaagcaaactggagactgtcctgttaatgctgcatggggcacaatgtctttcaaattattggtggaagaatctcttttatccatggcgagaggtaagaatattaaagagtcaggatattgttgctcctggtatttaacaactgtcattagaaatgctgaaatttaattgtagagaagtcaagaaagaaagagtaaactgagaaaatcttactactacagagtcacttttacaatgagacctgcactttatgccagcactgtttgtgaggagcagtactgccttaaattagtttgactctgactgatgtcagtgtacgttacttcctttatgtgactgacagtcagctttccattgagatataacattcacagatgatccccaagtatccttgtcatcagaagctttggaccttttctgccactgacttgtggctgatctgtaacacaataaatacataattttatttcatgttgtctgtccacctctgaataagcagtggcatgaccaaaaagactggtagaaggagagaatttcttggccaaatccttcataccaggtaccacttcttgagtaactgagagttgactgtcttctatggtgactacatagaagatatttccaaaggttctgttatgcagtgaagacattcagattatttgtaagaatttcaccaacacccttgtgtattgaaatgcttaaccattaacagggaaaaaaaaggagaaaaccgaacaaaacagagacatttacttgaaatgggaggtttgctaatgtgaagagtgtttctgttttattacttataagagaaaagcaggaaaacttttgctttgataagaaagacaccagagtggtgattctatttgatgccacaggctaacacaatcgtgtaatcatgttgagttgtagaaatatatggccctaaaaaccattctctttcccttatatatataaatatgtgaacactgcctagtaacattttaatagatttaagatgcatttgtacattctcagcaaactagaagaaaatgttttttctctttttgagttaacttcatagcatagagaaccagcactgtgcaggtttcagcatttcagataagggcataattaattgtgtaacttaatgccctgttattcattgctgaggttcatataaagaatagaaaaattgaaagatgggtttgggcgacattttcttcccaaaagatcaagtaaggagtaagaacaagtaagggaagacagctaagagaacatactatgacatatcatagaattgggatacatttttgttgcactggatttcaggctatactgctaaaataatttctacctgttaaattttgtgagagggtttttgacatcagaatttttgtatttctggtcaaattggtcttggaaatccctatggtctctaatttcagctcttgctgtaaactgcaagccaaatgctctttctcagaaagagctatatttttctcttcttacaggcaacccaatatttatttcataaagtgttataaatattgagaagatacactggggagatagcatataaaaatgatgctccaaaatgagaattctatatggggctttccctaagaagaatccatcccagcacatattttgaaaaggtgctgaattaaaaagtacaagagtttgctcatataaatcaagttgcccaggaaacctgaggtgatgctatcatttgtctcataatttagaaacgtgatctcttgagagagagactacgcattgcctgggcactttcagattccttaggaagtgcccctttgatatttggaatgtggatatatttataaaacaaatggattgttattccaaatccacatggatttataaccaagccccagaagaataggcagctttgaaatagctagttcgtggaattgaacagaaccttgatggaatgcagttgcctgtgtgaggacagaaaacaaagaggctgcctcagaccacatgcctatctagagattaagtgaatttgtgagggacattttgtggatgccttaaagatgaccagtggtgggttctgatgggaatatatacactcatctggactaggccaatggaagcagtctctttcagttcacctccgtacagcacaagttgttcctgctcatgacctcattgaggaaaatgagaattgtggtgctggtgactttcatgtgtcttgggaggttgaggtgttcaacatcgttaaggcactcccaaaacgcaaacctccttttttaaatgccaattgtacatctacattaattcatctatgcaaacttgtgttttcatggtttgttttttacactatatttctcattaggttctttaaacatcaggtttaatattgatattatgaataatttttaaaccaaagtattctataagtctgtgtgctttgttttcctggatggtttgaccaaggtaaacatcagtcttgtccttctctcttaataaagtcatccatttgttaa

SEQ ID NO: 367228 - DNA, 7473 bp, Homo sapiens
agtgcatgcatgttggggtttcctttaccttttctataagttgtaccaaaacatccacttaagttctttgatttgtaccattccttcaaataaggaaatttggtacccaggtgttgtctttgaggtcttgggatgaatcagaaatctatccaggctaccttccagattccttaagtgccgttgttcagttctaatcacactaatcaaaagacgagcactcccagggacatagctcgccttttgcaagaaaaggagttacaggaagagaaaaagagaaagaaacactttccagagttccctgcaacccgtgcttatgcagatagttactattatgaagatggaggaatgaagccaagagtgatgaaagaagctgtatctactccatcacgaatggcccacagggatcaggaatggtatgatgctgaaattgccagaaaactgcaagaagaagaacttttggctacccaggtggacatgagagccgctcaagtagctcaagatgaagaaatcgctcgacttctaatggctgaagaaaagaaagcttacaaaaaagccaaggagcgggagaaatcatctttggacaaaagaaagcaagaccccgagtggaagccaaaaacagctaaagcagcaaattccaagtcaaaagagagtgatgaacctcaccattctaagaatgaaaggccagcacggccaccaccacctatcatgacagatggtgaagatgcggattacactcattttacaaaccagcagagttccacacggcatttctcaaaatcagagtcctctcataaaggttttcattacaaacattaaaaacctaggaatctgccttgaaaatggactcactatagcaaatattactgggtgatacagaatgaattctacacttactttttttctcctgtgtttgcattcctgggatttatcctcaagtgcatttctgaccataagtaattttaattcatttcaaatgttttggttattcatgatcacttgggcagtataagaaaatgtagcttctgaatattggccacctctatgctgcatatacttcttgggatatagtatctaagacctttgtaaactgccattttgttaggtatggagtttggtatctagggagtaggccttatttagcaattcaaattttatggagatgaatgatcaaagtgaaacaatgtttggatgcaacgcagaataaaagaatataagaaatagctttttgttgcattaatgtatgatattttgaaggacagagcctttgctttttgtattctttaagaaaagcacaaccataaagtattttaaaaaaagaaacacttggagcaattgaaatatgttattctgactagatggactgtagaggttttgcatttctcagccctcctggggagattggcctagatagcattctttaacacttcctctgcttttgcctcagtagcaaggctttcctaagctcctgggcaatggaacatttattagtatttattgacaaaaatttagttctctgaaattttaactcatatatatgaaaaactttgtattccatctcttctttttcatttacttgtagagccaaggaaatggaattgaaagatgattgcataagtaatgatgccatccttctctctggctgtagactgaggcttttctcttgcttcaagtcagagcagtatttgttgataacctctcaataatgtttggtttacatgccagtaattaaattaattcaacatgaagttgaatttgatgaagtggtcatctatccaagtatttggtttttgttttgttttgttttgtttttggagttggagtctcgccctgtcacacaggctggagtgcagtggtgcaatcttggctcactgcaacctccgccacctgggctggagcaattcccctgcctcagcctcccaagtagctggaattacaggcatgtgtcaccacacccggctaatttttgtatttttagtaaagagcgggtttcaccatgttggccaggctggtctcgaacccctgacctcaagtgatccacctgccttggcctcccaaggtgctgggattacaggcttaagccaccatgtccagccagccaagtatttggttttaaacatttgtattcctttgtgcaagggattgtattcctctgtacaagacctttaagcacctcttcaagaaatttagtctttgtgtagctgctaaccttactgcaatatttattttcccttattttcccatactacttagttgacaaatggcaatcaagctcacttgttctccctctctctgtctcccccccatgtacacatatatatatcccttcagcttgacttgctattatttttcattgtataaatatgaaattcttggcatttcaatatggcatttgtttagggaaaaaatatgtaggtcactagagaaaaatgttaatttttttcccactgtgaattgccttctgtttgccttatcttttcagatagtctttaaagttgggcaatattcaggcagctatttagaacagtttctcagagtggatttgggtctctcatttgagaaagatttgtagtttcaatgaagtttgtatattataggaatttaagtaaaatcatctgagttaagttttgggcaaatgttaatcagaaagataatctacatccctactttatgtagtcattttggagaaatggaggaaaaggaaaataacaggactttttatagctgtgataaaatgggtaaagaaaaacctccatttaaataaggaaggggagacaaaatggaaggtcctggccttaagtcaaattccagatagtgctttcaatatccaaagcttaggccttgtttacttatagtaatgctatatttttctttatctgccctgtgatttcgcttcgtgtccttcaaagtttttttattgtaattttaaaggaaaaaaacaatgtatttttatttgataactaggcaaaatcatttgccattttttatttcataaatatttatttttctatctcatacaatgatcagttttactttaaaaattctgcatttctcttgcctctcatgtacttcatccagttatttattattgtaaaatgttaactggagatactgcattcaaaaaaaagtcggaccacttaacacttaccaggaatgttagtgtttcagctgttttagtaagtgaccaagtaagctatcaccttgtgatagctaattccatctttattgtttgttctttttttggtttttaaaagattacaattttaaaatatttatgtttattttatttttgtgtaaagcaaacactttttaaataatatcagagtaattattaccctatgaataaggagatagaaatgaaattcagccagttaaatcctcatactctttctcattcaaataatataataatgtttgagactatagaagcaactcaactgtattttaatgaactgccagacacttttcactgtgttctctgctttttactttgtcatttttatataaatgtgaaagcattttgttgttgttgttgttgttcctgctgctagaacacatgcagtttaatttttaggcccacagtgtattatgctttaatgttgtgatgtaaactaatacttctggcctgggaaaacctttctgtttctgtatctttgtcctttggaggccaggcctcattaacaccagtattgttgaataagcacaatatatgacggagccttatcataaggctgcttgacatagacacccactctcctccacattttataaatcattgtttggaagtaaagttagataagagtcaaattaaatgttttgacttgaaaaatatttgacttttgcgttcaaaccactgttagacgtaagtattttattagacataagtattttattttgggactagacagttgctttacatgtatttaagggaacattgtgattttcagaaagtggctttacatactattgaattgctatttcccaagttactttacaaccaccagcagcataccaataaattacaaaagcagaaaatgaaaattaaccctaggtgttctgatgatagagaaatagctaaattagaaaagaaagatatggatagatgcttttaggaggaaaacctttttagaatggcaatgaccacttggatctaggtcaacatattccaaaatgtgtgaccttgggctttgtgtttactgaactcactctagaaaattctggacctgattcattaaccccgcttttcttctctaatgtgtcctgaagctgagctagatgatgagtaaattctttgctgactgttgctcatcactttctctcaaagttagaacttttcagtataaaaataattagcttttaactgattattaattttctttaatagtttctgtcaaaacttgtctaaaatttgtgttgtgccaaattggaaatacccactataatatggtgcattcagtttactccacaagtggttaacattttaagtcctagatttttgatgtcttgcctttgtataagcatcgctttggggaataccaagatgattcattattcagtgattattttcttgaaagataactatgatgattggctgtaaaatcttcaccctaataaaggagtgagatctctgtgtaaacagctttctgaaggactgataatagaatagaacttgcagccaaaggctttttcccttttgagaagacggtatttgtgtaaggagtgctaaggtagacttcattgtacatagagtgccatattctgttgaaacgatcataacaaaatcaaaacctcatgcttcagcaaaaaggaaaaaagatttttaaattactttgtctattacttactgctcatagagaagtgactatataaaatggtccaattttctcatttctggtggtgcctgtgagtcttaaagccatatctgcttatcttactgttgatagaatactttttttctttttagcccatgataagtaatatgggcaggtagaagcaaactggagactgtcctgttaatgctgcatggggcacaatgtctttcaaattattggtggaagaatctcttttatccatggcgagaggtaagaatattaaagagtcaggatattgttgctcctggtatttaacaactgtcattagaaatgctgaaatttaattgtagagaagtcaagaaagaaagagtaaactgagaaaatcttactactacagagtcacttttacaatgagacctgcactttatgccagcactgtttgtgaggagcagtactgccttaaattagtttgactctgactgatgtcagtgtacgttacttcctttatgtgactgacagtcagctttccattgagatataacattcacagatgatccccaagtatccttgtcatcagaagctttggaccttttctgccactgacttgtggctgatctgtaacacaataaatacataattttatttcatgttgtctgtccacctctgaataagcagtggcatgaccaaaaagactggtagaaggagagaatttcttggccaaatccttcataccaggtaccacttcttgagtaactgagagttgactgtcttctatggtgactacatagaagatatttccaaaggttctgttatgcagtgaagacattcagattatttgtaagaatttcaccaacacccttgtgtattgaaatgcttaaccattaacagggaaaaaaaaggagaaaaccgaacaaaacagagacatttacttgaaatgggaggtttgctaatgtgaagagtgtttctgttttattacttataagagaaaagcaggaaaacttttgctttgataagaaagacaccagagtggtgattctatttgatgccacaggctaacacaatcgtgtaatcatgttgagttgtagaaatatatggccctaaaaaccattctctttcccttatatatataaatatgtgaacactgcctagtaacattttaatagatttaagatgcatttgtacattctcagcaaactagaagaaaatgttttttctctttttgagttaacttcatagcatagagaaccagcactgtgcaggtttcagcatttcagataagggcataattaattgtgtaacttaatgccctgttattcattgctgaggttcatataaagaatagaaaaattgaaagatgggtttgggcgacattttcttcccaaaagatcaagtaaggagtaagaacaagtaagggaagacagctaagagaacatactatgacatatcatagaattgggatacatttttgttgcactggatttcaggctatactgctaaaataatttctacctgttaaattttgtgagagggtttttgacatcagaatttttgtatttctggtcaaattggtcttggaaatccctatggtctctaatttcagctcttgctgtaaactgcaagccaaatgctctttctcagaaagagctatatttttctcttcttacaggcaacccaatatttatttcataaagtgttataaatattgagaagatacactggggagatagcatataaaaatgatgctccaaaatgagaattctatatggggctttccctaagaagaatccatcccagcacatattttgaaaaggtgctgaattaaaaagtacaagagtttgctcatataaatcaagttgcccaggaaacctgaggtgatgctatcatttgtctcataatttagaaacgtgatctcttgagagagagactacgcattgcctgggcactttcagattccttaggaagtgcccctttgatatttggaatgtggatatatttataaaacaaatggattgttattccaaatccacatggatttataaccaagccccagaagaataggcagctttgaaatagctagttcgtggaattgaacagaaccttgatggaatgcagttgcctgtgtgaggacagaaaacaaagaggctgcctcagaccacatgcctatctagagattaagtgaatttgtgagggacattttgtggatgccttaaagatgaccagtggtgggttctgatgggaatatatacactcatctggactaggccaatggaagcagtctctttcagttcacctccgtacagcacaagttgttcctgctcatgacctcattgaggaaaatgagaattgtggtgctggtgactttcatgtgtcttgggaggttgaggtgttcaacatcgttaaggcactcccaaaacgcaaacctccttttttaaatgccaattgtacatctacattaattcatctatgcaaacttgtgttttcatggtttgttttttacactatatttctcattaggttctttaaacatcaggtttaatattgatattatgaataatttttaaaccaaagtattctataagtctgtgtgctttgttttcctggatggtttgaccaaggtaaacatcagtcttgtccttctctcttaataaagtcatccatttgttaa

SEQ ID NO: 367229 - DNA, 7206 bp, Homo sapiens
  misc_feature (72)..(72): n is a, c, g, or t
cactgttaagtgcgttgcctgccatgattgtgagggttaggagtcagttagttagtattaggagggggtttnttagggggtcggaggaaaagtttggggaacagttaaataggttgttgttgatttggttaaaaaatagtagggggatgatgctaataattaggctgtaaactgcaagaagaagaacttttggctacccaggtggacatgagagccgctcaagtagctcaagatgaagaaatcgctcgacttctaatggctgaagaaaagaaagcttacaaaaaagccaaggagcgggagaaatcatctttggacaaaagaaagcaagaccccgagtggaagccaaaaacagctaaagcagcaaattccaagtcaaaagagagtgatgaacctcaccattctaagaatgaaaggccagcacggccaccaccacctatcatgacagatggtgaagatgcggattacactcattttacaaaccagcagagttccacacggcatttctcaaaatcagagtcctctcataaaggttttcattacaaacattaaaaacctaggaatctgccttgaaaatggactcactatagcaaatattactgggtgatacagaatgaattctacacttactttttttctcctgtgtttgcattcctgggatttatcctcaagtgcatttctgaccataagtaattttaattcatttcaaatgttttggttattcatgatcacttgggcagtataagaaaatgtagcttctgaatattggccacctctatgctgcatatacttcttgggatatagtatctaagacctttgtaaactgccattttgttaggtatggagtttggtatctagggagtaggccttatttagcaattcaaattttatggagatgaatgatcaaagtgaaacaatgtttggatgcaacgcagaataaaagaatataagaaatagctttttgttgcattaatgtatgatattttgaaggacagagcctttgctttttgtattctttaagaaaagcacaaccataaagtattttaaaaaaagaaacacttggagcaattgaaatatgttattctgactagatggactgtagaggttttgcatttctcagccctcctggggagattggcctagatagcattctttaacacttcctctgcttttgcctcagtagcaaggctttcctaagctcctgggcaatggaacatttattagtatttattgacaaaaatttagttctctgaaattttaactcatatatatgaaaaactttgtattccatctcttctttttcatttacttgtagagccaaggaaatggaattgaaagatgattgcataagtaatgatgccatccttctctctggctgtagactgaggcttttctcttgcttcaagtcagagcagtatttgttgataacctctcaataatgtttggtttacatgccagtaattaaattaattcaacatgaagttgaatttgatgaagtggtcatctatccaagtatttggtttttgttttgttttgttttgtttttggagttggagtctcgccctgtcacacaggctggagtgcagtggtgcaatcttggctcactgcaacctccgccacctgggctggagcaattcccctgcctcagcctcccaagtagctggaattacaggcatgtgtcaccacacccggctaatttttgtatttttagtaaagagcgggtttcaccatgttggccaggctggtctcgaacccctgacctcaagtgatccacctgccttggcctcccaaggtgctgggattacaggcttaagccaccatgtccagccagccaagtatttggttttaaacatttgtattcctttgtgcaagggattgtattcctctgtacaagacctttaagcacctcttcaagaaatttagtctttgtgtagctgctaaccttactgcaatatttattttcccttattttcccatactacttagttgacaaatggcaatcaagctcacttgttctccctctctctgtctcccccccatgtacacatatatatatcccttcagcttgacttgctattatttttcattgtataaatatgaaattcttggcatttcaatatggcatttgtttagggaaaaaatatgtaggtcactagagaaaaatgttaatttttttcccactgtgaattgccttctgtttgccttatcttttcagatagtctttaaagttgggcaatattcaggcagctatttagaacagtttctcagagtggatttgggtctctcatttgagaaagatttgtagtttcaatgaagtttgtatattataggaatttaagtaaaatcatctgagttaagttttgggcaaatgttaatcagaaagataatctacatccctactttatgtagtcattttggagaaatggaggaaaaggaaaataacaggactttttatagctgtgataaaatgggtaaagaaaaacctccatttaaataaggaaggggagacaaaatggaaggtcctggccttaagtcaaattccagatagtgctttcaatatccaaagcttaggccttgtttacttatagtaatgctatatttttctttatctgccctgtgatttcgcttcgtgtccttcaaagtttttttattgtaattttaaaggaaaaaaacaatgtatttttatttgataactaggcaaaatcatttgccattttttatttcataaatatttatttttctatctcatacaatgatcagttttactttaaaaattctgcatttctcttgcctctcatgtacttcatccagttatttattattgtaaaatgttaactggagatactgcattcaaaaaaaagtcggaccacttaacacttaccaggaatgttagtgtttcagctgttttagtaagtgaccaagtaagctatcaccttgtgatagctaattccatctttattgtttgttctttttttggtttttaaaagattacaattttaaaatatttatgtttattttatttttgtgtaaagcaaacactttttaaataatatcagagtaattattaccctatgaataaggagatagaaatgaaattcagccagttaaatcctcatactctttctcattcaaataatataataatgtttgagactatagaagcaactcaactgtattttaatgaactgccagacacttttcactgtgttctctgctttttactttgtcatttttatataaatgtgaaagcattttgttgttgttgttgttgttcctgctgctagaacacatgcagtttaatttttaggcccacagtgtattatgctttaatgttgtgatgtaaactaatacttctggcctgggaaaacctttctgtttctgtatctttgtcctttggaggccaggcctcattaacaccagtattgttgaataagcacaatatatgacggagccttatcataaggctgcttgacatagacacccactctcctccacattttataaatcattgtttggaagtaaagttagataagagtcaaattaaatgttttgacttgaaaaatatttgacttttgcgttcaaaccactgttagacgtaagtattttattagacataagtattttattttgggactagacagttgctttacatgtatttaagggaacattgtgattttcagaaagtggctttacatactattgaattgctatttcccaagttactttacaaccaccagcagcataccaataaattacaaaagcagaaaatgaaaattaaccctaggtgttctgatgatagagaaatagctaaattagaaaagaaagatatggatagatgcttttaggaggaaaacctttttagaatggcaatgaccacttggatctaggtcaacatattccaaaatgtgtgaccttgggctttgtgtttactgaactcactctagaaaattctggacctgattcattaaccccgcttttcttctctaatgtgtcctgaagctgagctagatgatgagtaaattctttgctgactgttgctcatcactttctctcaaagttagaacttttcagtataaaaataattagcttttaactgattattaattttctttaatagtttctgtcaaaacttgtctaaaatttgtgttgtgccaaattggaaatacccactataatatggtgcattcagtttactccacaagtggttaacattttaagtcctagatttttgatgtcttgcctttgtataagcatcgctttggggaataccaagatgattcattattcagtgattattttcttgaaagataactatgatgattggctgtaaaatcttcaccctaataaaggagtgagatctctgtgtaaacagctttctgaaggactgataatagaatagaacttgcagccaaaggctttttcccttttgagaagacggtatttgtgtaaggagtgctaaggtagacttcattgtacatagagtgccatattctgttgaaacgatcataacaaaatcaaaacctcatgcttcagcaaaaaggaaaaaagatttttaaattactttgtctattacttactgctcatagagaagtgactatataaaatggtccaattttctcatttctggtggtgcctgtgagtcttaaagccatatctgcttatcttactgttgatagaatactttttttctttttagcccatgataagtaatatgggcaggtagaagcaaactggagactgtcctgttaatgctgcatggggcacaatgtctttcaaattattggtggaagaatctcttttatccatggcgagaggtaagaatattaaagagtcaggatattgttgctcctggtatttaacaactgtcattagaaatgctgaaatttaattgtagagaagtcaagaaagaaagagtaaactgagaaaatcttactactacagagtcacttttacaatgagacctgcactttatgccagcactgtttgtgaggagcagtactgccttaaattagtttgactctgactgatgtcagtgtacgttacttcctttatgtgactgacagtcagctttccattgagatataacattcacagatgatccccaagtatccttgtcatcagaagctttggaccttttctgccactgacttgtggctgatctgtaacacaataaatacataattttatttcatgttgtctgtccacctctgaataagcagtggcatgaccaaaaagactggtagaaggagagaatttcttggccaaatccttcataccaggtaccacttcttgagtaactgagagttgactgtcttctatggtgactacatagaagatatttccaaaggttctgttatgcagtgaagacattcagattatttgtaagaatttcaccaacacccttgtgtattgaaatgcttaaccattaacagggaaaaaaaaggagaaaaccgaacaaaacagagacatttacttgaaatgggaggtttgctaatgtgaagagtgtttctgttttattacttataagagaaaagcaggaaaacttttgctttgataagaaagacaccagagtggtgattctatttgatgccacaggctaacacaatcgtgtaatcatgttgagttgtagaaatatatggccctaaaaaccattctctttcccttatatatataaatatgtgaacactgcctagtaacattttaatagatttaagatgcatttgtacattctcagcaaactagaagaaaatgttttttctctttttgagttaacttcatagcatagagaaccagcactgtgcaggtttcagcatttcagataagggcataattaattgtgtaacttaatgccctgttattcattgctgaggttcatataaagaatagaaaaattgaaagatgggtttgggcgacattttcttcccaaaagatcaagtaaggagtaagaacaagtaagggaagacagctaagagaacatactatgacatatcatagaattgggatacatttttgttgcactggatttcaggctatactgctaaaataatttctacctgttaaattttgtgagagggtttttgacatcagaatttttgtatttctggtcaaattggtcttggaaatccctatggtctctaatttcagctcttgctgtaaactgcaagccaaatgctctttctcagaaagagctatatttttctcttcttacaggcaacccaatatttatttcataaagtgttataaatattgagaagatacactggggagatagcatataaaaatgatgctccaaaatgagaattctatatggggctttccctaagaagaatccatcccagcacatattttgaaaaggtgctgaattaaaaagtacaagagtttgctcatataaatcaagttgcccaggaaacctgaggtgatgctatcatttgtctcataatttagaaacgtgatctcttgagagagagactacgcattgcctgggcactttcagattccttaggaagtgcccctttgatatttggaatgtggatatatttataaaacaaatggattgttattccaaatccacatggatttataaccaagccccagaagaataggcagctttgaaatagctagttcgtggaattgaacagaaccttgatggaatgcagttgcctgtgtgaggacagaaaacaaagaggctgcctcagaccacatgcctatctagagattaagtgaatttgtgagggacattttgtggatgccttaaagatgaccagtggtgggttctgatgggaatatatacactcatctggactaggccaatggaagcagtctctttcagttcacctccgtacagcacaagttgttcctgctcatgacctcattgaggaaaatgagaattgtggtgctggtgactttcatgtgtcttgggaggttgaggtgttcaacatcgttaaggcactcccaaaacgcaaacctccttttttaaatgccaattgtacatctacattaattcatctatgcaaacttgtgttttcatggtttgttttttacactatatttctcattaggttctttaaacatcaggtttaatattgatattatgaataatttttaaaccaaagtattctataagtctgtgtgctttgttttcctggatggtttgaccaaggtaaacatcagtcttgtccttctctcttaataaagtcatccatttgttaa

SEQ ID NO: 367230 - DNA, 4497 bp, Homo sapiens
ggaaagactatgttttaggtgacccgtgtggcctttttgttgaggcctttaggatacaaggcccccacctaaagacgcgaccctcccgtaggaggggggcagggcccgggggcgggagcacagcggggccccagcctcaggcggcgcgtcactgagcacaaaggagacaacagcgaggcggcagcgggcgctgatcttcgctcgccagccactcgcaattgcggttacagacctgcagctccccctcccccagccggcccgcccgcctttctgtctcctctctccctccgtactggacggccccggtccatttccgggctccggatatttggtatcgattggggccggggacgcggagcaggtggccgcggcggggcagctgggccgccagcttggtgcctcggggaccgtctcccgctgctttggtcaccagcccctgcccgcccgacccgctccgttctccggcctgcgagccctgccggccggactttgcgccgcgtccggcgctgctgctgcgctcggggccccgctcggcgccggcggtgaccgggaagcccgcgttaaaggggcaaccgggaccctggcccggtatggctgaagtcagcatcgaccagtccaagctgcctggagtcaaggaagtatgccgagattttgctgtcctggaggaccacaccctggctcacagcctgcaggaacaagagattgagcatcatttggcatcgaacgttcagcggaaccgtttggtccagcatgatctccaggtggctaagcagctccaagaggaagatctgaaagcgcaggcccagctccagaagcgctacaaagaccttgaacaacaagactgtgaaattgctcaggaaattcaggagaagctggctattgaggcagagagacgacgcattcaggagaagaaggatgaggacatagctcgccttttgcaagaaaaggagttacaggaagagaaaaagagaaagaaacactttccagagttccctgcaacccgtgcttatgcagatagttactattatgaagatggaggaatgaagccaagagtgatgaaagaagctgtatctactccatcacgaatggcccacagggatcaggaatggtatgatgctgaaattgccagaaaactgcaagaagaagaacttttggctacccaggtggacatgagagccgctcaagtagctcaagatgaagaaatcgctcgacttctaatggctgaagaaaagaaagcttacaaaaaagccaaggagcgggagaaatcatctttggacaaaagaaagcaagaccccgagtggaagccaaaaacagctaaagcagcaaattccaagtcaaaagagagtgatgaacctcaccattctaagaatgaaaggccagcacggccaccaccacctatcatgacagatggtgaagatgcggattacactcattttacaaaccagcagagttccacacggcatttctcaaaatcagagtcctctcataaaggttttcattacaaacattaaaaacctaggaatctgccttgaaaatggactcactatagcaaatattactgggtgatacagaatgaattctacacttactttttttctcctgtgtttgcattcctgggatttatcctcaagtgcatttctgaccataagtaattttaattcatttcaaatgttttggttattcatgatcacttgggcagtataagaaaatgtagcttctgaatattggccacctctatgctgcatatacttcttgggatatagtatctaagacctttgtaaactgccattttgttaggtatggagtttggtatctagggagtaggccttatttagcaattcaaattttatggagatgaatgatcaaagtgaaacaatgtttggatgcaacgcagaataaaagaatataagaaatagctttttgttgcattaatgtatgatattttgaaggacagagcctttgctttttgtattctttaagaaaagcacaaccataaagtattttaaaaaaagaaacacttggagcaattgaaatatgttattctgactagatggactgtagaggttttgcatttctcagccctcctggggagattggcctagatagcattctttaacacttcctctgcttttgcctcagtagcaaggctttcctaagctcctgggcaatggaacatttattagtatttattgacaaaaatttagttctctgaaattttaactcatatatatgaaaaactttgtattccatctcttctttttcatttacttgtagagccaaggaaatggaattgaaagatgattgcataagtaatgatgccatccttctctctggctgtagactgaggcttttctcttgcttcaagtcagagcagtatttgttgataacctctcaataatgtttggtttacatgccagtaattaaattaattcaacatgaagttgaatttgatgaagtggtcatctatccaagtatttggtttttgttttgttttgttttgtttttggagttggagtctcgccctgtcacacaggctggagtgcagtggtgcaatcttggctcactgcaacctccgccacctgggctggagcaattcccctgcctcagcctcccaagtagctggaattacaggcatgtgtcaccacacccggctaatttttgtatttttagtaaagagcgggtttcaccatgttggccaggctggtctcgaacccctgacctcaagtgatccacctgccttggcctcccaaggtgctgggattacaggcttaagccaccatgtccagccagccaagtatttggttttaaacatttgtattcctttgtgcaagggattgtattcctctgtacaagacctttaagcacctcttcaagaaatttagtctttgtgtagctgctaaccttactgcaatatttattttcccttattttcccatactacttagttgacaaatggcaatcaagctcacttgttctccctctctctgtctcccccccatgtacacatatatatatcccttcagcttgacttgctattatttttcattgtataaatatgaaattcttggcatttcaatatggcatttgtttagggaaaaaatatgtaggtcactagagaaaaatgttaatttttttcccactgtgaattgccttctgtttgccttatcttttcagatagtctttaaagttgggcaatattcaggcagctatttagaacagtttctcagagtggatttgggtctctcatttgagaaagatttgtagtttcaatgaagtttgtatattataggaatttaagtaaaatcatctgagttaagttttgggcaaatgttaatcagaaagataatctacatccctactttatgtagtcattttggagaaatggaggaaaaggaaaataacaggactttttatagctgtgataaaatgggtaaagaaaaacctccatttaaataaggaaggggagacaaaatggaaggtcctggccttaagtcaaattccagatagtgctttcaatatccaaagcttaggccttgtttacttatagtaatgctatatttttctttatctgccctgtgatttcgcttcgtgtccttcaaagtttttttattgtaattttaaaggaaaaaaacaatgtatttttatttgataactaggcaaaatcatttgccattttttatttcataaatatttatttttctatctcatacaatgatcagttttactttaaaaattctgcatttctcttgcctctcatgtacttcatccagttatttattattgtaaaatgttaactggagatactgcattcaaaaaaaagtcggaccacttaacacttaccaggaatgttagtgtttcagctgttttagtaagtgaccaagtaagctatcaccttgtgatagctaattccatctttattgtttgttctttttttggtttttaaaagattacaattttaaaatatttatgtttattttatttttgtgtaaagcaaacactttttaaataatatcagagtaattattaccctatgaataaggagatagaaatgaaattcagccagttaaatcctcatactctttctcattcaaataatataataatgtttgagactatagaagcaactcaactgtattttaatgaactgccagacacttttcactgtgttctctgctttttactttgtcatttttatataaatgtgaaagcattttgttgttgttgttgttgttcctgctgctagaacacatgcagtttaatttttaggcccacagtgtattatgctttaatgttgtgatgtaaactaatacttctggcctgggaaaacctttctgtttctgtatctttgtcctttggaggccaggcctcattaacaccagtattgttgaataagcacaatatatgacggagccttatcataaggctgcttgacatagacacccactctcctccacattttataaatcattgtttggaagtaaagttagataagagtca

SEQ ID NO: 367231 - DNA, 1670 bp, Homo sapiens
ggaaagactatgttttaggtgacccgtgtggcctttttgttgaggcctttaggatacaaggcccccacctaaagacgcgaccctcccgtaggaggggggcagggcccgggggcgggagcacagcggggccccagcctcaggcggcgcgtcactgagcacaaaggagacaacagcgaggcggcagcgggcgctgatcttcgctcgccagccactcgcaattgcggttacagacctgcagctccccctcccccagccggcccgcccgcctttctgtctcctctctccctccgtactggacggccccggtccatttccgggctccggatatttggtatcgattggggccggggacgcggagcaggtggccgcggcggggcagctgggccgccagcttggtgcctcggggaccgtctcccgctgctttggtcaccagcccctgcccgcccgacccgctccgttctccggcctgcgagccctgccggccggactttgcgccgcgtccggcgctgctgctgcgctcggggccccgctcggcgccggcggtgaccgggaagcccgcgttaaaggggcaaccgggaccctggcccggtatggctgaagtcagcatcgaccagtccaagctgcctggagtcaaggaagtatgccgagattttgctgtcctggaggaccacaccctggctcacagcctgcaggaacaagagattgagcatcatttggcatcgaacgttcagcggaaccgtttggtccagcatgatctccaggtggctaagcagctccaagaggaagatctgaaagcgcaggcccagctccagaagcgctacaaagaccttgaacaacaagactgtgaaattgctcaggaaattcaggagaagctggctattgaggcagagagacgacgcattcaggagaagaaggatgaggacatagctcgccttttgcaagaaaaggagttacaggaagagaaaaagagaaagaaacactttccagagttccctgcaacccgtgcttatgcagatagttactattatgaagatggaggaatgaagccaagagtgatgaaagaagctgtatctactccatcacgaatggcccacagggatcaggaatggtatgatgctgaaattgccagaaaactgcaagaagaagaacttttggctacccaggtggacatgagagccgctcaagtagctcaagatgaagaaatcgctcgacttctaatggctgaagaaaagaaagcttacaaaaaagccaaggagcgggagaaatcatctttggacaaaagaaagcaagaccccgagtggaagccaaaaacagctaaagcagcaaattccaagtcaaaagagagtgatgaacctcaccattctaagaatgaaaggccagcacggccaccaccacctatcatgacagatggtgaagatgcggattacactcattttacaaaccagcagagttccacacggcatttctcaaaatcagagtcctctcataaaggttttcattacaaacattaaaaacctaggaatctgccttgaaaatggactcactatagcaaatattactgggtgatacagaatgaattctacacttactttttttctcctgtgtttgcattcctggaatagctgctggaaaagtgctgtagttgcttgaatagctaaagatcctgtagg

SEQ ID NO: 367232 - DNA, 1585 bp, Homo sapiens
ggaaagactatgttttaggtgacccgtgtggcctttttgttgaggcctttaggatacaaggcccccacctaaagacgcgaccctcccgtaggaggggggcagggcccgggggcgggagcacagcggggccccagcctcaggcggcgcgtcactgagcacaaaggagacaacagcgaggcggcagcgggcgctgatcttcgctcgccagccactcgcaattgcggttacagacctgcagctccccctcccccagccggcccgcccgcctttctgtctcctctctccctccgtactggacggccccggtccatttccgggctccggatatttggtatcgattggggccggggacgcggagcaggtggccgcggcggggcagctgggccgccagcttggtgcctcggggaccgtctcccgctgctttggtcaccagcccctgcccgcccgacccgctccgttctccggcctgcgagccctgccggccggactttgcgccgcgtccggcgctgctgctgcgctcggggccccgctcggcgccggcggtgaccgggaagcccgcgttaaaggggcaaccgggaccctggcccggtatggctgaagtcagcatcgaccagtccaagctgcctggagtcaaggaagtatgccgagattttgctgtcctggaggaccacaccctggctcacagcctgcaggaacaagagattgagcatcatttggcatcgaacgttcagcggaaccgtttggtccagcatgatctccaggtggctaagcagctccaagaggaagatctgaaagcgcaggcccagctccagaagcgctacaaagaccttgaacaacaagactgtgaaattgctcaggaaattcaggagaagctggctattgaggcagagagacgacgcattcaggagaagaaggatgaggacatagctcgccttttgcaagaaaaggagttacaggaagagaaaaagagaaagaaacactttccagagttccctgcaacccgtgcttatgcagatagttactattatgaagatggaggaatgaagccaagagtgatgaaagaagctgtatctactccatcacgaatggcccacagggatcaggaatggtatgatgctgaaattgccagaaaactgcaagaagaagaacttttggctacccaggtggacatgagagccgctcaagtagctcaagatgaagaaatcgctcgacttctaatggctgaagaaaagaaagcttacaaaaaagccaaggagcgggagaaatcatctttggacaaaagaaagcaagaccccgagtggaagccaaaaacagctaaagcagcaaattccaagtcaaaagagagtgatgaacctcaccattctaagaatgaaaggccagcacggccaccaccacctatcatgacagatggtgaagatgcggattacactcattttacaaaccagcagagttccacacggcatttctcaaaatcagagtcctctcataaaggttttcattacaaacattaaaaacctaggaatctgccttgaaaatggactcacccagtaatatttgctatagtgaggtcgacgcggccgcgaat

SEQ ID NO: 367233 - DNA, 1209 bp, Homo sapiens
ggaaagactatgttttaggtgacccgtgtggcctttttgttgaggcctttaggatacaaggcccccacctaaagacgcgaccctcccgtaggaggggggcagggcccgggggcgggagcacagcggggccccagcctcaggcggcgcgtcactgagcacaaaggagacaacagcgaggcggcagcgggcgctgatcttcgctcgccagccactcgcaattgcggttacagacctgcagctccccctcccccagccggcccgcccgcctttctgtctcctctctccctccgtactggacggccccggtccatttccgggctccggatatttggtatcgattggggccggggacgcggagcaggtggccgcggcggggcagctgggccgccagcttggtgcctcggggaccgtctcccgctgctttggtcaccagcccctgcccgcccgacccgctccgttctccggcctgcgagccctgccggccggactttgcgccgcgtccggcgctgctgctgcgctcggggccccgctcggcgccggcggtgaccgggaagcccgcgttaaaggggcaaccgggaccctggcccggtatggctgaagtcagcatcgaccagtccaagctgcctggagtcaaggaagtatgccgagattttgctgtcctggaggaccacaccctggctcacagcctgcaggaacaagagattgagcatcatttggcatcgaacgttcagcggaaccgtttggtccagcatgatctccaggtggctaagcagctccaagaggaagatctgaaagcgcaggcccagctccagaagcgctacaaagaccttgaacaacaagactgtgaaattgctcaggaaattcaggagaagctggctattgaggcagagagacgacgcattcaggagaagaaggatgaggacatagctcgccttttgcaagaaaaggagttacaggaagagaaaaagagaaagaaacactttccagagttccctgcaacccgtgcttatgcagatagttactattatgaagatggagaatgaattagggaacgaatgaatgaatgcggaatgtgctccgctagctcagtcacgcagaaaggggtgcagctccaaggcccccggagggctgatggaggattgtcaaatttaggaagagccggtcagcgcgaggcacagctcgggaaataacccgatctgtcatgaggtc

SEQ ID NO: 367234 - DNA, 2311 bp, Homo sapiens
ggaaagactatgttttaggtgacccgtgtggcctttttgttgaggcctttaggatacaaggcccccacctaaagacgcgaccctcccgtaggaggggggcagggcccgggggcgggagcacagcggggccccagcctcaggcggcgcgtcactgagcacaaaggagacaacagcgaggcggcagcgggcgctgatcttcgctcgccagccactcgcaattgcggttacagacctgcagctccccctcccccagccggcccgcccgcctttctgtctcctctctccctccgtactggacggccccggtccatttccgggctccggatatttggtatcgattggggccggggacgcggagcaggtggccgcggcggggcagctgggccgccagcttggtgcctcggggaccgtctcccgctgctttggtcaccagcccctgcccgcccgacccgctccgttctccggcctgcgagccctgccggccggactttgcgccgcgtccggcgctgctgctgcgctcggggccccgctcggcgccggcggtgaccgggaagcccgcgttaaaggggcaaccgggaccctggcccggtatggctgaagtcagcatcgaccagtccaagctgcctggagtcaaggaagtatgccgagattttgctgtcctggaggaccacaccctggctcacagcctgcaggaacaagagattgagcatcatttggcatcgaacgttcagcggaaccgtttggtccagcatgatctccaggtggctaagcagctccaagaggaagatctgaaagcgcaggcccagctccagaagcgctacaaagaccttgaacaacaagactgtgaaattgctcaggaaattcaggagaagctggctattgaggcagagagacgacgcattcaggagaagaaggatgaggacatagctcgccttttgcaagaaaaggagttacaggaagagaaaaagagaaagaaacactttccagagttccctgcaacccgtgcttatgcagatagttactattatgaagatggaggaatgaagccaagagtgatgaaagaagctgtatctactccatcacgaatggcccacagggatcaggaatggtatgatgctgaaattgccagaaaactgcaagaagaagaacttttggctacccaggtggacatgagagccgctcaagtagctcaagatgaagaaatcgctcgacttctaatggctgaagaaaagaaagcttacaaaaaagccaaggagcgggagaaatcatctttggacaaaagaaagcaagaccccgagtggaagccaaaaacagctaaagcagcaaattccaagtcaaaagagagtgatgaacctcaccattctaagaatgaaaggccagcacggccaccaccacctatcatgacagatggtgaagatgcggattacactcattttacaaaccagcagagttccacacggcatttctcaaaatcagagtcctctcataaaggttttcattacaaacattaaaaacctaggaatctgccttgaaaatggactcactatagcaaatattactgggtgatacagaatgaattctacacttactttttttctcctgtgtttgcattcctgggatttatcctcaagtgcatttctgaccataagtaattttaattcatttcaaatgttttggttattcatgatcacttgggcagtataagaaaatgtagcttctgaatattggccacctctatgctgcatatacttcttgggatatagtatctaagacctttgtaaactgccattttgttaggtatggagtttggtatctagggagtaggccttatttagcaattcaaattttatggagatgaatgatcaaagtgaaacaatgtttggatgcgtccggacgcattcacaagaattagagaaagtccttacacaactgcatgcaggggtctgctggagaaaaagacagcccaggagagtgcaacagatttaacaggaaacgaattaaaatgtagaaactgattttcaacttacttcgaagagtacataagaaattgcaaactactctctatgcaacattttgaatgctaagtggaaaaccatgcattttggcacgaaatttattaaagattataccatactaattaattactattacttcgttactgaatggtcgtcgaagttgcgacggacgcattcacatcatgcctttcctgaacccagatggctttgagaaggcagcgtctcatcctggtgactcaaggtcagttttgtggcttgatgctatgctctctgcgtatagatctgtgatctggcta

SEQ ID NO: 367235 - DNA, 1282 bp, Homo sapiens
ggaaagactatgttttaggtgacccgtgtggcctttttgttgaggcctttaggatacaaggcccccacctaaagacgcgaccctcccgtaggaggggggcagggcccgggggcgggagcacagcggggccccagcctcaggcggcgcgtcactgagcacaaaggagacaacagcgaggcggcagcgggcgctgatcttcgctcgccagccactcgcaattgcggttacagacctgcagctccccctcccccagccggcccgcccgcctttctgtctcctctctccctccgtactggacggccccggtccatttccgggctccggatatttggtatcgattggggccggggacgcggagcaggtggccgcggcggggcagctgggccgccagcttggtgcctcggggaccgtctcccgctgctttggtcaccagcccctgcccgcccgacccgctccgttctccggcctgcgagccctgccggccggactttgcgccgcgtccggcgctgctgctgcgctcggggccccgctcggcgccggcggtgaccgggaagcccgcgttaaaggggcaaccgggaccctggcccggtatggctgaagtcagcatcgaccagtccaagctgcctggagtcaaggaagtatgccgagattttgctgtcctggaggaccacaccctggctcacagcctgcaggaacaagagattgagcatcatttggcatcgaacgttcagcggaaccgtttggtccagcatgatctccaggtggctaagcagctccaagaggaagatctgaaagcgcaggcccagctccagaagcgctacaaagaccttgaacaacaagactgtgaaattgctcaggaaattcaggagaagctggctattgaggcagagagacgacgcattcaggagaagaaggatgaggacatagctcgccttttgcaagaaaaggagttacaggaagagaaaaagagaaagaaacactttccagagttccctgcaacccgtgcttatgcagatagttactattatgaagatggaggtaacaattcctgcatcatgatctattctatccttagactcaaccataaaacacccctttaattttgttcataaagtgaccttagggacctaggactgtttctcttatccccaggcactgggtacatttagatgtgtggcaggattctatttgaatctaataaattcacgttttgttttgttttgtttttattatactttaagttttagggtacatgtgcacaacgtgcaggtttgttacatat

SEQ ID NO: 367236 - DNA, 346 bp, Homo sapiens
tcagactcgaaattgggaaaaacagtctcgacaccaagatcgactttcacccaagtcctcacaaaaagcagggcttcactgcaaggaagttgtatatgggagggaccatgggcaaggtgagcacagaagaaggagacacaggcccaggactcctccattctcagagagtgaggagcagctccacctccatgacgcaggtaatagaggacagtctcgatggaagtcctggtatcatgtatataactacaaaccaatgaatttaataagtaccttaagcaacctttctttctctctagttcatgctcatgactttgaaataaatcctagagcaacatattataaaagg

SEQ ID NO: 367237 - DNA, 314 bp, Homo sapiens
tccccaaagagcagagtgtgctaacctacaattgaaacatttcaattgaagatctctctttgcccacatcttcaccagcactacataatatcagacttaaatgttgccagtcccataggtgtgaactagcatctcattgttttatttgcatttccctgtttgctaaggagactgagtaacttatgtctctattggtcatttacatttccatcttaaaactatatatattatatgatcatttttaaatttgatggtctctttcttattaatttacattcctacttttttcctagtcctttgtttcataaaatgta

SEQ ID NO: 367238 - DNA, 2576 bp, Homo sapiens
ctgctccttatcatcgttcccacaaggaatttgggtcccaacaggtcggcacccaggactctcagaccgccgccctcccctaaagacctctgaccgtgcccccggtgtagtccagcaacctggacgcagtctcggctttccactaaggtcaagcccggggctttgtagtatagcctcagcgtgtccacgccccctctcccctaggtagtaggccccgccctccgctccgccgccccctccaggtgagtggtaggttctcccgggagcgcaaggtagtgatgacacgcgccccccctcctccgaacgcgagttggtagcgtccgtgacggagttagcctggtcctcccacgcgcgcctccttcctcgccgccggggcgccctctcggtgccactggctctcacgtgccagtagcccaccccgcatcatcctctcgcctcgctcctggagggaagtgactatatctcccccgtccgccttccatcgccgccgcggcggtaattctgtcgggcccgcccgctgacgtcacctgctagccccgcctcctctagggtcccgggcccctgcggcgggggctgccccggggggcagtcagttgaggcggcgggagctcggcggagggcgggccaggtgactggtccgggccatgccgaggaagaagccattcagcgtgaagcagaagaagaagcagttgcaggacaaacgggagcggaagagagggcttcaagatgggctgcgctccagttccaacagccgcagcgggagccgggagcggcgagaggaacagaccgacacctcggacggggagtctgtgacccatcatatccgcaggcttaaccagcagccttctcaggggctgggtccacgaggctacgacccaaatcgataccgactgcattttgagagagacagcagggaggaggtagagaggagaaagagagcagcccgggagcaagttctacagccggtcagtgctgagttgttggagctggacatccgggaggtgtatcagcctggctcagttctggactttcctcgacgtcctccttggagctatgagatgtccaaggagcaactaatgagccaagaggaacggagcttccaagactatcttgggaagattcatggggcttactcctctgagaaactcagctactttgagcacaatctggagacatggaggcagctgtggcgggtgttagagatgtctgacatcgtcctgcttatcactgatatccgacatccagttgtgaatttcccgccagcactttatgagtatgtgactggagaacttggactggccctggtgctggttttgaacaaggtggatctggccccgccagctcttgtggttgcctggaagcattatttccatcaacactatccccagctccacgtcgtccttttcacctcttttcctcgggacccccgcaccccacaggatcctagtagtgtcttgaagaagagtcggaggcgggggagaggatggactcgggccctggggccagagcagttgctgagagcctgtgaagccatcactgtggggaaagtggacttgagcagctggcgggagaagattgctcgggatgtggctggggccacctggggtaatggctctggggaggaggaggaagaggaggatggcccagcagtcctggtggagcagcagactgattcagcaatggagccaactggcccaacccaagagcgctacaaggatggggtggtgaccatcggctgtgtgggtttccctaatgtgggaaagtcctcgctgatcaatgggctggtggggcggaaagtcgtgagtgtctccagaaccccgggccatacccgatactttcagacctactttcttaccccctctgtgaagctctgtgactgcccaggcctcatcttcccatctcttctgcctaggcagttgcaggttctggcagggatctaccctatcgcccagatccaggagccctacactgctgtgggctacctggcctcccgaattcccgtgcaggccctgctccacctgcgccacccagaggctgaggacccctcagcggaacacccctggtgtgcctgggacatctgtgaagcctgggcagagaaacgtggttacaagacagccaaggcggctcggaatgatgtgtacagagcagccaacagtctcttgcggctggcagtggacggccgcctcagcctgtgttttcatcccccaggctacagtgaacagaaaggcacctgggagtcccatccagagaccacggagctggtggttttgcagggcagggtggggccagcaggtgacgaggaggaggaggaagaggaagagctgagcagctcctgtgaggaggagggagaggaggaccgggatgcggatgaggagggagaaggggatgaggagaccccaacctcggctccagggtccagcctggctggccgaaacccttatgccctgctgggtgaggatgagtgctgagttcctcgcccagcgccatcttccctcccagtatctttgcttttggactgacctgggggtatctcccctctgccaccccaattgtgaataaagattgtttgctttgta

SEQ ID NO: 367239 - DNA, 2475 bp, Homo sapiens
  misc_feature (790)..(790): n is a, c, g, or t
ctcagctactcaggaggttgaggcacgagaatcgcttgaacctgggaggatgaggttgtagtgagccaacatcgcaccactgcactccagcccgggtgagggagtgagactctgtctcaaaaacaaaaacaaaaaaaaacaaggacagatggaacatgttgtcacacattgggtggtatggggttcatcaggctgcacatgtatgttctgtgcatttttttgtatgttgtagtttacagttacaaagaagatagcaggaagaaatggtgaaaaaagtaggtaagtcttttaaggagttttcctgcaaagcggacagagaactaggtctggtggtggtcgtcaaaggagaacttttttctccctccttccctcccttcctcctagatacttgcatgtgttgtaaagagtgagcacagtggtacatcttttcttagccacagtcagctgcccaggagcagtgctgaatgggcagagctggattttacagggttgggattttgccaggtgagtaagatagaggggagaagtgggaccagggagttccaggtctgtgaacggccctggctgaggagctggatcatgaaatctgagtcaagtaagaaggaaattgaggacacgagttgggtattgcatagtgttactgtgttaaggtcaggggtcaaagacttactggcatggagtaaccagagtaagtgagctggaaagatgagttgtcagggcagagaggggtgcttggaattgaggctttggagctgtgaagtgacaagatgcaggtattaccatgggagtnggcagctgaggtggggtaaaggagatgctctgtggaagggagatgaaggcactgaagtcagccagaaacacaaaaactggtggtggtgagtgagcagagtggcagtgagccccaagcttccagttttctccttggacagtcatcgtaattattattattattttttgagatggagtttccctcttattgccaggctggagtgcaatggtgcaatctcagctcactgcaacctccgctcctggttcaatggttctcctgcctcagcctcccaagtagctgcaattaggcgcccaccaccacgcccagctaatttgtatttagtagagatgggtttcaccatgttggccaggctggtcttgaagtcctgacctcaggtgatccacccgccttggcctcccaaagtaatcacgctgggattacaagcgtgagccactgtgccaggccaagtcatagtaattatgagatgtggatcactggtactgggtacttactgtactgcaggcactgacccacacaagttgtattggttatctcatttaatcctgaccaccctgaggtagggaggtgtccacactgtaaaatgaagaaacagaggctcagaaagttagttgccctgacatcacaaagctggtaagtggaagggccaggatttaaccctggcagcccagagcgtgatttgtattctgcaataccatttccttaatttctgagccttagttccccttttacctataggtatagcaccaagtcccatcacagagtagaaacctgttaaacgttaattttccttgccttcctcaggtttccctaatgtgggaaagtcctcgctgatcaatgggctggtggggcggaaagtcgtgagtgtctccagaaccccgggccatacccgatactttcagacctactttcttaccccctctgtgaagctctgtgactgcccaggcctcatcttcccatctcttctgcctaggcagttgcaggttctggcagggatctaccctatcgcccagatccaggagccctacactgctgtgggctacctggcctcccgaattcccgtgcaggccctgctccacctgcgccacccagaggctgaggacccctcagcggaacacccctggtgtgcctgggacatctgtgaaggtgagttccatgtgcctggcttcgccccacctggtttcagctgctcttccttacctgcctcgccttttacccttccctgtctcctttcctctcctcagagattctgccattgatgaagctgctgtccactcacccctagatttttgttgcatagccagtaagatctctggcctggaatgttttggggaaaactggaaggactgtgttatgggagtgggagtataactggtacctggttaatgctttccctttccattattcttttcttcctccagcctgggcagagaaacgtggttacaagacagccaaggcggctcggaatgatgtgtacagagcagccaacagtctcttgcggctggcagtggacggccgcctcagcctgtgttttcatcccccaggctacagtgaacagaaaggcacttgggagtcccaaccctgtaaaatccagctctgcccattcagcactgctcctgggcagctgactgtggctaagaaaagatgtaccactgtgctcactctttacaacacatgcaagtatctag

SEQ ID NO: 367240 - DNA, 3489 bp, Homo sapiens
ctgctccttatcatcgttcccacaaggaatttgggtcccaacaggtcggcacccaggactctcagaccgccgccctcccctaaagacctctgaccgtgcccccggtgtagtccagcaacctggacgcagtctcggctttccactaaggtcaagcccggggctttgtagtatagcctcagcgtgtccacgccccctctcccctaggtagtaggccccgccctccgctccgccgccccctccaggtgagtggtaggttctcccgggagcgcaaggtagtgatgacacgcgccccccctcctccgaacgcgagttggtagcgtccgtgacggagttagcctggtcctcccacgcgcgcctccttcctcgccgccggggcgccctctcggtgccactggctctcacgtgccagtagcccaccccgcatcatcctctcgcctcgctcctggagggaagtgactatatctcccccgtccgccttccatcgccgccgcggcggtaattctgtcgggcccgcccgctgacgtcacctgctagccccgcctcctctagggtcccgggcccctgcggcgggggctgccccggggggcagtcagttgaggcggcgggagctcggcggagggcgggccaggtgactggtccgggccatgccgaggaagaagccattcagcgtgaagcagaagaagaagcagttgcaggacaaacgggagcggaagagagggcttcaagatgggctgcgctccagttccaacagccgcagcgggagccgggagcggcgagaggaacagaccgacacctcggacggggagtctgtgacccatcatatccgcaggcttaaccagcagccttctcaggggctgggtccacgaggctacgacccaaatcgataccgactgcattttgagagagacagcagggaggaggtagagaggagaaagagagcagcccgggagcaagttctacagccggtcagtgctgagttgttggagctggacatccgggaggtgtatcagcctggctcagttctggactttcctcgacgtcctccttggagctatgagatgtccaaggagcaactaatgagccaagaggaacggagcttccaagactatcttgggaagattcatggggcttactcctctgagaaactcagctactttgagcacaatctggagacatggaggcagctgtggcgggtgttagagatgtctgacatcgtcctgcttatcactgatatccgacatccagttgtgaatttcccgccagcactttatgagtatgtgactggagaacttggactggccctggtgctggttttgaacaaggtggatctggccccgccagctcttgtggttgcctggaagcattatttccatcaacactatccccagctccacgtcgtccttttcacctcttttcctcgggacccccgcaccccacaggatcctagtagtgtcttgaagaagagtcggaggcgggggagaggatggactcgggccctggggccagagcagttgctgagagcctgtgaagccatcactgtggggaaagtggacttgagcagctggcgggagaagattgctcgggatgtggctggggccacctggggtaatggctctggggaggaggaggaagaggaggatggcccagcagtcctggtggagcagcagactgattcagcaatggagccaactggcccaacccaagagcgctacaaggatggggtggtgaccatcggctgtgtgggtttccctaatgtgggaaagtcctcgctgatcaatgggctggtggggcggaaagtcgtgagtgtctccagaaccccgggccatacccgatactttcagacctactttcttaccccctctgtgaagctctgtgactgcccaggcctcatcttcccatctcttctgcctaggcagttgcaggttctggcagggatctaccctatcgcccagatccaggagccctacactgctgtgggctacctggcctcccgaattcccgtgcaggccctgctccacctgcgccacccagaggctgaggacccctcagcggaacacccctggtgtgcctgggacatctgtgaagcctgggcagagaaacgtggttacaagacagccaaggcggctcggaatgatgtgtacagagcagccaacagtctcttgcggctggcagtggacggccgcctcagcctgtgttttcatcccccaggctacagtgaacagaaaggcacctgggagtcccatccagagaccacggagctggtggttttgcagggcagggtggggccagcaggtgacgaggaggaggaggaagaggaagagctgagcagctcctgtgaggaggagggagaggaggaccgggatgcggatgaggagggagaaggggatgaggagaccccaacctcggctccagggtccagcctggctggccgaaacccttatgccctgctgggtgaggatgagtgctgagttcctcgcccagcgccatcttccctcccagtatctttgcttttggactgacctgggggtatctcccctctgccaccccaattgtgaataaagattgtttgctttgtaaaaaaaaaaaaccaaaaacaacacacaagaaacaaacaacaagaacacaaagaaaaaaaaaaaaaaaaaaacacaaaacgcaacaaaaccacagggcggggggggccgcccccacacaactccccgcgagggaggcggcccccgacgcccggccgccgccagcgcgagattgacgggcgaaaaaacagcggcgcggccacccacactaggacgaggcggggacaataaatacagcgaccgcgcacgaggcagcgagccgaagacaataacaacgacaggcacaacggagcgaagagcacaaaacaccgcacaccaggccgaccaaccctacgcagcaaacgcggcacccacaaccgccgcgccggcgggaggagaaccaaccaacgcggcggcccacaccaccaccgcaacgcgagacactacaggcacccgcacacccgaagcggagaacacacaacaacccaacaacagcagccggcagtacaacacgacgagcgggaaacaaccagacacgagagcaatcagcacgcgcagggacagcacaaacaaagaagcgccgcaccgccacgagagaacgacacaaacgcagagacaaaacaacttaacaatgaagcacggggaggcgaaacgaaagaaaaggaacacaaaacacccacaaccaccacagcacccagagcgacacacgccccacaagcgaccgggagcggaggagggaagcaggggaaggagacgagagggggcggaggcgagacgcacgaacaagagcgagaaggcggggggagaccaagcaggcgagtgggggaagcaggcgacagcgaacaggcaccgaaacacacgccgcacaacagaaaggaggagggagcaagaaacaaacacaccaaacaaaggagagagaaggaagaacggacgagcc

SEQ ID NO: 367241 - DNA, 2764 bp, Homo sapiens
ctgctccttatcatcgttcccacaaggaatttgggtcccaacaggtcggcacccaggactctcagaccgccgccctcccctaaagacctctgaccgtgcccccggtgtagtccagcaacctggacgcagtctcggctttccactaaggtcaagcccggggctttgtagtatagcctcagcgtgtccacgccccctctcccctaggtagtaggccccgccctccgctccgccgccccctccaggtgagtggtaggttctcccgggagcgcaaggtagtgatgacacgcgccccccctcctccgaacgcgagttggtagcgtccgtgacggagttagcctggtcctcccacgcgcgcctccttcctcgccgccggggcgccctctcggtgccactggctctcacgtgccagtagcccaccccgcatcatcctctcgcctcgctcctggagggaagtgactatatctcccccgtccgccttccatcgccgccgcggcggtaattctgtcgggcccgcccgctgacgtcacctgctagccccgcctcctctagggtcccgggcccctgcggcgggggctgccccggggggcagtcagttgaggcggcgggagctcggcggagggcgggccaggtgactggtccgggccatgccgaggaagaagccattcagcgtgaagcagaagaagaagcagttgcaggacaaacgggagcggaagagagggcttcaagatgggctgcgctccagttccaacagccgcagcgggagccgggagcggcgagaggaacagaccgacacctcggacggggagtctgtgacccatcatatccgcaggcttaaccagcagccttctcaggggctgggtccacgaggctacgacccaaatcgataccgactgcattttgagagagacagcagggaggaggtagagaggagaaagagagcagcccgggagcaagttctacagccggtcagtgctgagttgttggagctggacatccgggaggtgtatcagcctggctcagttctggactttcctcgacgtcctccttggagctatgagatgtccaaggagcaactaatgagccaagaggaacggagcttccaagactatcttgggaagattcatggggcttactcctctgagaaactcagctactttgagcacaatctggagacatggaggcagctgtggcgggtgttagagatgtctgacatcgtcctgcttatcactgatatccgacatccagttgtgaatttcccgccagcactttatgagtatgtgactggagaacttggactggccctggtgctggttttgaacaaggtggatctggccccgccagctcttgtggttgcctggaagcattatttccatcaacactatccccagctccacgtcgtccttttcacctcttttcctcgggacccccgcaccccacaggatcctagtagtgtcttgaagaagagtcggaggcgggggagaggatggactcgggccctggggccagagcagttgctgagagcctgtgaagccatcactgtggggaaagtggacttgagcagctggcgggagaagattgctcgggatgtggctggggccacctggggtaatggctctggggaggaggaggaagaggaggatggcccagcagtcctggtggagcagcagactgattcagcaatggagccaactggcccaacccaagagcgctacaaggatggggtggtgaccatcggctgtgtgggtttccctaatgtgggaaagtcctcgctgatcaatgggctggtggggcggaaagtcgtgagtgtctccagaaccccgggccatacccgatactttcagacctactttcttaccccctctgtgaagctctgtgactgcccaggcctcatcttcccatctcttctgcctaggcagttgcaggttctggcagggatctaccctatcgcccagatccaggagccctacactgctgtgggctacctggcctcccgaattcccgtgcaggccctgctccacctgcgccacccagaggctgaggacccctcagcggaacacccctggtgtgcctgggacatctgtgaagcctgggcagagaaacgtggttacaagacagccaaggcggctcggaatgatgtgtacagagcagccaacagtctcttgcggctggcagtggacggccgcctcagcctgtgttttcatcccccaggctacagtgaacagaaaggcacctgggagtcccatccagagaccacggagctggtggttttgcagggcagggtggggccagcaggtgacgaggaggaggaggaagaggaagagctgagcagctcctgtgaggaggagggagaggaggaccgggatgcggatgaggagggagaaggggatgaggagaccccaacctcggctccagggtccagcctggctggccgaaacccttatgccctgctgggtgaggatgagtgctgagttcctcgcccagcgccatcttccctcccagtatctttgcttttggactgacctgggggtatctcccctctgccaccccaattgtgaataaagattgtttgctttgtacacatcattccgagccgccttggctgtcttgtaaccacgtttctctgcccaggcttcacagatgtcccaggcacaccaggggtgttccgctgaggggtcctcagcctctgggtggcgcaggtggagcagggcctgcacgggaattcgggaggccaggtagcccacagcaggtcgacgcggccgcgaat

SEQ ID NO: 367242 - DNA, 2197 bp, Homo sapiens
cacctctggggatcgtgggagggggtcgtgggaccgcgtcaaccctcgcggcctatcgcggaggggatcccccaccccccctacatctggaaggggtggggaaggatggagagttgggggaggggaatccctccagctagcacggggcgccgtccccactgctccctgaaggagtgactccccccacgcacatccgggagggtcccaaatagggtgtctgggaggactgaacatcggaagaagttgagtgggatgaaagggagtcaggccgatgggggagagggtcttatggcccctgagagctggccagcactggcgtcaccggcccctccccgcagggcttcaagatgggctgcgctccagttccaacagccgcagcgggagccgggagcggcgagaggaacagaccgacacctcggacggggagtctgtgacccatcatatccgcaggcttaaccagcagccttctcaggggctgggtccacgaggctacgacccaaatcgataccgactgcattttgagagagacagcagggaggaggtagagaggagaaagagagcagcccgggagcaagttctacagccggtcagtgctgagttgttggagctggacatccgggaggtgtatcagcctggctcagttctggactttcctcgacgtcctccttggagctatgagatgtccaaggagcaactaatgagccaagaggaacggagcttccaagactatcttgggaagattcatggggcttactcctctgagaaactcagctactttgagcacaatctggagacatggaggcagctgtggcgggtgttagagatgtctgacatcgtcctgcttatcactgatatccgacatccagttgtgaatttcccgccagcactttatgagtatgtgactggagaacttggactggccctggtgctggttttgaacaaggtggatctggccccgccagctcttgtggttgcctggaagcattatttccatcaacactatccccagctccacgtcgtccttttcacctcttttcctcgggacccccgcaccccacaggatcctagtagtgtcttgaagaagagtcggaggcgggggagaggatggactcgggccctggggccagagcagttgctgagagcctgtgaagccatcactgtggggaaagtggacttgagcagctggcgggagaagattgctcgggatgtggctggggccacctggggtaatggctctggggaggaggaggaagaggaggatggcccagcagtcctggtggagcagcagactgattcagcaatggagccaactggcccaacccaagagcgctacaaggatggggtggtgaccatcggctgtgtgggtttccctaatgtgggaaagtcctcgctgatcaatgggctggtggggcggaaagtcgtgagtgtctccagaaccccgggccatacccgatactttcagacctactttcttaccccctctgtgaagctctgtgactgcccaggcctcatcttcccatctcttctgcctaggcagttgcaggttctggcagggatctaccctatcgcccagatccaggagccctacactgctgtgggctacctggcctcccgaattcccgtgcaggccctgctccacctgcgccacccagaggctgaggacccctcagcggaacacccctggtgtgcctgggacatctgtgaagcctgggcagagaaacgtggttacaagacagccaaggcggctcggaatgatgtgtacagagcagccaacagtctcttgcggctggcagtggacggccgcctcagcctgtgttttcatcccccaggctacagtgaacagaaaggcacctgggagtcccatccagagaccacggagctggtggttttgcagggcagggtggggccagcaggtgacgaggaggaggaggaagaggaagagctgagcagctcctgtgaggaggagggagaggaggaccgggatgcggatgaggagggagaaggggatgaggagaccccaacctcggctccagggtccagcctggctggccgaaacccttatgccctgctgggtgaggatgagtgctgagttcctcgcccagcgccatcttccctcccagtatctttgcttttggactgacctgggggtatctcccctctgccaccccaattgtgaataaagattgtttgctttgta

SEQ ID NO: 367243 - DNA, 2207 bp, Homo sapiens
ctgctccttatcatcgttcccacaaggaatttgggtcccaacaggtcggcacccaggactctcagaccgccgccctcccctaaagacctctgaccgtgcccccggtgtagtccagcaacctggacgcagtctcggctttccactaaggtcaagcccggggctttgtagtatagcctcagcgtgtccacgccccctctcccctaggtagtaggccccgccctccgctccgccgccccctccaggtgagtggtaggttctcccgggagcgcaaggtagtgatgacacgcgccccccctcctccgaacgcgagttggtagcgtccgtgacggagttagcctggtcctcccacgcgcgcctccttcctcgccgccggggcgccctctcggtgccactggctctcacgtgccagtagcccaccccgcatcatcctctcgcctcgctcctggagggaagtgactatatctcccccgtccgccttccatcgccgccgcggcggtaattctgtcgggcccgcccgctgacgtcacctgctagccccgcctcctctagggtcccgggcccctgcggcgggggctgccccggggggcagtcagttgaggcggcgggagctcggcggagggcgggccaggtgactggtccgggccatgccgaggaagaagccattcagcgtgaagcagaagaagaagcagttgcaggacaaacgggagcggaagagagggcttcaagatgggctgcgctccagttccaacagccgcagcgggagccgggagcggcgagaggaacagaccgacacctcggacggggagtctgtgacccatcatatccgcaggcttaaccagcagccttctcaggggctgggtccacgaggctacgacccaaatcgataccgactgcattttgagagagacagcagggaggaggtagagaggagaaagagagcagcccgggagcaagttctacagccggtcagtgctgagttgttggagctggacatccgggaggtgtatcagcctggctcagttctggactttcctcgacgtcctccttggagctatgagatgtccaaggagcaactaatgagccaagaggaacggagcttccaagactatcttgggaagattcatggggcttactcctctgagaaactcagctactttgagcacaatctggagacatggaggcagctgtggcgggtgttagagatgtctgacatcgtcctgcttatcactgatatccgacatccagttgtgaatttcccgccagcactttatgagtatgtgactggagaacttggactggccctggtgctggttttgaacaaggtggatctggccccgccagctcttgtggttgcctggaagcattatttccatcaacactatccccagctccacgtcgtccttttcacctcttttcctcgggacccccgcaccccacaggatcctagtagtgtcttgaagaagagtcggaggcgggggagaggatggactcgggccctggggccagagcagttgctgagagcctgtgaagccatcactgtggggaaagtggacttgagcagctggcgggagaagattgctcgggatgtggctggggccacctggggtaatggctctggggaggaggaggaagaggaggatggcccagcagtcctggtggagcagcagactgattcagcaatggagccaactggcccaacccaagagcgctacaaggatggggtggtgaccatcggctgtgtgggtttccctaatgtgggaaagtcctcgctgatcaatgggctggtggggcggaaagtcgtgagtgtctccagaaccccgggccatacccgatactttcagacctactttcttaccccctctgtgaagctctgtgactgcccaggcctcatcttcccatctcttctgcctaggcagttgcaggttctggcagggatctaccctatcgcccagatccaggagccctacactgctgtgggctacctggcctcccgaattcccgtgcaggccctgctccacctgcgccacccagaggctgaggacccctcagcggaacacccctggtgtgcctgggacatctgtgaagcctgggcagagaaacgtggttacaagacagccaaggcggctcggaatgatgtgtacagagcaaacaatctttattcacaattggggtggcagaggggagatacccccaggtcagtccaaaag

SEQ ID NO: 367244 - DNA, 2175 bp, Homo sapiens
cacctctggggatcgtgggagggggtcgtgggaccgcgtcaaccctcgcggcctatcgcggaggggatcccccaccccccctacatctggaaggggtggggaaggatggagagttgggggaggggaatccctccagctagcacggggcgccgtccccactgctccctgaaggagtgactccccccacgcacatccgggagggtcccaaatagggtgtctgggaggactgaacatcggaagaagttgagtgggatgaaagggagtcaggccgatgggggagagggtcttatggcccctgagagctggccagcactggcgtcaccggcccctccccgcagggcttcaagatgggctgcgctccagttccaacagccgcagcgggagccgggagcggcgagaggaacagaccgacacctcggacggggagtctgtgacccatcatatccgcaggcttaaccagcagccttctcaggggctgggtccacgaggctacgacccaaatcgataccgactgcattttgagagagacagcagggaggaggtagagaggagaaagagagcagcccgggagcaagttctacagccggtcagtgctgagttgttggagctggacatccgggaggtgtatcagcctggctcagttctggactttcctcgacgtcctccttggagctatgagatgtccaaggagcaactaatgagccaagaggaacggagcttccaagactatcttgggaagattcatggggcttactcctctgagaaactcagctactttgagcacaatctggagacatggaggcagctgtggcgggtgttagagatgtctgacatcgtcctgcttatcactgatatccgacatccagttgtgaatttcccgccagcactttatgagtatgtgactggctggttttgaacaaggtggatctggccccgccagctcttgtggttgcctggaagcattatttccatcaacactatccccagctccacgtcgtccttttcacctcttttcctcgggacccccgcaccccacaggatcctagtagtgtcttgaagaagagtcggaggcgggggagaggatggactcgggccctggggccagagcagttgctgagagcctgtgaagccatcactgtggggaaagtggacttgagcagctggcgggagaagattgctcgggatgtggctggggccacctggggtaatggctctggggaggaggaggaagaggaggatggcccagcagtcctggtggagcagcagactgattcagcaatggagccaactggcccaacccaagagcgctacaaggatggggtggtgaccatcggctgtgtgggtttccctaatgtgggaaagtcctcgctgatcaatgggctggtggggcggaaagtcgtgagtgtctccagaaccccgggccatacccgatactttcagacctactttcttaccccctctgtgaagctctgtgactgcccaggcctcatcttcccatctcttctgcctaggcagttgcaggttctggcagggatctaccctatcgcccagatccaggagccctacactgctgtgggctacctggcctcccgaattcccgtgcaggccctgctccacctgcgccacccagaggctgaggacccctcagcggaacacccctggtgtgcctgggacatctgtgaagcctgggcagagaaacgtggttacaagacagccaaggcggctcggaatgatgtgtacagagcagccaacagtctcttgcggctggcagtggacggccgcctcagcctgtgttttcatcccccaggctacagtgaacagaaaggcacctgggagtcccatccagagaccacggagctggtggttttgcagggcagggtggggccagcaggtgacgaggaggaggaggaagaggaagagctgagcagctcctgtgaggaggagggagaggaggaccgggatgcggatgaggagggagaaggggatgaggagaccccaacctcggctccagggtccagcctggctggccgaaacccttatgccctgctgggtgaggatgagtgctgagttcctcgcccagcgccatcttccctcccagtatctttgcttttggactgacctgggggtatctcccctctgccaccccaattgtgaataaagattgtttgctttgta

SEQ ID NO: 367245 - DNA, 2424 bp, Homo sapiens
  misc_feature (790)..(790): n is a, c, g, or t
ctcagctactcaggaggttgaggcacgagaatcgcttgaacctgggaggatgaggttgtagtgagccaacatcgcaccactgcactccagcccgggtgagggagtgagactctgtctcaaaaacaaaaacaaaaaaaaacaaggacagatggaacatgttgtcacacattgggtggtatggggttcatcaggctgcacatgtatgttctgtgcatttttttgtatgttgtagtttacagttacaaagaagatagcaggaagaaatggtgaaaaaagtaggtaagtcttttaaggagttttcctgcaaagcggacagagaactaggtctggtggtggtcgtcaaaggagaacttttttctccctccttccctcccttcctcctagatacttgcatgtgttgtaaagagtgagcacagtggtacatcttttcttagccacagtcagctgcccaggagcagtgctgaatgggcagagctggattttacagggttgggattttgccaggtgagtaagatagaggggagaagtgggaccagggagttccaggtctgtgaacggccctggctgaggagctggatcatgaaatctgagtcaagtaagaaggaaattgaggacacgagttgggtattgcatagtgttactgtgttaaggtcaggggtcaaagacttactggcatggagtaaccagagtaagtgagctggaaagatgagttgtcagggcagagaggggtgcttggaattgaggctttggagctgtgaagtgacaagatgcaggtattaccatgggagtnggcagctgaggtggggtaaaggagatgctctgtggaagggagatgaaggcactgaagtcagccagaaacacaaaaactggtggtggtgagtgagcagagtggcagtgagccccaagcttccagttttctccttggacagtcatcgtaattattattattattttttgagatggagtttccctcttattgccaggctggagtgcaatggtgcaatctcagctcactgcaacctccgctcctggttcaatggttctcctgcctcagcctcccaagtagctgcaattaggcgcccaccaccacgcccagctaatttgtatttagtagagatgggtttcaccatgttggccaggctggtcttgaagtcctgacctcaggtgatccacccgccttggcctcccaaagtaatcacgctgggattacaagcgtgagccactgtgccaggccaagtcatagtaattatgagatgtggatcactggtactgggtacttactgtactgcaggcactgacccacacaagttgtattggttatctcatttaatcctgaccaccctgaggtagggaggtgtccacactgtaaaatgaagaaacagaggctcagaaagttagttgccctgacatcacaaagctggtaagtggaagggccaggatttaaccctggcagcccagagcgtgatttgtattctgcaataccatttccttaatttctgagccttagttccccttttacctataggtatagcaccaagtcccatcacagagtagaaacctgttaaacgttaattttccttgccttcctcaggtttccctaatgtgggaaagtcctcgctgatcaatgggctggtggggcggaaagtcgtgagtgtctccagaaccccgggccatacccgatactttcagacctactttcttaccccctctgtgaagctctgtgactgcccaggcctcatcttcccatctcttctgcctaggcagttgcaggttctggcagggatctaccctatcgcccagatccaggagccctacactgctgtgggctacctggcctcccgaattcccgtgcaggccctgctccacctgcgccacccagaggctgaggacccctcagcggaacacccctggtgtgcctgggacatctgtgaagcctgggcagagaaacgtggttacaagacagccaaggcggctcggaatgatgtgtacagagcagccaacagtctcttgcggctggcagtggacggccgcctcagcctgtgttttcatcccccaggctacagtgaacagaaaggcacctgggagtcccatccagagaccacggagctggtggttttgcagggcagggtggggccagcaggtgacgaggaggaggaggaagaggaagagctgagcagctcctgtgaggaggagggagaggaggaccgggatgcggatgaggagggagaaggggatgaggagaccccaacctcggctccagggtccagcctggctggccgaaacccttatgccctgctgggtgaggatgagtgctgagttcctcgcccagcgccatcttccctcccagtatctttgcttttggactgacctgggggtatctcccctctgccaccccaattgtgaataaagattgtttgctttgta

SEQ ID NO: 367246 - DNA, 975 bp, Homo sapiens
ggatctggggatactgttgatggaaataatgcttccaggcaaccacaagagctggcggggccagatccaccttgttcaaaaccagcaccagggccagtccaagagcgctacaaggatggggtggtgaccatcggctgtgtgggtttccctaatgtgggaaagtcctcgctgatcaatgggctggtggggcggaaagtcgtgagtgtctccagaaccccgggccatacccgatactttcagacctactttcttaccccctctgtgaagctctgtgactgcccaggcctcatcttcccatctcttctgcctaggcagttgcaggttctggcagggatctaccctatcgcccagatccaggagccctacactgctgtgggctacctggcctcccgaattcccgtgcaggccctgctccacctgcgccacccagaggctgaggacccctcagcggaacacccctggtgtgcctgggacatctgtgaagcctgggcagagaaacgtggttacaagacagccaaggcggctcggaatgatgtgtacagagcagccaacagtctcttgcggctggcagtggacggccgcctcagcctgtgttttcatcccccaggctacagtgaacagaaaggcacctgggagtcccatccagagaccacggagctggtggttttgcagggcagggtggggccagcaggtgacgaggaggaggaggaagaggaagagctgagcagctcctgtgaggaggagggagaggaggaccgggatgcggatgaggagggagaaggggatgaggagaccccaacctcggctccagggtccagcctggctggccgaaacccttatgccctgctgggtgaggatgagtgctgagttcctcgcccagcgccatcttccctcccagtatctttgcttttggactgacctgggggtatctcccctctgccaccccaattgtgaataaagattgtttgctttgta

SEQ ID NO: 367247 - DNA, 1352 bp, Homo sapiens
ctgctccttatcatcgttcccacaaggaatttgggtcccaacaggtcggcacccaggactctcagaccgccgccctcccctaaagacctctgaccgtgcccccggtgtagtccagcaacctggacgcagtctcggctttccactaaggtcaagcccggggctttgtagtatagcctcagcgtgtccacgccccctctcccctaggtagtaggccccgccctccgctccgccgccccctccaggtgagtggtaggttctcccgggagcgcaaggtagtgatgacacgcgccccccctcctccgaacgcgagttggtagcgtccgtgacggagttagcctggtcctcccacgcgcgcctccttcctcgccgccggggcgccctctcggtgccactggctctcacgtgccagtagcccaccccgcatcatcctctcgcctcgctcctggagggaagtgactatatctcccccgtccgccttccatcgccgccgcggcggtaattctgtcgggcccgcccgctgacgtcacctgctagccccgcctcctctagggtcccgggcccctgcggcgggggctgccccggggggcagtcagttgaggcggcgggagctcggcggagggcgggccaggtgactggtccgggccatgccgaggaagaagccattcagcgtgaagcagaagaagaagcagttgcaggacaaacgggagcggaagagagggcttcaagatgggctgcgctccagttccaacagccgcagcgggagccgggagcggcgagaggaacagaccgacacctcggacggggagtctgtgacccatcatatccgcaggcttaaccagcagccttctcaggggctgggtccacgaggctacgacccaaatcgataccgactgcattttgagagagacagcagggaggaggtagagaggagaaagagagcagcccgggagcaagttctacagccggtcagtgctgagttgttggagctggacatccgggaggtgtatcagcctggctcagttctggactttcctcgacgtcctccttggagctatgagatgtccaaggagcaactaatgagccaagaggaacggagcttccaagactatcttgggaagattcatggggcttactcctctgagaaactcagctactttgagcacaatctggagacatggaggcagctgtggcgggtgttagagatgtctgacatcgtcctgcttatcactgatatccgacatccagttgtgaatttcccgccagcactttatgagtatgtgactggtttggactgacctgggggtatctcccctctgccaccccaattgtgaataaagattgtttgctttgta

SEQ ID NO: 367248 - DNA, 402 bp, Homo sapiens
gctggtggggcggaaagtcgtgagtgtctccagaaccccgggccatacccgatactttcagacctactttcttaccccctctgtgaagctctgtgactgcccaggcctcatcttcccatctcttctgcctaggcagttgcaggtatgacggggagggtgggtaagggaaagagagaaggtgggacattgaggaaagtactgagtgctcatttccctcaggttctggcagggatctaccctatcgcccagatccaggagccctacactgctgtgggctacctggcctcccgaattcccgtgcaggccctgctccacctgcgccacccagaggctgaggacccctcagcggaacacccctggtgtgcctgggacatctgtgaaggtgagttccatgtgcctggc

SEQ ID NO: 367249 - DNA, 2664 bp, Homo sapiens
ctgctccttatcatcgttcccacaaggaatttgggtcccaacaggtcggcacccaggactctcagaccgccgccctcccctaaagacctctgaccgtgcccccggtgtagtccagcaacctggacgcagtctcggctttccactaaggtcaagcccggggctttgtagtatagcctcagcgtgtccacgccccctctcccctaggtagtaggccccgccctccgctccgccgccccctccaggtgagtggtaggttctcccgggagcgcaaggtagtgatgacacgcgccccccctcctccgaacgcgagttggtagcgtccgtgacggagttagcctggtcctcccacgcgcgcctccttcctcgccgccggggcgccctctcggtgccactggctctcacgtgccagtagcccaccccgcatcatcctctcgcctcgctcctggagggaagtgactatatctcccccgtccgccttccatcgccgccgcggcggtaattctgtcgggcccgcccgctgacgtcacctgctagccccgcctcctctagggtcccgggcccctgcggcgggggctgccccggggggcagtcagttgaggcggcgggagctcggcggagggcgggccaggtgactggtccgggccatgccgaggaagaagccattcagcgtgaagcagaagaagaagcagttgcaggacaaacgggagcggaagagagggcttcaagatgggctgcgctccagttccaacagccgcagcgggagccgggagcggcgagaggaacagaccgacacctcggacggggagtctgtgacccatcatatccgcaggcttaaccagcagccttctcaggggctgggtccacgaggctacgacccaaatcgataccgactgcattttgagagagacagcagggaggaggtagagaggagaaagagagcagcccgggagcaagttctacagccggtcagtgctgagttgttggagctggacatccgggaggtgtatcagcctggctcagttctggactttcctcgacgtcctccttggagctatgagatgtccaaggagcaactaatgagccaagaggaacggagcttccaagactatcttgggaagattcatggggcttactcctctgagaaactcagctactttgagcacaatctggagacatggaggcagctgtggcgggtgttagagatgtctgacatcgtcctgcttatcactgatatccgacatccagttgtgaatttcccgccagcactttatgagtatgtgactggagaacttggactggccctggtgctggttttgaacaaggtggatctggccccgccagctcttgtggttgcctggaagcattatttccatcaacactatccccagctccacgtcgtccttttcacctcttttcctcgggacccccgcaccccacaggatcctagtagtgtcttgaagaagagtcggaggcgggggagaggatggactcgggccctggggccagagcagttgctgagagcctgtgaagccatcactgtggggaaagtggacttgagcagctggcgggagaagattgctcgggatgtggctggggccacctggggtaatggctctggggaggaggaggaagaggaggatggcccagcagtcctggtggagcagcagactgattcagcaatggagccaactggcccaacccaagagcgctacaaggatggggtggtgaccatcggctgtgtgggtttccctaatgtgggaaagtcctcgctgatcaatgggctggtggggcggaaagtcgtgagtgtctccagaaccccgggccatacccgatactttcagacctactttcttaccccctctgtgaagctctgtgactgcccaggcctcatcttcccatctcttctgcctaggcagttgcaggttctggcagggatctaccctatcgcccagatccaggagccctacactgctgtgggctacctggcctcccgaattcccgtgcaggccctgctccacctgcgccacccagaggctgaggacccctcagcggaacacccctggtgtgcctgggacatctgtgaagcctgggcagagaaacgtggttacaagacagccaaggcggctcggaatgatgtgtacagagcagccaacagtctcttgcggctggcagtggacggccgcctcagcctgtgttttcatcccccaggctacagtgaacagaaaggcacctgggagtcccatccagagaccacggagctggtggttttgcagggcagggtggggccagcaggtgacgaggaggaggaggaagaggaagagctgagcagctcctgtgaggaggagggagaggaggaccgggatgcggatgaggagggagaaggggatgaggagaccccaacctcggctccagggtccagcctggctggccgaaacccttatgccctgctgggtgaggatgagtgctgagttcctcgcccagcgccatcttccctcccagtatctttgcttttggactgacctgggggtatctcccctctgccaccccaattgtgaataaagattgtttgctttgtagccccttccccagatgaactgaggtgagagcggctgttccaggctaacagctgtgggaggcttctctcctcttctcccttcttttttt

SEQ ID NO: 367250 - DNA, 2407 bp, Homo sapiens
ctgctccttatcatcgttcccacaaggaatttgggtcccaacaggtcggcacccaggactctcagaccgccgccctcccctaaagacctctgaccgtgcccccggtgtagtccagcaacctggacgcagtctcggctttccactaaggtcaagcccggggctttgtagtatagcctcagcgtgtccacgccccctctcccctaggtagtaggccccgccctccgctccgccgccccctccaggtgagtggtaggttctcccgggagcgcaaggtagtgatgacacgcgccccccctcctccgaacgcgagttggtagcgtccgtgacggagttagcctggtcctcccacgcgcgcctccttcctcgccgccggggcgccctctcggtgccactggctctcacgtgccagtagcccaccccgcatcatcctctcgcctcgctcctggagggaagtgactatatctcccccgtccgccttccatcgccgccgcggcggtaattctgtcgggcccgcccgctgacgtcacctgctagccccgcctcctctagggtcccgggcccctgcggcgggggctgccccggggggcagtcagttgaggcggcgggagctcggcggagggcgggccaggtgactggtccgggccatgccgaggaagaagccattcagcgtgaagcagaagaagaagcagttgcaggacaaacgggagcggaagagagggcttcaagatgggctgcgctccagttccaacagccgcagcgggagccgggagcggcgagaggaacagaccgacacctcggacggggagtctgtgacccatcatatccgcaggcttaaccagcagccttctcaggggctgggtccacgaggctacgacccaaatcgataccgactgcattttgagagagacagcagggaggaggtagagaggagaaagagagcagcccgggagcaagttctacagccggtcagtgctgagttgttggagctggacatccgggaggtgtatcagcctggctcagttctggactttcctcgacgtcctccttggagctatgagatgtccaaggagcaactaatgagccaagaggaacggagcttccaagactatcttgggaagattcatggggcttactcctctgagaaactcagctactttgagcacaatctggagacatggaggcagctgtggcgggtgttagagatgtctgacatcgtcctgcttatcactgatatccgacatccagttgtgaatttcccgccagcactttatgagtatgtgactggagaacttggactggccctggtgctggttttgaacaaggtggatctggccccgccagctcttgtggttgcctggaagcattatttcccctcttttcctcgggacccccgcaccccacaggatcctagtagtgtcttgaagaagagtcggaggcgggggagaggatggactcgggccctggggccagagcagttgctgagagcctggagcagcagactgattcagcaatggagccaactggcccaacccaagagcgctacaaggatggggtggtgaccatcggctgtgtgggtttccctaatgtgggaaagtcctcgctgatcaatgggctggtggggcggaaagtcgtgagtgtctccagaaccccgggccatacccgatactttcagacctactttcttaccccctctgtgaagctctgtgactgcccaggcctcatcttcccatctcttctgcctaggcagttgcaggttctggcagggatctaccctatcgcccagatccaggagccctacactgctgtgggctacctggcctcccgaattcccgtgcaggccctgctccacctgcgccacccagaggctgaggacccctcagcggaacacccctggtgtgcctgggacatctgtgaagcctgggcagagaaacgtggttacaagacagccaaggcggctcggaatgatgtgtacagagcagccaacagtctcttgcggctggcagtggacggccgcctcagcctgtgttttcatcccccaggctacagtgaacagaaaggcacctgggagtcccatccagagaccacggagctggtggttttgcagggcagggtggggccagcaggtgacgaggaggaggaggaagaggaagagctgagcagctcctgtgaggaggagggagaggaggaccgggatgcggatgaggagggagaaggggatgaggagaccccaacctcggctccagggtccagcctggctggccgaaacccttatgccctgctgggtgaggatgagtgctgagttcctcgcccagcgccatcttccctcccagtatctttgcttttggactgacctgggggtatctcccctctgccaccccaattgtgaataaagattgtttgctttgta

SEQ ID NO: 367251 - DNA, 2851 bp, Homo sapiens
ctgctccttatcatcgttcccacaaggaatttgggtcccaacaggtcggcacccaggactctcagaccgccgccctcccctaaagacctctgaccgtgcccccggtgtagtccagcaacctggacgcagtctcggctttccactaaggtcaagcccggggctttgtagtatagcctcagcgtgtccacgccccctctcccctaggtagtaggccccgccctccgctccgccgccccctccaggtgagtggtaggttctcccgggagcgcaaggtagtgatgacacgcgccccccctcctccgaacgcgagttggtagcgtccgtgacggagttagcctggtcctcccacgcgcgcctccttcctcgccgccggggcgccctctcggtgccactggctctcacgtgccagtagcccaccccgcatcatcctctcgcctcgctcctggagggaagtgactatatctcccccgtccgccttccatcgccgccgcggcggtaattctgtcgggcccgcccgctgacgtcacctgctagccccgcctcctctagggtcccgggcccctgcggcgggggctgccccggggggcagtcagttgaggcggcgggagctcggcggagggcgggccaggtgactggtccgggccatgccgaggaagaagccattcagcgtgaagcagaagaagaagcagttgcaggacaaacgggagcggaagagagggcttcaagatgggctgcgctccagttccaacagccgcagcgggagccgggagcggcgagaggaacagaccgacacctcggacggggagtctgtgacccatcatatccgcaggcttaaccagcagccttctcaggggctgggtccacgaggctacgacccaaatcgataccgactgcattttgagagagacagcagggaggaggtagagaggagaaagagagcagcccgggagcaagttctacagccggtcagtgctgagttgttggagctggacatccgggaggtgtatcagcctggctcagttctggactttcctcgacgtcctccttggagctatgagatgtccaaggagcaactaatgagccaagaggaacggagcttccaagactatcttgggaagattcatggggcttactcctctgagaaactcagctactttgagcacaatctggagacatggaggcagctgtggcgggtgttagagatgtctgacatcgtcctgcttatcactgatatccgacatccagttgtgaatttcccgccagcactttatgagtatgtgactggagaacttggactggccctggtgctggttttgaacaaggtggatctggccccgccagctcttgtggttgcctggaagcattatttccatcaacactatccccagctccacgtcgtccttttcacctcttttcctcgggacccccgcaccccacaggatcctagtagtgtcttgaagaagagtcggaggcgggggagaggatggactcgggccctggggccagagcagttgctgagagcctgtgaagccatcactgtggggaaagtggacttgagcagctggcgggagaagattgctcgggatgtggctggggccacctggggtaatggctctggggaggaggaggaagaggaggatggcccagcagtcctggtggagcagcagactgattcagcaatggagccaactggcccaacccaagagcgctacaaggatggggtggtgaccatcggctgtgtgggtttccctaatgtgggaaagtcctcgctgatcaatgggctggtggggcggaaagtcgtgagtgtctccagaaccccgggccatacccgatactttcagacctactttcttaccccctctgtgaagctctgtgactgcccaggcctcatcttcccatctcttctgcctaggcagttgcaggttctggcagggatctaccctatcgcccagatccaggagccctacactgctgtgggctacctggcctcccgaattcccgtgcaggccctgctccacctgcgccacccagaggctgaggacccctcagcggaacacccctggtgtgcctgggacatctgtgaaggtgagttccatgtgcctggcttcgccccacctggtttcagctgctcttccttacctgcctcgccttttacccttccctgtctcctttcctctcctcagagattctgccattgatgaagctgctgtccactcacccctagatttttgttgcatagccagtaagatctctggcctggaatgttttggggaaaactggaaggactgtgttatgggagtgggagtataactggtacctggttaatgctttccctttccattattcttttcttcctccagcctgggcagagaaacgtggttacaagacagccaaggcggctcggaatgatgtgtacagagcagccaacagtctcttgcggctggcagtggacggccgcctcagcctgtgttttcatcccccaggctacagtgaacagaaaggcacctgggagtcccatccagagaccacggagctggtggttttgcagggcagggtggggccagcaggtgacgaggaggaggaggaagaggaagagctgagcagctcctgtgaggaggagggagaggaggaccgggatgcggatgaggagggagaaggggatgaggagaccccaacctcggctccagggtccagcctggctggccgaaacccttatgccctgctgggtgaggatgagtgctgagttcctcgcccagcgccatcttccctcccagtatctttgcttttggactgacctgggggtatctcccctctgccaccccaattgtgaataaagattgtttgctttgta

SEQ ID NO: 367252 - DNA, 2554 bp, Homo sapiens
ctgctccttatcatcgttcccacaaggaatttgggtcccaacaggtcggcacccaggactctcagaccgccgccctcccctaaagacctctgaccgtgcccccggtgtagtccagcaacctggacgcagtctcggctttccactaaggtcaagcccggggctttgtagtatagcctcagcgtgtccacgccccctctcccctaggtagtaggccccgccctccgctccgccgccccctccaggtgagtggtaggttctcccgggagcgcaaggtagtgatgacacgcgccccccctcctccgaacgcgagttggtagcgtccgtgacggagttagcctggtcctcccacgcgcgcctccttcctcgccgccggggcgccctctcggtgccactggctctcacgtgccagtagcccaccccgcatcatcctctcgcctcgctcctggagggaagtgactatatctcccccgtccgccttccatcgccgccgcggcggtaattctgtcgggcccgcccgctgacgtcacctgctagccccgcctcctctagggtcccgggcccctgcggcgggggctgccccggggggcagtcagttgaggcggcgggagctcggcggagggcgggccaggtgactggtccgggccatgccgaggaagaagccattcagcgtgaagcagaagaagaagcagttgcaggacaaacgggagcggaagagagggcttcaagatgggctgcgctccagttccaacagccgcagcgggagccgggagcggcgagaggaacagaccgacacctcggacggggagtctgtgacccatcatatccgcaggcttaaccagcagccttctcaggggctgggtccacgaggctacgacccaaatcgataccgactgcattttgagagagacagcagggaggaggtagagaggagaaagagagcagcccgggagcaagttctacagccggtcagtgctgagttgttggagctggacatccgggaggtgtatcagcctggctcagttctggactttcctcgacgtcctccttggagctatgagatgtccaaggagcaactaatgagccaagaggaacggagcttccaagactatcttgggaagattcatggggcttactcctctgagaaactcagctactttgagcacaatctggagacatggaggcagctgtggcgggtgttagagatgtctgacatcgtcctgcttatcactgatatccgacatccagttgtgaatttcccgccagcactttatgagtatgtgactggctggttttgaacaaggtggatctggccccgccagctcttgtggttgcctggaagcattatttccatcaacactatccccagctccacgtcgtccttttcacctcttttcctcgggacccccgcaccccacaggatcctagtagtgtcttgaagaagagtcggaggcgggggagaggatggactcgggccctggggccagagcagttgctgagagcctgtgaagccatcactgtggggaaagtggacttgagcagctggcgggagaagattgctcgggatgtggctggggccacctggggtaatggctctggggaggaggaggaagaggaggatggcccagcagtcctggtggagcagcagactgattcagcaatggagccaactggcccaacccaagagcgctacaaggatggggtggtgaccatcggctgtgtgggtttccctaatgtgggaaagtcctcgctgatcaatgggctggtggggcggaaagtcgtgagtgtctccagaaccccgggccatacccgatactttcagacctactttcttaccccctctgtgaagctctgtgactgcccaggcctcatcttcccatctcttctgcctaggcagttgcaggttctggcagggatctaccctatcgcccagatccaggagccctacactgctgtgggctacctggcctcccgaattcccgtgcaggccctgctccacctgcgccacccagaggctgaggacccctcagcggaacacccctggtgtgcctgggacatctgtgaagcctgggcagagaaacgtggttacaagacagccaaggcggctcggaatgatgtgtacagagcagccaacagtctcttgcggctggcagtggacggccgcctcagcctgtgttttcatcccccaggctacagtgaacagaaaggcacctgggagtcccatccagagaccacggagctggtggttttgcagggcagggtggggccagcaggtgacgaggaggaggaggaagaggaagagctgagcagctcctgtgaggaggagggagaggaggaccgggatgcggatgaggagggagaaggggatgaggagaccccaacctcggctccagggtccagcctggctggccgaaacccttatgccctgctgggtgaggatgagtgctgagttcctcgcccagcgccatcttccctcccagtatctttgcttttggactgacctgggggtatctcccctctgccaccccaattgtgaataaagattgtttgctttgta

SEQ ID NO: 367253 - DNA, 1690 bp, Homo sapiens
tgtgtagtatctcatacgatgatttgagagagaaggcggaggaggtaagaggagaaagagagaggcggagcagtttaagcggagggtgagttgtgtgggcgtcgtgattcggggaggtgtatagcctggctcagttctggactttcctcgacgtcctccttggagctatgagatgtccaaggagcaactaatgagccaagaggaacggagcttccaagactatcttgggaagattcatggggcttactcctctgagaaactcagctactttgagcacaatctggagacatggaggcagctgtggcgggtgttagagatgtctgacatcgtcctgcttatcactgatatccgacatccagttgtgaatttcccgccagcactttatgagtatgtgactggagaacttggactggccctggtgctggttttgaacaaggtggatctggccccgccagctcttgtggttgcctggaagcattatttccatcaacactatccccagctccacgtcgtccttttcacctcttttcctcgggacccccgcaccccacaggatcctagtagtgtcttgaagaagagtcggaggcgggggagaggatggactcgggccctggggccagagcagttgctgagagcctgtgaagccatcactgtggggaaagtggacttgagcagctggcgggagaagattgctcgggatgtggctggggccacctggggtaatggctctggggaggaggaggaagaggaggatggcccagcagtcctggtggagcagcagactgattcagcaatggagccaactggcccaacccaagagcgctacaaggatggggtggtgaccatcggctgtgtgggtttccctaatgtgggaaagtcctcgctgatcaatgggctggtggggcggaaagtcgtgagtgtctccagaaccccgggccatacccgatactttcagacctactttcttaccccctctgtgaagctctgtgactgcccaggcctcatcttcccatctcttctgcctaggcagttgcaggttctggcagggatctaccctatcgcccagatccaggagccctacactgctgtgggctacctggcctcccgaattcccgtgcaggccctgctccacctgcgccacccagaggctgaggacccctcagcggaacacccctggtgtgcctgggacatctgtgaagcctgggcagagaaacgtggttacaagacagccaaggcggctcggaatgatgtgtacagagcagccaacagtctcttgcggctggcagtggacggccgcctcagcctgtgttttcatcccccaggctacagtgaacagaaaggcacctgggagtcccatccagagaccacggagctggtggttttgcagggcagggtggggccagcaggtgacgaggaggaggaggaagaggaagagctgagcagctcctgtgaggaggagggagaggaggaccgggatgcggatgaggagggagaaggggatgaggagaccccaacctcggctccagggtccagcctggctggccgaaacccttatgccctgctgggtgaggatgagtgctgagttcctcgcccagcgccatcttccctcccagtatctttgcttttggactgacctgggggtatctcccctctgccaccccaattgtgaataaagattgtttgctttgta

SEQ ID NO: 367254 - DNA, 2289 bp, Homo sapiens
ctgctccttatcatcgttcccacaaggaatttgggtcccaacaggtcggcacccaggactctcagaccgccgccctcccctaaagacctctgaccgtgcccccggtgtagtccagcaacctggacgcagtctcggctttccactaaggtcaagcccggggctttgtagtatagcctcagcgtgtccacgccccctctcccctaggtagtaggccccgccctccgctccgccgccccctccaggtgagtggtaggttctcccgggagcgcaaggtagtgatgacacgcgccccccctcctccgaacgcgagttggtagcgtccgtgacggagttagcctggtcctcccacgcgcgcctccttcctcgccgccggggcgccctctcggtgccactggctctcacgtgccagtagcccaccccgcatcatcctctcgcctcgctcctggagggaagtgactatatctcccccgtccgccttccatcgccgccgcggcggtaattctgtcgggcccgcccgctgacgtcacctgctagccccgcctcctctagggtcccgggcccctgcggcgggggctgccccggggggcagtcagttgaggcggcgggagctcggcggagggcgggccaggtgactggtccgggccatgccgaggaagaagccattcagcgtgaagcagaagaagaagcagttgcaggacaaacgggagcggaagagagggcttcaagatgggctgcgctccagttccaacagccgcagcgggagccgggagcggcgagaggaacagaccgacacctcggacggggagtctgtgacccatcatatccgcaggcttaaccagcagccttctcaggggctgggtccacgaggctacgacccaaatcgataccgactgcattttgagagagacagcagggaggaggtagagaggagaaagagagcagcccgggagcaagttctacagccggtcagtgctgagttgttggagctggacatccgggaggtgtatcagcctggctcagttctggactttcctcgacgtcctccttggagctatgagatgtccaaggagcaactaatgagccaagaggaacggagcttccaagactatcttgggaagattcatggggcttactcctctgagaaactcagctactttgagcacaatctggagacatggaggcagctgtggcgggtgttagagatgtctgacatcgtcctgcttatcactgatatccgacatccagttgtgaatttcccgccagcactttatgagtatgtgactggagaacttggactggccctggtgctggttttgaacaaggtggatctggccccgccagctcttgtggttgcctggaagcattatttccatcaacactatccccagctccacgtcgtccttttcacctcttttcctcgggacccccgcaccccacaggatcctagtagtgtcttgaagaagagtcggaggcgggggagaggatggactcgggccctggggccagagcagttgctgagagcctgtgaagccatcactgtggggaaagtggacttgagcagctggcgggagaagattgctcgggatgtggctggggccacctggggtaatggctctggggaggaggaggaagaggaggatggcccagcagtcctggtggagcagcagactgattcagcaatggagccaactggcccaacccaagagcgctacaaggatggggtggtgaccatcggctgtgtgggtttccctaatgtgggaaagtcctcgctgatcaatgggctggtggggcggaaagtcgtgagtgtctccagaaccccgggccatacccgatactttcagacctactttcttaccccctctgtgaagctctgtgactgcccaggcctcatcttcccatctcttctgcctaggcagttgcaggttctggcagggatctaccctatcgcccagatccaggagccctacactgctgtgggctacctggcctcccgaattcccagcaggtgacgaggaggaggaggaagaggaagagctgagcagctcctgtgaggaggagggagaggaggaccgggatgcggatgaggagggagaaggggatgaggagaccccaacctcggctccagggtccagcctggctggccgaaacccttatgccctgctgggtgaggatgagtgctgagttcctcgcccagcgccatcttccctcccagtatctttgcttttggactgacctgggggtatctcccctctgccaccccaattgtgaataaagattgtttgctttgta

SEQ ID NO: 367255 - DNA, 2049 bp, Homo sapiens
ctgctccttatcatcgttcccacaaggaatttgggtcccaacaggtcggcacccaggactctcagaccgccgccctcccctaaagacctctgaccgtgcccccggtgtagtccagcaacctggacgcagtctcggctttccactaaggtcaagcccggggctttgtagtatagcctcagcgtgtccacgccccctctcccctaggtagtaggccccgccctccgctccgccgccccctccaggtgagtggtaggttctcccgggagcgcaaggtagtgatgacacgcgccccccctcctccgaacgcgagttggtagcgtccgtgacggagttagcctggtcctcccacgcgcgcctccttcctcgccgccggggcgccctctcggtgccactggctctcacgtgccagtagcccaccccgcatcatcctctcgcctcgctcctggagggaagtgactatatctcccccgtccgccttccatcgccgccgcggcggtaattctgtcgggcccgcccgctgacgtcacctgctagccccgcctcctctagggtcccgggcccctgcggcgggggctgccccggggggcagtcagttgaggcggcgggagctcggcggagggcgggccaggtgactggtccgggccatgccgaggaagaagccattcagcgtgaagcagaagaagaagcagttgcaggacaaacgggagcggaagagagggcttcaagatgggctgcgctccagttccaacagccgcagcgggagccgggagcggcgagaggaacagaccgacacctcggacggggagtctgtgacccatcatatccgcaggcttaaccagcagccttctcaggggctgggtccacgaggctacgacccaaatcgataccgactgcattttgagagagacagcagggaggaggtagagaggagaaagagagcagcccgggagcaagttctacagccggtcagtgctgagttgttggagctggacatccgggaggtgtatcagcctggctcagttctggactttcctcgacgtcctccttggagctatgagatgtccaaggagcaactaatgagccaagaggaacggagcttccaagactatcttgggaagattcatggggcttactcctctgagaaactcagctactttgagcacaatctggagacatggaggcagctgtggcgggtgttagagatgtctgacatcgtcctgcttatcactgatatccgacatccagttgtgaatttcccgccagcactttatgagtatgtgactggagaacttggactggccctggtgctggttttgaacaaggtggatctggccccgccagctcttgtggttgcctggaagcattatttccatcaacactatccccagctccacgtcgtccttttcacctcttttcctcgggacccccgcaccccacaggatcctagtagtgtcttgaagaagagtcggaggcgggggagaggatggactcgggccctggggccagagcagttgctgagagcctgtgaagccatcactgtggggaaagtggacttgagcagctggcgggagaagattgctcgggatgtggctggggccacctggggtaatggctctggggaggaggaggaagaggaggatggcccagcagtcctggtggagcagcagactgattcagcaatggagccaactggcccaacccaagagcgctacaaggatggggtggtgaccatcggctgtgtgggtaaggaagtggcagcttgtgcgtggtggcctccaaggaggtacagagttttcatattcggagaagagagagggcgatcaggtctcattaggccccagggtgtctgaggggtgatctctgccagtggcggtgggcaaggcagaagaggcgtctgctgcagtggaaggatcatgacagcctgagttaaattccacctcttctcagctgtgaggtcttgagtaagtgattttgctactctgagtcttagttactttgattttaaaaataaggacattgatacctgagtaaaagaatggatgacggcca

SEQ ID NO: 367256 - DNA, 1176 bp, Homo sapiens
ctgctccttatcatcgttcccacaaggaatttgggtcccaacaggtcggcacccaggactctcagaccgccgccctcccctaaagacctctgaccgtgcccccggtgtagtccagcaacctggacgcagtctcggctttccactaaggtcaagcccggggctttgtagtatagcctcagcgtgtccacgccccctctcccctaggtagtaggccccgccctccgctccgccgccccctccaggtgagtggtaggttctcccgggagcgcaaggtagtgatgacacgcgccccccctcctccgaacgcgagttggtagcgtccgtgacggagttagcctggtcctcccacgcgcgcctccttcctcgccgccggggcgccctctcggtgccactggctctcacgtgccagtagcccaccccgcatcatcctctcgcctcgctcctggagggaagtgactatatctcccccgtccgccttccatcgccgccgcggcggtaattctgtcgggcccgcccgctgacgtcacctgctagccccgcctcctctagggtcccgggcccctgcggcgggggctgccccggggggcagtcagttgaggcggcgggagctcggcggagggcgggccaggtgactggtccgggccatgccgaggaagaagccattcagcgtgaagcagaagaagaagcagttgcaggacaaacgggagcggaagagagggcttcaagatgggctgcgctccagttccaacagccgcagcgggagccgggagcggcgagaggaacagaccgacacctcggacggggagtctgtgacccatcatatccgcaggcttaaccagcagccttctcaggggctgggtccacgaggctacgacccaaatcgataccgactgcattttgagagagacagcagggaggaggtagagaggagaaagagagcagcccgggagcaagttctacagccggtcagtgctgagttgttggagctggacatccgggaggtgtatcagcctggctcagctggctggccgaaacccttatgccctgctgggtgaggatgagtgctgagttcctcgcccagcgccatcttccctcccagtatctttgcttttggactgacctgggggtatctcccctctgccaccccaattgtgaataaagattgtttgctttgta

SEQ ID NO: 367257 - DNA, 820 bp, Homo sapiens
attgccaatagaaccatgaaaaataaacacttcattaaaagtaaacacatgtacttggaaacccattactgttttcttttcaagttgcaaattacaaaatatttaagcacttttatttgccttttaaaatgttaaacaattatattctttttacccaaaatgagcaggattcagcctggacacaatggtagagactggctgtactactccctcccccaacgattacacaaagtggcatagtaattcagtatcaatccattatattctaaaaaactcagcctgggtagttgctcaaattttaataactataccagcctttggaaggcttgggaaaagcagttggactgtactttataggacagacttgaacttgagcctatacataatgccacctaaagttcagttctgcatatacacgtgcgtgtgtgcacacacacatatatattatcagttaaaacagtcacatatgtgaatagaatgaatcaaataggttattgacatcacagatatgcctagccttagatgttaaattgggtgtctcctttgtttaaatggatttcagtcgaaatggttggcacagtgctattatgcagctaaggacgcgttatcaaagaaagactgaagagtgctgtttcttcctggggttaatggcaaaatccttccctctgcaaagactgcccacgttctgcctgctgtggggctctatagctacaagaagcagaagaacggagcataggaaggctcgaatacccactttagccccaaccttgtctgtttggtcttccatccaggggagaaaaacaataatatccagcctttt

SEQ ID NO: 367258 - DNA, 1214 bp, Homo sapiens
ggatggatggatggatggatggatgtggatggatggatggatggatggatggatgtggatggatggatggatggatggatggatgtggatggatggatggatggatggatggatgtggatggatggatggatggatggatggatgtggatggatggatggatggatggatggatgtggatggatggatggatggatggatggatgtggatggatggatggatggatggatggatgtggatggatggatggatggatggatggatgtggatggatggatggatggatggatggatgtggatggatggatggatggatggatggatgtggatggatggatggatggatggatggatgtggatggatggatggatggatggatggatgtggatggatggatggatggatggatggatgtggatggatggatggatggatggatggatgtggatggatggatggatggatggatggatgtggatggatggatggatggatggatggatgtggatggatggatggatggatggatggatgtggatggatggatggatggatggatggatgtggatggatggatggatggatggatggatgtggatggatggatggatggatggatggatgtggatggatggatggatggatggatggatgtggatggatggatggatggatggatggatgtggatggatggatggatggatggatggatgtggatggatggatggatggatggatggatggtggatggatggatggatggatgggaaataaagagatttggctgtagtgggagggaggtttcagtgctttttctggggacattggtgcctatctctattctgagagttgttctcctcataggacaccataaatcgcatccaggacctgctggctgaggggactataacaggtgtgattgacgaccggggcaagttcatctacataaccccagaggaactggccgccgtggccaacttcatccgacagcggggccgggtgtccatcgccgagcttgcccaagccagcaactccctcatcgcctggggccgggagtcccctgcccaagccccagcctgaccccagtccttccctcttggactcagagttggtgtggcctacctggctatacatcttcatccctccccaccatcctggggaagtgatggtgtggccaggcagttatagattaaaggcctgtgagtactgctg

SEQ ID NO: 367259 - DNA, 290 bp, Homo sapiens
ggtggcatattcctgtagtcccatctacttggaaggctgagactggagggtggcttgagcccaggagttcaaggctgcagtaagctatgatctcaccactgtactccagcctggttgacagagcaagaccctaactctaaacccaagccccagcctgaccccagtccttccctcttggactcagagttggtgtggcctacctggctatacatcttcatccctccccaccatcctggggaagtgatggtgtggccaggcagttatagattaaaggcctgtgagtactgctg

SEQ ID NO: 367260 - DNA, 1468 bp, Homo sapiens
tgagatcccggcctcagggtggacgcagtggttctgcactgaggccctcgtcatggtggcgcctgtgtggtacttggtagcggcggctctgctagtcggctttatcctcttcctgactcgcagccggggccgggcggcatcagccggccaagagccactgcacaatgaggagctggcaggagcaggccgggtggcccagcctgggcccctggagcctgaggagccgagagctggaggcaggcctcggcgccggagggacctgggcagccgcctacaggcccagcgtcgagcccagcgggtggcctgggcagaagcagatgagaacgaggaggaagctgtcatcctagcccaggaggaggaaggtgtcgagaagccagcggaaactcacctgtcggggaaaattggagctaagaaactgcggaagctggaggagaaacaagcgcgaaaggcccagcgtgaggcagaggaggctgaacgtgaggagcggaaacgactcgagtcccagcgcgaagctgagtggaagaaggaggaggagcggcttcgcctggaggaggagcagaaggaggaggaggagaggaaggcccgcgaggagcaggcccagcgggagcatgaggagtacctgaaactgaaggaggcctttgtggtggaggaggaaggcgtaggagagaccatgactgaggaacagtcccagagcttcctgacagagttcatcaactacatcaagcagtccaaggttgtgctcttggaagacctggcttcccaggtgggcctacgcactcaggacaccataaatcgcatccaggacctgctggctgaggggactataacaggtgtgattgacgaccggggcaagttcatctacataaccccagaggaactggccgccgtggccaacttcatccgacagcggggccgggtgtccatcgccgagcttgcccaagccagcaactccctcatcgcctggggccgggagtcccctgcccaagccccagcctgaccccagtccttccctcttggactcagagttggtgtggcctacctggctatacatcttcatccctccccaccatcctggggaagtgatggtgtggccaggcagttatagattaaaggcctgtgagtactgctgagcttggtgtggcttggtgtggcagaaggcctggcctaggatcctagataagcaggtgaaatttaggcttcagaatatatccgagaggtggggagggtcccttggaagctggtgaagtcctgttcttattatgaatccattcattcaagaaaatagcctgttgcacatttactctgtttctttgtgccctgcaagccctgcccccaagacctagataagatctttctcttcttttgcccccactcaaattagaagtggggagcctcttgggccacatctctgttaactggggaggggaggtctcatgggtcttttttaactgatcaggagccctaagta

SEQ ID NO: 367261 - DNA, 2231 bp, Homo sapiens
gtcgtgtgccgggtggggcttccgcagtgccctacctggaatcggtggccgcgccgctacccctttctctcgactccaagccagagtctggcctcatccctctcttcacccccgggaactccatacctccaaaggcctgaggccctggccggcgcacactcccatccgtcaccgtcggggccctttccctctgcacctgttagggaggccgcaggggttttccattcctcccagcctggctccagagcaggtgccaggaagggggcatctgaatattttctgcctgtcccccacgagctggagaagcgcgaggcggctccaggaaattcctgaagctctctcccttcccgccaaggagagggcccactctccctccccaatccgctccccgatcagaaggccatgtcattggccagggcacagaacagatacacccatcctccctctttccccccatttctggtcagcgggcgggtttgtatatgtgttttcctgctccctgggcccacaagctacctctgagcacctgcgcgctcccaggagcggaagggacacgctgagggaaggcggagatccagcaggtcttcccgggggaggctcggccaccgccgggaagtgtactctctggctggggagccagataaaaccacaggtggtgttaggcgagaaatcagtggattcctgcagggggtactcgatgagagctggggacatcaggataggggcctcctgacaggccagctggaaaggtggagccgggaggggagaggagtattcacacaggcccgagggaagggctgagcccccgcctgggaccaagctgtgggcctggtggaaaaggccttgccagtcagactgagaagtcggggccttgtgctgtgggcagcaggccgctaagcagaggagccggccaagagccactgcacaatgaggagctggcaggagcaggccgggtggcccagcctgggcccctggagcctgaggagccgagagctggaggcaggcctcggcgccggagggacctgggcagccgcctacaggcccagcgtcgagcccagcgggtggcctgggcagaagcagatgagaacgaggaggaagctgtcatcctagcccaggaggaggaaggtgtcgagaagccagcggaaactcacctgtcggggaaaattggagctaagaaactgcggaagctggaggagaaacaagcgcgaaaggcccagcgtgaggcagaggaggctgaacgtgaggagcggaaacgactcgagtcccagcgcgaagctgagtggaagaaggaggaggagcggcttcgcctggaggaggagcagaaggaggaggaggagaggaaggcccgcgaggagcaggcccagcgggagcatgaggagtacctgaaactgaaggaggcctttgtggtggaggaggaaggcgtaggagagaccatgactgaggaacagtcccagagcttcctgacagagttcatcaactacatcaagcagtccaaggttgtgctcttggaagacctggcttcccaggtgggcctacgcactcaggacaccataaatcgcatccaggacctgctggctgaggggactataacaggtgtgattgacgaccggggcaagttcatctacataaccccagaggaactggccgccgtggccaacttcatccgacagcggggccgggtgtccatcgccgagcttgcccaagccagcaactccctcatcgcctggggccgggagtcccctgcccaagccccagcctgaccccagtccttccctcttggactcagagttggtgtggcctacctggctatacatcttcatccctccccaccatcctggggaagtgatggtgtggccaggcagttatagattaaaggcctgtgagtactgctgagcttggtgtggcttggtgtggcagaaggcctggcctaggatcctagataagcaggtgaaatttaggcttcagaatatatccgagaggtggggagggtcccttggaagctggtgaagtcctgttcttattatgaatccattcattcaagaaaatagcctgttgcacatttactctgtttctttgtgccctgcaagccctgcccccaagacctagataagatctttctcttcttttgcccccactcaaattagaagtggggagcctcttgggccacatctctgttaactggggaggggaggtctcatgggtcttttttaactgatcaggagccctaagta

SEQ ID NO: 367262 - DNA, 1208 bp, Homo sapiens
gtcgtgtgccgggtggggcttccgcagtgccctacctggaatcggtggccgcgccgctacccctttctctcgactccaagccagagtcccaggaggaggaaggtgtcgagaagccagcggaaactcacctgtcggggaaaattggagctaagaaactgcggaagctggaggagaaacaagcgcgaaaggcccagcgtgaggcagaggaggctgaacgtgaggagcggaaacgactcgagtcccagcgcgaagctgagtggaagaaggaggaggagcggcttcgcctggaggaggagcagaaggaggaggaggagaggaaggcccgcgaggagcaggcccagcgggagcatgaggagtacctgaaactgaaggaggcctttgtggtggaggaggaaggcgtaggagagaccatgactgaggaacagtcccagagcttcctgacagagttcatcaactacatcaagcagtccaaggttgtgctcttggaagacctggcttcccaggtgggcctacgcactcaggacaccataaatcgcatccaggacctgctggctgaggggactataacaggtgtgattgacgaccggggcaagttcatctacataaccccagaggaactggccgccgtggccaacttcatccgacagcggggccgggtgtccatcgccgagcttgcccaagccagcaactccctcatcgcctggggccgggagtcccctgcccaagccccagcctgaccccagtccttccctcttggactcagagttggtgtggcctacctggctatacatcttcatccctccccaccatcctggggaagtgatggtgtggccaggcagttatagattaaaggcctgtgagtactgctgagcttggtgtggcttggtgtggcagaaggcctggcctaggatcctagataagcaggtgaaatttaggcttcagaatatatccgagaggtggggagggtcccttggaagctggtgaagtcctgttcttattatgaatccattcattcaagaaaatagcctgttgcacatttactctgtttctttgtgccctgcaagccctgcccccaagacctagataagatctttctcttcttttgcccccactcaaattagaagtggggagcctcttgggccacatctctgttaactggggaggggaggtctcatgggtcttttttaactgatcaggagccctaagta

SEQ ID NO: 367263 - DNA, 1770 bp, Homo sapiens
  misc_feature (1661)..(1661): n is a, c, g, or t
tgagatcccggcctcagggtggacgcagtggttctgcactgaggccctcgtcatggtggcgcctgtgtggtacttggtagcggcggctctgctagtcggctttatcctcttcctgactcgcagccggggccgggcggcatcagccggccaagagccactgcacaatgaggagctggcaggagcaggccgggtggcccagcctgggcccctggagcctgaggagccgagagctggaggcaggcctcggcgccggagggacctgggcagccgcctacaggcccagcgtcgagcccagcgggtggcctgggcagaagcagatgagaacgaggaggaagctgtcatcctagcccaggaggaggaaggtgtcgagaagccagcggaaactcacctgtcggggaaaattggagctaagaaactgcggaagctggaggagaaacaagcgcgaaaggcccagcgtgaggcagaggaggctgaacgtgaggagcggaaacgactcgagtcccagcgcgaagctgagtggaagaaggaggaggagcggcttcgcctggaggaggagcagaaggaggaggaggagaggaaggcccgcgaggagcaggcccagcgggagcatgaggagtacctgaaactgaaggaggcctttgtggtggaggaggaaggcgtaggagagaccatgactgaggaacagtcccagagcttcctgacagagttcatcaactacatcaagcagtccaaggttgtgctcttggaagacctggcttcccaggtgggcctacgcactcaggtaagccctggaacgtggcctgctgtgtgcagtgtggccaggggtctgtggctagcagagaggacctgccctaaagatagagtcttgatgcaccgtctaccttgtccccaaccaagagtgagtagtgcacagaagtctcctggcaccctgggaatcctgcatttttaatggacgaacaggcaggaaagaaaaaaaaaacccaaaccccatcactctgccagcccctgtgaccaaagcagcccaaatcagttaccttgacaactctcatgcacagactgcaccagcctgtgttgcaaacatcactgccccgcttctaacaggaagagatactcttttgggggtcttgcagggcccaggaccagagccccttctacccagggcccttccaaaggcaaagcacagagtcacatttgggcgtggcatgagagggaaataaagagatttggctgtagtgggagggaggtttcagtgctttttctggggacattggtgcctatctctattctgagagttgttctcctcataggacaccataaatcgcatccaggacctgctggctgaggggactataacaggtgtgattgacgaccggggcaagttcatctacataaccccagaggaactggccgccgtggccaacttcatccgacagcggggccgggtgtccatcgccgagcttgcccaagccagcaactccctcatcgcctggggccgggagtcccctgcccaagccccagcctgaccccagtccttccctcttggactcagagttggtgtggcctacctggctatacatcttcatccctccccaccatcctggggaagtgatggtgtggccaggcagttatagattaaaggcctgtgagtactgctgcagaancacaatgtatacctctatgaaaaaactggagggggggcccggaacccaattcgccctattgtggggaggattacaataactggcccccgtttacaacgctggaatggga

SEQ ID NO: 367264 - DNA, 1075 bp, Homo sapiens
ttaggctagtcgaggctgggtgttggttctgcactgaggccctcgtcatggtggcgcctgtgtggtacttggtagcggcggctctgctagtcggctttatcctcttcctgactcgcagccggggccgggcggcatcagccggccaagagccactgcacaatgaggagctggcaggagcaggccgggtggcccagcctgggcccctggagcctgaggagccgagagctggaggcaggcctcggcgccggagggacctgggcagccgcctacaggcccagcgtcgagcccagcgggtggcctgggcagaagcagatgagaacgaggaggaagctgtcatcctagcccaggaggaggaaggtgtcgagaagccagcggaaactcacctgtcggggaaaattggagctaagaaactgcggaagctggaggagaaacaagcgcgaaaggcccagcgtgaggcagaggaggctgaacgtgaggagcggaaacgactcgagtcccagcgcgaagctgagtggaagaaggaggaggagcggcttcgcctggaggaggagcagaaggaggaggaggagaggaaggcccgcgaggagcaggcccagcgggagcatgaggagtacctgaaactgaaggaggcctttgtggtggaggaggaaggcgtaggagagaccatgactgaggaacagtcccagagcttcctgacagagttcatcaactacatcaagcagtccaaggttgtgctcttggaagacctggcttcccaggtgggcctacgcactcaggtgtgattgacgaccggggcaagttcatctacataaccccagaggaactggccgccgtggccaacttcatccgacagcggggccgggtgtccatcgccgagcttgcccaagccagcaactccctcatcgcctggggccgggagtcccctgcccaagccccagcctgaccccagtccttccctcttggactcagagttggtgtggcctacctggctatacatcttcatccctccccaccatcctggggaagtgatggtgtggccaggcagttatagattaaaggcctgtgagtactgctg

SEQ ID NO: 367265 - DNA, 1129 bp, Homo sapiens
tgagatcccggcctcagggtggacgcagtggttctgcactgaggccctcgtcatggtggcgcctgtgtggtacttggtagcggcggctctgctagtcggctttatcctcttcctgactcgcagccggggccgggcggcatcagccggccaagagccactgcacaatgaggagctggcaggagcaggccgggtggcccagcctgggcccctggagcctgaggagccgagagctggaggcaggcctcggcgccggagggacctgggcagccgcctacaggcccagcgtcgagcccagcgggtggcctgggcagaagcagatgagaacgaggaggaagctgtcatcctagcccaggaggaggaaggtgtcgagaagccagcggaaactcacctgtcggggaaaattggagctaagaaactgcggaagctggaggagaaacaagcgcgaaaggcccagcgtgaggcagaggaggctgaacgtgaggagcggaaacgactcgagtcccagcgcgaagctgagtggaagaaggaggaggagcggcttcgcctggaggaggagcagaaggaggaggaggagaggaaggcccgcgaggagcaggcccagcgggagcatgaggagtacctgaaactgaaggaggcctttgtggtggaggaggaaggcgtaggagagaccatgactgaggaacagtcccagagcttcctgacagagttcatcaactacatcaagcagtccaaggttgtgctcttggaagacctggcttcccaggtgggcctacgcactcaggacaccataaatcgcatccaggacctgctggctgaggggactataacaggtgtgattgacgaccggggcaagttcatctacataaccccagaggaactggccgccgtggccaacttcatccgacagcggggccgggtgtccatcgccgagcttgcccaagccagcaactccctcatcgcctggggccgggagtcccctgcccaagccccagcctgaccccagtccttccctcttggactcagagttggtgtggcctacctggctatacatcttcatccctccccaccatcctggggaagtgatggtgtggccaggcagttatagattaaaggcctgtgagtactgctg

SEQ ID NO: 367266 - DNA, 1463 bp, Homo sapiens
ttaggctagtcgaggctgggtgttggttctgcactgaggccctcgtcatggtggcgcctgtgtggtacttggtagcggcggctctgctagtcggctttatcctcttcctgactcgcagccggggccgggcggcatcagccggccaagagccactgcacaatgaggagctggcaggagcaggccgggtggcccagcctgggcccctggagcctgaggagccgagagctggaggcaggcctcggcgccggagggacctgggcagccgcctacaggcccagcgtcgagcccagcgggtggcctgggcagaagcagatgagaacgaggaggaagctgtcatcctagcccaggaggaggaaggtgtcgagaagccagcggaaactcacctgtcggggaaaattggagctaagaaactgcggaagctggaggagaaacaagcgcgaaaggcccagcgtgaggcagaggaggctgaacgtgaggagcggaaacgactcgagtcccagcgcgaagctgagtggaagaaggaggaggagcggcttcgcctggaggaggagcagaaggaggaggaggagaggaaggcccgcgaggagcaggcccagcgggagcatgaggagtacctgaaactgaaggaggcctttgtggtggaggaggaaggcgtaggagagaccatgactgaggaacagtcccagagcttcctgacagagttcatcaactacatcaagcagtccaaggttgtgctcttggaagacctggcttcccaggtgggcctacgcactcaggacaccataaatcgcatccaggacctgctggctgaggggactataacaggtgtgattgacgaccggggcaagttcatctacataaccccagaggaactggccgccgtggccaacttcatccgacagcggggccgggtgtccatcgccgagcttgcccaagccagcaactccctcatcgcctggggccgggagtcccctgcccaagccccagcctgaccccagtccttccctcttggactcagagttggtgtggcctacctggctatacatcttcatccctccccaccatcctggggaagtgatggtgtggccaggcagttatagattaaaggcctgtgagtactgctgagcttggtgtggcttggtgtggcagaaggcctggcctaggatcctagataagcaggtgaaatttaggcttcagaatatatccgagaggtggggagggtcccttggaagctggtgaagtcctgttcttattatgaatccattcattcaagaaaatagcctgttgcacatttactctgtttctttgtgccctgcaagccctgcccccaagacctagataagatctttctcttcttttgcccccactcaaattagaagtggggagcctcttgggccacatctctgttaactggggaggggaggtctcatgggtcttttttaactgatcaggagccctaagta

SEQ ID NO: 367267 - DNA, 1460 bp, Homo sapiens
cgcacgacggcagcccgcgcgaggatacgcttgtaagccgggttagttggccgagggtgtggtacttggtagcggcggctctgctagtcggctttatcctcttcctgactcgcagccggggccgggcggcatcagccggccaagagccactgcacaatgaggagctggcaggagcaggccgggtggcccagcctgggcccctggagcctgaggagccgagagctggaggcaggcctcggcgccggagggacctgggcagccgcctacaggcccagcgtcgagcccagcgggtggcctgggcagaagcagatgagaacgaggaggaagctgtcatcctagcccaggaggaggaaggtgtcgagaagccagcggaaactcacctgtcggggaaaattggagctaagaaactgcggaagctggaggagaaacaagcgcgaaaggcccagcgtgaggcagaggaggctgaacgtgaggagcggaaacgactcgagtcccagcgcgaagctgagtggaagaaggaggaggagcggcttcgcctggaggaggagcagaaggaggaggaggagaggaaggcccgcgaggagcaggcccagcgggagcatgaggagtacctgaaactgaaggaggcctttgtggtggaggaggaaggcgtaggagagaccatgactgaggaacagtcccagagcttcctgacagagttcatcaactacatcaagcagtccaaggttgtgctcttggaagacctggcttcccaggtgggcctacgcactcaggacaccataaatcgcatccaggacctgctggctgaggggactataacaggtgtgattgacgaccggggcaagttcatctacataaccccagaggaactggccgccgtggccaacttcatccgacagcggggccgggtgtccatcgccgagcttgcccaagccagcaactccctcatcgcctggggccgggagtcccctgcccaagccccagcctgaccccagtccttccctcttggactcagagttggtgtggcctacctggctatacatcttcatccctccccaccatcctggggaagtgatggtgtggccaggcagttatagattaaaggcctgtgagtactgctgagcttggtgtggcttggtgtggcagaaggcctggcctaggatcctagataagcaggtgaaatttaggcttcagaatatatccgagaggtggggagggtcccttggaagctggtgaagtcctgttcttattatgaatccattcattcaagaaaatagcctgttgcacatttactctgtttctttgtgccctgcaagccctgcccccaagacctagataagatctttctcttcttttgcccccactcaaattagaagtggggagcctcttgggccacatctctgttaactggggaggggaggtctcatgggtcttttttaactgatcaggagccctaagta

SEQ ID NO: 367268 - DNA, 1655 bp, Homo sapiens
tgagatcccggcctcagggtggacgcagtggttctgcactgaggccctcgtcatggtggcgcctgtgtggtacttggtagcggcggctctgctagtcggctttatcctcttcctgactcgcagccggggccgggcggcatcagccggccaagagccactgcacaatgaggagctggcaggagcaggccgggtggcccagcctgggcccctggagcctgaggagccgagagctggaggcaggcctcggcgccggagggacctgggcagccgcctacaggcccagcgtcgagcccagcgggtggcctgggcagaagcagatgagaacgaggaggaagctgtcatcctagcccaggaggaggaaggtgtcgagaagccagcggaaactcacctgtcggggaaaattggagctaagaaactgcggaagctggaggagaaacaagcgcgaaaggcccagcgtgaggcagaggaggctgaacgtgaggagcggaaacgactcgagtcccagcgcgaagctgagtggaagaaggaggaggagcggcttcgcctggaggaggagcagaaggaggaggaggagaggaaggcccgcgaggagcaggcccagcgggagcatgaggagtacctgaaactgaaggaggcctttgtggtggaggaggaaggcgtaggagagaccatgactgaggaacagtcccagagcttcctgacagagttcatcaactacatcaagcagtccaaggttgtgctcttggaagacctggcttcccaggtgggcctacgcactcaggtaagccctggaacgtggcctgctgtgtgcagtgtggccaggggtctgtggctagcagagaggacctgccctaaagatagagtcttgatgcaccgtctaccttgtccccaaccaagagtgagtagtgcacagaagtctcctggcaccctgggaatcctgcatttttaatggacgaacaggcaggaaagaaaaaaaaaacccaaaccccatcactctgccagcccctgtgaccaaagcagcccaaatcagttaccttgacaactctcatgcacagactgcaccagcctgtgttgcaaacatcactgccccgcttctaacaggaagagatactcttttgggggtcttgcagggcccaggaccagagccccttctacccagggcccttccaaaggcaaagcacagagtcacatttgggcgtggcatgagagggaaataaagagatttggctgtagtgggagggaggtttcagtgctttttctggggacattggtgcctatctctattctgagagttgttctcctcataggacaccataaatcgcatccaggacctgctggctgaggggactataacaggtgtgattgacgaccggggcaagttcatctacataaccccagaggaactggccgccgtggccaacttcatccgacagcggggccgggtgtccatcgccgagcttgcccaagccagcaactccctcatcgcctggggccgggagtcccctgcccaagccccagcctgaccccagtccttccctcttggactcagagttggtgtggcctacctggctatacatcttcatccctccccaccatcctggggaagtgatggtgtggccaggcagttatagattaaaggcctgtgagtactgctg

SEQ ID NO: 367269 - DNA, 1080 bp, Homo sapiens
tgagatcccggcctcagggtggacgcagtggttctgcactgaggccctcgtcatggtggcgcctgtgtggtacttggtagcggcggctctgctagtcggctttatcctcttcctgactcgcagccggggccgggcggcatcagccggccaagagccactgcacaatgaggagctggcaggagcaggccgggtggcccagcctgggcccctggagcctgaggagccgagagctggaggcaggcctcggcgccggagggacctgggcagccgcctacaggcccagcgtcgagcccagcgggtggcctgggcagaagcagatgagaacgaggaggaagctgtcatcctagcccaggaggaggaaggtgtcgagaagccagcggaaactcacctgtcggggaaaattggagctaagaaactgcggaagctggaggagaaacaagcgcgaaaggcccagcgtgaggcagaggaggctgaacgtgaggagcggaaacgactcgagtcccagcgcgaagctgagtggaagaaggaggaggagcggcttcgcctggaggaggagcagaaggaggaggaggagaggaaggcccgcgaggagcaggcccagcgggagcatgaggagtacctgaaactgaaggaggcctttgtggtggaggaggaaggcgtaggagagaccatgactgaggaacagtcccagagcttcctgacagagttcatcaactacatcaagcagtccaaggttgtgctcttggaagacctggcttcccaggtgggcctacgcactcaggtgtgattgacgaccggggcaagttcatctacataaccccagaggaactggccgccgtggccaacttcatccgacagcggggccgggtgtccatcgccgagcttgcccaagccagcaactccctcatcgcctggggccgggagtcccctgcccaagccccagcctgaccccagtccttccctcttggactcagagttggtgtggcctacctggctatacatcttcatccctccccaccatcctggggaagtgatggtgtggccaggcagttatagattaaaggcctgtgagtactgctg

SEQ ID NO: 367270 - DNA, 359 bp, Homo sapiens
agtttatctggcctttgatcttagttcctgacaaagaacttcaaacatcctgggaatttcctgagagatagaaattatttgttatgctaatgaggtaactcatgacagactcctagttagcttcaggatgggagatggacaccagaaagaccaaacacacgattagaaggctggaactttgggccagttttacctgcatggaaaagagggctagagactgagctcaattatgtggccaattgcatatccaatcatgcctgtgtaatcatattccacataaaaaatgtgtacactgaaactcagtggagttttctggttggtgaacatactggtgtacagggaggatgatgcactcagat

SEQ ID NO: 367271 - DNA, 198 bp, Homo sapiens
aaattttttctttcttttatttttctttctctttttttctttttctttccttctttcttctttcctttttttcattcgccagatccaatctctgctatgggtccacagtcctttatccaaaacccttgtggcttcaaagttaaatattttcctaattttagaagggaatggagtgcctataatgtatatcaaaccaca

SEQ ID NO: 367272 - DNA, 1507 bp, Homo sapiens
aggagcgcaaaatggcggaaccgccgagccccgtgcactgtgtcgctgccgcggcccccaccgccaccgtctcggagaaagaaccgtttggcaagctgcaactctcctcccgggaccctccgggttctctgtccgccaagaaggtccggactgaggagaagaaggcaccgcggagagtgaacggagaagggggcagcggcgggaacagcaggcagctgcagccgccggcagcaccttcgcctcagagctatggcagccccgcgtcttggagctttgcccctctgtctgctgctccctccccgtcctcttctcggagcagtttctctttctccgctggcacggccgttccctcctcagcctccgcttccttgtctcagccggtgccgcgcaaactgctggtccctcctacgctgctgcacgctcagcctcaccatctcctcctgcccgccgccgccgccgctgcctcggctaacgccaagtcgcgcagacctaaggagaagcgggagaaggagaggaggaggcacggtctcggtggggcccgagaggccggcggggcctcccgggaggagaacggggaggtgaagccgctgccccgagataaaatcaaagacaaaattaaagagagagacaaagaaaaagaaagagaaaaaaagaaacataaagtaatgaatgagatcaagaaagagaatggagaagtaaagattttgctgaaaagtgggaaggagaaaccaaaaacaaatatagaagacttacaaattaaaaaggtaaagaagaaaaagaaaaagaaacacaaagagaatgaaaaacggaagcgtccgaaaatgtatagcaaatctattcagaccatctgctcaggattgctaactgatgttgaagatcaagcagccaaaggcatcctaaatgataacataaaagattacgttgggaagaatttggataccaagaactatgattccaaaattccagagaacagtgagtttccatttgtctcattaaaggagccacgagttcagaataacctcaaaaggttggacactttggaatttaaacaactcattcatatagagcaccagcctaatggaggtgcatcggttatccatgcctacagtaacgaactctcccacctgtctcctatggagatggagaggtttgcagaagagtttgtgggtctagtgttcagtgaaaatgaaaactctgcagctttctacgtgatgggtattgttcatggggcagctacttatttacctgactttttagactatttttcatttaattttcccaattcaccagtgaaaatggagatattgggaaagaaagatatagagacaacgactatgtccaattttcatgctcagagtctcactgtactccagcctggacgacagagtgagactccatctcaaaaaaaaagaaagaaattcatgataatgctatcctctaggtgggaaggagaaaccaaaaacaaatatagaagacttacaaattaaaaaggtaaacaaaaaaataa

SEQ ID NO: 367273 - DNA, 1387 bp, Homo sapiens
aactgtgagcatttgctatatgtcagaatggtagcacacactgtagatgtaactttgctctatgcccgtctgtctgtctgtctgtctctctctttctctctctctctctgtctctctctcgctgtgtacatgaagagactggctggctgggtgtggtggctcacgcctgtaatcccagcacttcgggaggccgaagcgggcagatcacgaggtcaggagtttgagaccagcctggccaacatggtgaaaccttgtctcttctaaaaacacaagaattagctgggcatggtgacgcgctcctgtaatcccagctacttgggagactgaggcaggagaattgcttgaacccaggaggtggagtttgcagtgagacaggattgtggcactggattccagcctgggcgacagagcaagactctgtctcaaaaaaggctgactaaatattgattatcaattctgtaaaaaatgagtcctaaatatataattctgagtaaattttcagaagtaaacttcttacttagacaaaactgttcctaaagcatggtttttaaagtaattaaaatatggagtttcaaaaaacattttttccaacaggtgggaaggagaaaccaaaaacaaatatagaagacttacaaattaaaaaggtaaagaagaaaaagaaaaagaaacacaaagagaatgaaaaacggaagcgtccgaaaatgtatagcaaatctattcagaccatctgctcaggattgctaactgatgttgaagatcaagcagccaaaggcatcctaaatgataacataaaagattacgttgggaagaatttggataccaagaactatgattccaaaattccagagaacagtgagtttccatttgtctcattaaaggagccacgagttcagaataacctcaaaaggttggacactttggaatttaaacaactcattcatatagagcaccagcctaatggaggtgcatcggttatccatgcctacagtaacgaactctcccacctgtctcctatggagatggagaggtttgcagaagagtttgtgggtctagtgttcagtgaaaatgaaaactctgcagctttctacgtgatgggtattgttcatggggcagctacttatttacctgactttttagactatttttcatttaattttcccaattcaccagtgaaaatggagatattgggaaagaaagatatagagacaacgactatgtccaattttcatgctcagagtctcactgtactccagcctggacgacagagtgagactccatctcaaaaaaaaagaaagaaattcatgataatgctatcctctaggtgggaaggagaaaccaaaaacaaatatagaagacttacaaattaaaaaggtaaacaaaaaaataa

SEQ ID NO: 367274 - DNA, 1423 bp, Homo sapiens
aggagcgcaaaatggcggaaccgccgagccccgtgcactgtgtcgctgccgcggcccccaccgccaccgtctcggagaaagaaccgtttggcaagctgcaactctcctcccgggaccctccgggttctctgtccgccaagaaggtccggactgaggagaagaaggcaccgcggagagtgaacggagaagggggcagcggcgggaacagcaggcagctgcagccgccggcagcaccttcgcctcagagctatggcagggccgttccctcctcagcctccgcttccttgtctcagccggtgccgcgcaaactgctggtccctcctacgctgctgcacgctcagcctcaccatctcctcctgcccgccgccgccgccgctgcctcggctaacgccaagtcgcgcagacctaaggagaagcgggagaaggagaggaggaggcacggtctcggtggggcccgagaggccggcggggcctcccgggaggagaacggggaggtgaagccgctgccccgagataaaatcaaagacaaaattaaagagagagacaaagaaaaagaaagagaaaaaaagaaacataaagtaatgaatgagatcaagaaagagaatggagaagtaaagattttgctgaaaagtgggaaggagaaaccaaaaacaaatatagaagacttacaaattaaaaaggtaaagaagaaaaagaaaaagaaacacaaagagaatgaaaaacggaagcgtccgaaaatgtatagcaaatctattcagaccatctgctcaggattgctaactgatgttgaagatcaagcagccaaaggcatcctaaatgataacataaaagattacgttgggaagaatttggataccaagaactatgattccaaaattccagagaacagtgagtttccatttgtctcattaaaggagccacgagttcagaataacctcaaaaggttggacactttggaatttaaacaactcattcatatagagcaccagcctaatggaggtgcatcggttatccatgcctacagtaacgaactctcccacctgtctcctatggagatggagaggtttgcagaagagtttgtgggtctagtgttcagtgaaaatgaaaactctgcagctttctacgtgatgggtattgttcatggggcagctacttatttacctgactttttagactatttttcatttaattttcccaattcaccagtgaaaatggagatattgggaaagaaagatatagagacaacgactatgtccaattttcatgctcagagtctcactgtactccagcctggacgacagagtgagactccatctcaaaaaaaaagaaagaaattcatgataatgctatcctctaggtgggaaggagaaaccaaaaacaaatatagaagacttacaaattaaaaaggtaaacaaaaaaataa

SEQ ID NO: 367275 - DNA, 880 bp, Homo sapiens
taggatcccctccgccccaggacaaggttttgaacgacagactacagctgctgttggtgtgctgaaggctgtgcactgtggagagtggtgggaaggagaaaccaaaaacaaatatagaagacttacaaattaaaaaggtaaagaagaaaaagaaaaagaaacacaaagagaatgaaaaacggaagcgtccgaaaatgtatagcaaatctattcagaccatctgctcaggattgctaactgatgttgaagatcaagcagccaaaggcatcctaaatgataacataaaagattacgttgggaagaatttggataccaagaactatgattccaaaattccagagaacagtgagtttccatttgtctcattaaaggagccacgagttcagaataacctcaaaaggttggacactttggaatttaaacaactcattcatatagagcaccagcctaatggaggtgcatcggttatccatgcctacagtaacgaactctcccacctgtctcctatggagatggagaggtttgcagaagagtttgtgggtctagtgttcagtgaaaatgaaaactctgcagctttctacgtgatgggtattgttcatggggcagctacttatttacctgactttttagactatttttcatttaattttcccaattcaccagtgaaaatggagatattgggaaagaaagatatagagacaacgactatgtccaattttcatgctcagagtctcactgtactccagcctggacgacagagtgagactccatctcaaaaaaaaagaaagaaattcatgataatgctatcctctaggtgggaaggagaaaccaaaaacaaatatagaagacttacaaattaaaaaggtaaacaaaaaaataa

SEQ ID NO: 367276 - DNA, 464 bp, Homo sapiens
gttagtataataaatgtaaatgggttaaacttgccaatcaaaaaatagagactttcatatacaaaaacctacacatggacatattacagtgaaatctgaaaaaaaaaaatctctaaaagataccagagagaagcagaccacctacaaagaaacaagggtcaagctgacatcagatttttcatagcaatgctagaagtgagaagaatgtaatatctttaaagagttataggcaaagtactctaaactgtaggggtaggagtagagatactaaagagacatagcagtgtgaaaaagtatttagcttgtttaggggaaaagtagacactgataagcataagcatcaataggaataagcaggtataaaattggtcttaatggcacccaccataagaccaaaatagaatgtataactttttgactgctcgggaatactctgtttgtccaagggaaacaagtgaagagga

SEQ ID NO: 367277 - DNA, 237 bp, Homo sapiens
cacacactgcacgtggccttctgtgtctggcgtctctcactgggcgtgacgtccccaaggtgcatcggcactgtggcctgggtcggagcctgactccttttcatggctgaatactattccacgggttgggtgggccatggtgggtttatcccttcttccatctgtagacagttgggctgtttctaccctttggctgcagtgagtagcatgctggggaatttgtgtgcaagtatttgt

SEQ ID NO: 367278 - DNA, 360 bp, Homo sapiens
ctaattccttcccatgaaaaccacattttagtagcagcctagttgaattaaaggcatctcatggcttaatttaaagagaaaataaggtttgccacagtaattaaccaaaaaagagacaagatgtcttagaagagagattcaaattatcccaatgctgaagttaataggaatgcttttttgcttttctccctagaggctatgtcgatctggcaaattagtaatgtgcctcagctcattggtattctatgccaagaacttgtgctgcaagataaaagaatgtgactgtagtaaaccctacaataatgactttccctgagcttctctagggcgtttctggtttattcacccttccctttctca

SEQ ID NO: 367279 - DNA, 368 bp, Homo sapiens
gttctccttgccctttgctcagccttctcacattaaagaattttttaaaaagtttaaactagtatatttttattgtcctggtttatattacatttaacattataaaacacctaaaatccttttaggaaataggtgggatataaatgctaaatagctacacaggttaagtaaataaataaataaatctatgtggtactacttactattttaaataggtcagtgagtccctagagagtggcacctctccagcagaatcctttcacttcagtcaagccaccttcagattccttttccctgcctgctattcaagaacagatttttcacatgctatttaagatacttctgaaaggatcttcctcaaatcctac

SEQ ID NO: 367280 - DNA, 786 bp, Homo sapiens
ctccctgtccccatctgaggtctggcagctcttagtcatgtcttggagggaggacgggcatccagggctgaccggtcaacgtccagcacctcccagggactatgggaagactgagtggtgggtctcgtcctctcgggatacttgcgcttctcttactggtgattgtgtgccccctgttgtgtgccttcctggacctctctgagggaggaaagggcagggcctgaaacgttctcccggccacagcctccctgttatccctcccctctgcttccttcgccaggccaaggcgaacctagacaagaataagcagacgctggagaaagagaacgcagacctggccggggagctgcgggtcctgggccaggccaagcaggaggtggaacataagaagaagaagctggaggcgcaggtgcaggagctgcagtccaagtgcagcgatggggagcgggcccgggcggagctcaatgacaaagtccacaagctgcaggtgaggaggtggcgcggtggtgtggtgggcagtgctgggtggtgcccagttctgtggggaggagcctcttcccggctcgctgaggtctctcttgctgcaaggcaagtcctttcctctagttgcgttcctggaggagaggcgatgatctccctgttcaattaaatattaaaaaaaccttctggccaggcacggtggctcatgcctgtaatcccagcactttgggagacagaggtgggtggatcacctgaggtcaggggtttgagaccagtctggccaacatggtgaaaagtctctactaa

SEQ ID NO: 367281 - DNA, 456 bp, Homo sapiens
gtcgactctgaggatccctttggtaggatgaggccacggagagcaacgaggccatgggccgcgaggtgaacgcactcaagagcaagctcagagggccccccccacaggaaacttcgcagtgatgcaccaggcgaggaaacgagacctctttcgttccttctagaaggtctggaggacgtagagttattgaaaatgcagatggttctgaggaggaaacggacactcgagacgcagacttcaatggaaccaaggccagtgaataagcaactttctacagttttgcaccacggcaagaaaaccaaaaaccaaaacaaacaaacaaaaaaaacccaacaacaacccagaacaaagcaaaacccagcagactgtacttagcattgtctaaatccattctcaaattccaaatatcacagacacccctcatcctaccaaaggggagtcctctagagtgacctc

SEQ ID NO: 367282 - DNA, 419 bp, Homo sapiens
cgatctctagcaggatcccctttggtaggatgaggccacggagagcaacgaggccatgggccgcgaggtgaacgcactcaagagcaagctcaggcgaggaaacgagacctctttcgttccttctagaaggtctggaggacgtagagttattgaaaatgcagatggttctgaggaggaaacggacactcgagacgcagacttcaatggaaccaaggccagtgaataagcaactttctacagttttgcaccacggcaagaaaaccaaaaaccaaaacaaacaaacaaaaaaaacccaacaacaacccagaacaaagcaaaacccagcagactgtacttagcattgtctaaatccattctcaaattccaaatatcacagacacccctcatcctaccaaaggggagtcctctagagtgacctc

SEQ ID NO: 367283 - DNA, 6886 bp, Homo sapiens
cgcagggagatttggacgctccggcctgggaggtgcgtcagatccgagctcgccatccagtttcctctccactagtccccccagttggagatctgggaccaacaaggcaccatggcgcagaagggccaactcagtgacgatgagaagttcctctttgtggacaaaaacttcatcaacagcccagtggcccaggctgactgggccgccaagagactcgtctgggtcccctcggagaagcagggcttcgaggcagccagcattaaggaggagaagggggatgaggtggttgtggagctggtggagaatggcaagaaggtcacggttgggaaagatgacatccagaagatgaacccacccaagttctccaaggtggaggacatggcggagctgacgtgcctcaacgaagcctccgtgctacacaacctgagggagcggtacttctcagggctaatatatacgtactctggcctcttctgcgtggtggtcaacccctataaacacctgcccatctactcggagaagatcgtcgacatgtacaagggcaagaagaggcacgagatgccgcctcacatctacgccatcgcagacacggcctaccggagcatgcttcaagatcgggaggaccagtccattctatgcacaggcgagtctggagccgggaaaaccgaaaacaccaagaaggtcattcagtacctggccgtggtggcctcctcccacaagggcaagaaagacacaagtatcacgggagagctggaaaagcagcttctacaagcaaacccgattctggaggctttcggcaacgccaaaacagtgaagaacgacaactcctcacgattcggcaaattcatccgcatcaacttcgacgtcacgggttacatcgtgggagccaacattgagacctatctgctagaaaaatcacgggcaattcgccaagccagagacgagaggacattccacatcttttactacatgattgctggagccaaggagaagatgagaagtgacttgcttttggagggcttcaacaactacaccttcctctccaatggctttgtgcccatcccagcagcccaggatgatgagatgttccaggaaaccgtggaggccatggcaatcatgggtttcagcgaggaggagcagctatccatattgaaggtggtatcatcggtcctgcagcttggaaatatcgtcttcaagaaggaaagaaacacagaccaggcgtccatgccagataacacagctgctcagaaagtttgccacctcatgggaattaatgtgacagatttcaccagatccatcctcactcctcgtatcaaggttgggcgagatgtggtacagaaagctcagacaaaagaacaggctgactttgctgtagaggctttggccaaggcaacatatgagcgccttttccgctggatactcacccgcgtgaacaaagccctggacaagacccatcggcaaggggcttccttcctggggatcctggatatagctggatttgagatctttgaggtgaactccttcgagcagctgtgcatcaactacaccaacgagaagctgcagcagctcttcaaccacaccatgttcatcctggagcaggaggagtaccagcgcgagggcatcgagtggaacttcatcgactttgggctggacctacagccctgcatcgagctcatcgagcgaccgaacaaccctccaggtgtgctggccctgctggacgaggaatgctggttccccaaagccacggacaagtctttcgtggagaagctgtgcacggagcagggcagccaccccaagttccagaagcccaagcagctcaaggacaagactgagttctccatcatccattatgctgggaaggtggactataatgcgagtgcctggctgaccaagaatatggacccgctgaatgacaacgtgacttccctgctcaatgcctcctccgacaagtttgtggccgacctgtggaaggacgtggaccgcatcgtgggcctggaccagatggccaagatgacggagagctcgctgcccagcgcctccaagaccaagaagggcatgttccgcacagtggggcagctgtacaaggagcagctgggcaagctgatgaccacgctacgcaacaccacgcccaacttcgtgcgctgcatcatccccaaccacgagaagaggtccggcaagctggatgcgttcctggtgctggagcagctgcggtgcaatggggtgctggaaggcattcgcatctgccggcagggcttccccaaccggatcgtcttccaggagttccgccaacgctacgagatcctggcggcgaatgccatccccaaaggcttcatggacgggaagcaggcctgcattctcatgatcaaagccctggaacttgaccccaacttatacaggatagggcagagcaaaatcttcttccgaactggcgtcctggcccacctagaggaggagcgagatttgaagatcaccgatgtcatcatggccttccaggcgatgtgtcgtggctacttggccagaaaggcttttgccaagaggcagcagcagctgaccgccatgaaggtgattcagaggaactgcgccgcctacctcaagctgcggaactggcagtggtggaggcttttcaccaaagtgaagccactgctgcaggtgacacggcaggaggaggagatgcaggccaaggaggatgaactgcagaagaccaaggagcggcagcagaaggcagagaatgagcttaaggagctggaacagaagcactcgcagctgaccgaggagaagaacctgctacaggaacagctgcaggcagagacagagctgtatgcagaggctgaggagatgcgggtgcggctggcggccaagaagcaggagctggaggagatactgcatgagatggaggcccgcctggaggaggaggaagacaggggccagcagctacaggctgaaaggaagaagatggcccagcagatgctggaccttgaagaacagctggaggaggaggaagctgccaggcagaagctgcaacttgagaaggtcacggctgaggccaagatcaagaaactggaggatgagatcctggtcatggatgatcagaacaataaactatcaaaagaacgaaaactccttgaggagaggattagtgacttaacgacaaatcttgcagaagaggaagaaaaggccaagaatcttaccaagctgaaaaacaagcatgaatctatgatttcagaactggaagtgcggctaaagaaggaagagaagagccgacaggagctggagaagctgaaacggaagctggagggtgatgccagcgacttccacgagcagatcgctgacctccaggcgcagatcgcagagctcaagatgcagctggccaagaaggaggaggagctgcaggcggccctggccaggcttgacgatgaaatcgctcagaagaacaatgccctgaagaagatccgggagctggagggccacatctcagacctccaggaggacctggactcagagcgggccgccaggaacaaggctgaaaagcagaagcgagacctcggcgaggagctggaggccctaaagacagagctggaagacacactggacagcacagccactcagcaggagctcagggccaagagggagcaggaggtgacggtgctgaagaaggccctggatgaagagacgcggtcccatgaggctcaggtccaggagatgaggcagaaacacgcacaggcggtggaggagctcacagagcagcttgagcagttcaagagggccaaggcgaacctagacaagaataagcagacgctggagaaagagaacgcagacctggccggggagctgcgggtcctgggccaggccaagcaggaggtggaacataagaagaagaagctggaggcgcaggtgcaggagctgcagtccaagtgcagcgatggggagcgggcccgggcggagctcaatgacaaagtccacaagctgcagaatgaagttgagagcgtcacagggatgcttaacgaggccgaggggaaggccattaagctggccaaggacgtggcgtccctcagttcccagctccaggacacccaggagctgcttcaagaagaaacccggcagaagctcaacgtgtctacgaagctgcgccagctggaggaggagcggaacagcctgcaagaccagctggacgaggagatggaggccaagcagaacctggagcgccacatctccactctcaacatccagctctccgactcgaagaagaagctgcaggactttgccagcaccgtggaagctctggaagaggggaagaagaggttccagaaggagatcgagaacctcacccagcagtacgaggagaaggcggccgcttatgataaactggaaaagaccaagaacaggcttcagcaggagctggacgacctggttgttgatttggacaaccagcggcaactcgtgtccaacctggaaaagaagcagaggaaatttgatcagttgttagccgaggagaaaaacatctcttccaaatacgcggatgagagggacagagctgaggcagaagccagggagaaggaaaccaaggccctgtccctggctcgggcccttgaagaggccttggaagccaaagaggaactcgagcggaccaacaaaatgctcaaagccgaaatggaagacctggtcagctccaaggatgacgtgggcaagaacgtccatgagctggagaagtccaagcgggccctggagacccagatggaggagatgaagacgcagctggaagagctggaggacgagctgcaagccacggaggacgccaaactgcggctggaagtcaacatgcaggcgctcaagggccagttcgaaagggatctccaagcccgggacgagcagaatgaggagaagaggaggcaactgcagagacagcttcacgagtatgagacggaactggaagacgagcgaaagcaacgtgccctggcagctgcagcaaagaagaagctggaaggggacctgaaagacctggagcttcaggccgactctgccatcaaggggagggaggaagccatcaagcagctacgcaaactgcaggctcagatgaaggactttcaaagagagctggaagatgcccgtgcctccagagatgagatctttgccacagccaaagagaatgagaagaaagccaagagcttggaagcagacctcatgcagctacaagaggacctcgccgccgctgagagggctcgcaaacaagcggacctcgagaaggaggaactggcagaggagctggccagtagcctgtcgggaaggaacgcactccaggacgagaagcgccgcctggaggcccggatcgcccagctggaggaggagctggaggaggagcagggcaacatggaggccatgagcgaccgggtccgcaaagccacacagcaggccgagcagctcagcaacgagctggccacagagcgcagcacggcccagaagaatgagagtgcccggcagcagctcgagcggcagaacaaggagctccggagcaagctccacgagatggagggggccgtcaagtccaagttcaagtccaccatcgcggcgctggaggccaagattgcacagctggaggagcaggtcgagcaggaggccagagagaaacaggcggccaccaagtcgctgaagcagaaagacaagaagctgaaggaaatcttgctgcaggtggaggacgagcgcaagatggccgagcagtacaaggagcaggcagagaaaggcaatgccagggtcaagcagctcaagaggcagctggaggaggcagaggaggagtcccagcgcatcaacgccaaccgcaggaagctgcagcgggagctggatgaggccacggagagcaacgaggccatgggccgcgaggtgaacgcactcaagagcaagctcaggcgaggaaacgagacctctttcgttccttctagaaggtctggaggacgtagagttattgaaaatgcagatggttctgaggaggaaacggacactcgagacgcagacttcaatggaaccaaggccagtgaataagcaactttctacagttttgcaccacggcaagaaaaccaaaaaccaaaacaaacaaacaaaaaaaacccaacaacaacccagaacaaagcaaaacccagcagactgtacttagcattgtctaaatccattctcaaattccaaatatcacagacacccctcacacaaggaatataaaaaccaccaccctccagcctgggcaacgtagtaaaacctcatctatacaagaatttaaaaataagctgggcgtggtggtacacacctgtggtcccagctactagggaggctgagccaggaagaacgctccagcccaggacttcgaggctgcaatgagctataattgcatcattgcactccagcctgggcaacagagaccctgtctcaaccaccaccaccaccaccacccctactacccctgtattcaaggtaaaaattgaagtttgtatgatgtaagagatgagaaaaacccaacaggaaacacagacacatcctccagttctatcaatggattgtgcagacactgagtttttagaaaaacatatccacggtaaccggtccctggcaattctgtttacatgaaatggggagaaagtcaccgaaatgggtgccgccggcccccactcccaattcattccctaacctgcaaacctttccaacttctcacgtcaggcctttgagaattctttccccctctcctggtttccacacctcagacacgcacagttcaccaagtgccttctgtagtcacatgaattgaaaaggagacgctgctcccacggaggggagcaggaatgctgcactgtttacaccctgactgtgcttaaaaacactttcactaataaatggttataaatcacaa

SEQ ID NO: 367284 - DNA, 479 bp, Homo sapiens
  misc_feature (12)..(12): n is a, c, g, or t
tccccgctggcnttttgaggaggaaacggacactcgagacgcagacttcaatggaaccaaggccagtgaataagcaactttctacagttttgcaccacggcaagaaaaccaaaaaccaaaacaaacaaacaaaaaaaacccaacaacaacccagaacaaagcaaaacccagcagactgtacttagcattgtctaaatccattctcaaaaccccggaggacgtagagttattgaaaatgcagatggttctgaggaggaaacggacactcgagacgcagacttcaatggaaccaaggccagtgaataagcaactttctacagttttgcaccacggcaagaaaaccaaaaaccaaaacaaacaaacaaaaaaaacccaacaacaacccagaacaaagcaaaacccagcagactgtacttagcattgtctaaatccattctcaaaaccccagcgctcaaaaccccagcgggggatcctttaga

SEQ ID NO: 367285 - DNA, 538 bp, Homo sapiens
caacaacttcgtccattcggacctgagacaccatatgatgtagtttggttactcggcgtgtgcatgcacacgccgaaaccccaaacacttcttcaggtctgcacacgccgagtatccaaacaaggaatataaaaaccaccaccctccagcctgggcaacgtagtaaaacctcatctatacaagaatttaaaaataagctgggcgtggtggtacacacctgtggtcccagctactagggaggctgagccaggaagaacgctccagcccaggacttcgaggctgcaatgagctataattgcatcattgcactccagcctgggcaacagagaccctgtctcaaccaccaccaccaccaccacccctactacccctgtattcaaggtaaaaattgaagtttgtatgatgtaagagatgagaaaaacccaacaggaaacacagacacatcctccagttctatcaatggattgtgcagacactgagtttttagaaaaacatatccacggtctgggcgctcggcgtgtgcagggatcctctagat

SEQ ID NO: 367286 - DNA, 181 bp, Homo sapiens
acgaggggtttccacacctcagacacgcacagaaggcacttggtgaactgtgcgtgtctgaggtcacatgaattgaaaaggagacgctgctcccacggaggggagcaggaatgctgcactgtttacaccctgactgtgcttaaaaacactttcactaataaatggttataaatcaaaaaaa

SEQ ID NO: 367287 - DNA, 4242 bp, Homo sapiens
cgcagggagatttggacgctccggcctgggaggtgcgtcagatccgagctcgccatccagtttcctctccactagtccccccagttggagatctgggaccaacaaggcaccatggcgcagaagggccaactcagtgacgatgagaagttcctctttgtggacaaaaacttcatcaacagcccagtggcccaggctgactgggccgccaagagactcgtctgggtcccctcggagaagcagggcttcgaggcagccagcattaaggaggagaagggggatgaggtggttgtggagctggtggagaatggcaagaaggtcacggttgggaaagatgacatccagaagatgaacccacccaagttctccaaggtggaggacatggcggagctgacgtgcctcaacgaagcctccgtgctacacaacctgagggagcggtacttctcagggctaatatatacgtactctggcctcttctgcgtggtggtcaacccctataaacacctgcccatctactcggagaagatcgtcgacatgtacaagggcaagaagaggcacgagatgccgcctcacatctacgccatcgcagacacggcctaccggagcatgcttcaagatcgggaggaccagtccattctatgcacaggcgagtctggagccgggaaaaccgaaaacaccaagaaggtcattcagtacctggccgtggtggcctcctcccacaagggcaagaaagacacaagtatcacgggagagctggaaaagcagcttctacaagcaaacccgattctggaggctttcggcaacgccaaaacagtgaagaacgacaactcctcacgattcggcaaattcatccgcatcaacttcgacgtcacgggttacatcgtgggagccaacattgagacctatctgctagaaaaatcacgggcaattcgccaagccagagacgagaggacattccacatcttttactacatgattgctggagccaaggagaagatgagaagtgacttgcttttggagggcttcaacaactacaccttcctctccaatggctttgtgcccatcccagcagcccaggatgatgagatgttccaggaaaccgtggaggccatggcaatcatgggtttcagcgaggaggagcagctatccatattgaaggtggtatcatcggtcctgcagcttggaaatatcgtcttcaagaaggaaagaaacacagaccaggcgtccatgccagataacacagctgctcagaaagtttgccacctcatgggaattaatgtgacagatttcaccagatccatcctcactcctcgtatcaaggttgggcgagatgtggtacagaaagctcagacaaaagaacaggctgactttgctgtagaggctttggccaaggcaacatatgagcgccttttccgctggatactcacccgcgtgaacaaagccctggacaagacccatcggcaaggggcttccttcctggggatcctggatatagctggatttgagatctttgaggtgaactccttcgagcagctgtgcatcaactacaccaacgagaagctgcagcagctcttcaaccacaccatgttcatcctggagcaggaggagtaccagcgcgagggcatcgagtggaacttcatcgactttgggctggacctacagccctgcatcgagctcatcgagcgaccgaacaaccctccaggtgtgctggccctgctggacgaggaatgctggttccccaaagccacggacaagtctttcgtggagaagctgtgcacggagcagggcagccaccccaagttccagaagcccaagcagctcaaggacaagactgagttctccatcatccattatgctgggaaggtggactataatgcgagtgcctggctgaccaagaatatggacccgctgaatgacaacgtgacttccctgctcaatgcctcctccgacaagtttgtggccgacctgtggaaggacgtggaccgcatcgtgggcctggaccagatggccaagatgacggagagctcgctgcccagcgcctccaagaccaagaagggcatgttccgcacagtggggcagctgtacaaggagcagctgggcaagctgatgaccacgctacgcaacaccacgcccaacttcgtgcgctgcatcatccccaaccacgagaagaggtccggcaagctggatgcgttcctggtgctggagcagctgcggtgcaatggggtgctggaaggcattcgcatctgccggcagggcttccccaaccggatcgtcttccaggagttccgccaacgctacgagatcctggcggcgaatgccatccccaaaggcttcatggacgggaagcaggcctgcattctcatgatcaaagccctggaacttgaccccaacttatacaggatagggcagagcaaaatcttcttccgaactggcgtcctggcccacctagaggaggagcgagatttgaagatcaccgatgtcatcatggccttccaggcgatgtgtcgtggctacttggccagaaaggcttttgccaagaggcagcagcagctgaccgccatgaaggtgattcagaggaactgcgccgcctacctcaagctgcggaactggcagtggtggaggcttttcaccaaagtgaagccactgctgcaggtgacacggcaggaggaggagatgcaggccaaggaggatgaactgcagaagaccaaggagcggcagcagaaggcagagaatgagcttaaggagctggaacagaagcactcgcagctgaccgaggagaagaacctgctacaggaacagctgcaggcagagacagagctgtatgcagaggctgaggagatgcgggtgcggctggcggccaagaagcaggagctggaggagatactgcatgagatggaggcccgcctggaggaggaggaagacaggggccagcagctacaggctgaaaggaagaagatggcccagcagatgctggaccttgaagaacagctggaggaggaggaagctgccaggcagaagctgcaacttgagaaggtcacggctgaggccaagatcaagaaactggaggatgagatcctggtcatggatgatcagaacaataaactatcaaaagaacgaaaactccttgaggagaggattagtgacttaacgacaaatcttgcagaagaggaagaaaaggccaagaatcttaccaagctgaaaaacaagcatgaatctatgatttcagaactggaagtgcggctaaagaaggaagagaagagccgacaggagctggagaagctgaaacggaagctggagggtgatgccagcgacttccacgagcagatcgctgacctccaggcgcagatcgcagagctcaagatgcagctggccaagaaggaggaggagctgcaggcggccctggccaggcttgacgatgaaatcgctcagaagaacaatgccctgaagaagatccgggagctggagggccacatctcagacctccaggaggacctggactcagagcgggccgccaggaacaaggctgaaaagcagaagcgagacctcggcgaggagctggaggccctaaagacagagctggaagacacactggacagcacagccactcagcaggagctcagggccaagagggagcaggaggtgacggtgctgaagaaggccctggatgaagagacgcggtcccatgaggctcaggtccaggagatgaggcagaaacacgcacaggcggtggaggagctcacagagcagcttgagcagttcaagagggccaaggcgaacctagacaagaataagcagacgctggagaaagagaacgcagacctggccggggagctgcgggtcctgggccaggccaagcaggaggtggaacataagaagaagaagctggaggcgcaggtgcagacactgagtttttagaaaaacatatccacggtaaccggtccctggcaattctgtttacatgaaatggggagaaagtcaccgaaatgggtgccgccggcccccactcccaattcattccctaacctgcaaacctttccaacttctcacgtcaggcctttgagaattctttccccctctcctggtttccacacctcagacacgcacagttcaccaagtgccttctgtagtcacatgaattgaaaaggagacgctgctcccacggaggggagcaggaatgctgcactgtttacaccctgactgtgcttaaaaacactttcactaataaatggttataaatcaaaaaaa

SEQ ID NO: 367288 - DNA, 839 bp, Homo sapiens
  misc_feature (99)..(99): n is a, c, g, or t
  misc_feature (141)..(141): n is a, c, g, or t
cggaggatatccaggcagaagctgcaacttgagaaggtcacggctgaggccaagatcaagaaactggaggatgagatcctggtcatggatgatcagaanaataaactatcaaaagaacgaaaactccttgaggagaggatnagtgacttaagcgacaaatcttgcagaagaggaataacagggcaagaatcttaccaaagccacggacaagtctttcgtggagaagctgtgcacggagcagggcagccaccccaagttccagaagcccaagcagctcaaggacaagactgagttctccatcatccattatgctgggaaggtggactataatgcgagtgcctggctgaccaagaatatggacccgctgaatgacaacgtgacttccctgctcaatgcctcctccgacaagtttgtggccgacctgtggaaggacgtggaccgcatcgtgggcctggaccagatggccaaggtgggcagatcacgaggtcagaagtttgagaccagcctggccaatatggtgaaaccccatctctactaagaattagccgggcatggtggcacgcacctgtaatcccagctactcaggagggtgaggcagaagaatcacttgaacccggaggactgaggttgcagtgagtcgagatcatgccactgcactccagcctggacaagaacaagactccgtctcaaaataaataaataaataaataataaataacacactttggaaacaaaaataagtcaagttaataaactgttatccaacatgggataaaatatatgaatcacaggcccctgagacttcagcggcacagatcatctgcatttaatcctacaca

SEQ ID NO: 367289 - DNA, 351 bp, Homo sapiens
  misc_feature (42)..(42): n is a, c, g, or t
  misc_feature (45)..(45): n is a, c, g, or t
tcccccccccggccccccccccggctccggccagccactacngcntactactactactaaattcgcggccgcgtcgacacagagctgtatgcagaggctgaggagatgcgggtgcggctggcggccaagaagcaggagctggaggagatactgcatgagatggaggcccgcctggaggaggaggaagacaggggccagcagctacaggctgaaaggaagaagatggcccagcagatgctggaccttgaagaacagctggaggaggaggaagctgccaggcagaagctgcaacttgagaagtccagggcagaggaccaacgtcgacgcggccgcgaatttagtagtagtaga

SEQ ID NO: 367290 - DNA, 504 bp, Homo sapiens
ttatttaagagccaacattaatatttaagcaaaattttgcagttcacagacatcctttcaattctattactttgtgtatttgtttgccagtcattacagatgtcctaggcaggtgatatgctccacattttgcagctgaggaaattttaggtccagagatgttaggtgaatgacccaaggtcacacagctagagaggggtggtgatgaggactgcagctctgggtcctggaagagctctcattcttttgcacggcactgagatgaccctctgtctccacccaactgccattcactgtgttcctcccaccaagggccaagagggagcaggaggtgacggtgctgaagaaggccctggatgaagagacgcggtcccatgaggctcaggtccaggagatgaggcagaaacacgcacaggcggtggaggagctcacagagcagcttgagcagttcaagagggtaatgctttttggtgatgctttttggtgatgacacataagagtgac

SEQ ID NO: 367291 - DNA, 495 bp, Homo sapiens
ggtacccttctctcgggccctgaagagctggaggacgagctgcaagccacggttgacgccaaactgcggctggaagtcaacatgcaggcgctcaagggccaattcgaaagggatctccaagcccgggacgagcagaatgaggagaagaggaggcaactgcagagacagcttcacgagtatgcagcttcacgagtatgagacggaactggaagacgagcgaaagcaacgtgccctggcagctgcagcaaagaagaagctggaaggggacctgaaagacctggagcttcaggccgactctgccatcaaggggagggaggaagccatcaagcagctacgcaaactgcaggctcagatgaaggaccttaaaatgggagtaatgggctgggcatagtgcctgccacctgtaatcccagcactttgggagaccaaggcaggaggatcacttgaggccaggagttcaagaccagcctgggcaacatagtgagaccctcctat

SEQ ID NO: 367292 - DNA, 562 bp, Homo sapiens
  misc_feature (1)..(2): n is a, c, g, or t
nngagtaggaaacggacactcgagacgcagacttcaatggaaccaaggccagtgaataagcaacttactacagttttgcaccacggcaagaaaaccaaaaaccaaaacatacaaacaaaaaaaacccaacaacaacccagaacaaagcaaaacccagcagactgtacttagcattgtctaaatccattctcaaattccaaatatcacatcagagggccccccccacaggaaacttcgcagtgatgcaccaggcgaggaaacgagacctctttcgttccttctagaaggtctggaggacgtagagttattgaaaatgcagatggttctgaggaggaaacggacactcgagacgcagacttcaatggaaccaaggccagtgaataagcaactttctacagttttgcaccacggcaagaaaaccaaaaaccaaaacaaacaaacaaaaaaaacccaacaacaacccagaacaaagcaaaacccagcagactgtacttagcattgtctaaatccattctcaaaaccccaccccagcgctcaaaaccccagcgggggatcctttaga

SEQ ID NO: 367293 - DNA, 4842 bp, Homo sapiens
  misc_feature (42)..(42): n is a, c, g, or t
  misc_feature (45)..(45): n is a, c, g, or t
tcccccccccggccccccccccggctccggccagccactacngcntactactactactaaattcgcggccgcgtcgacccacgcccaacttcgtgcgctgcatcatccccaaccacgagaagaggtccggcaagctggatgcgttcctggtgctggagcagctgcggtgcaatggggtgctggaaggcattcgcatctgccggcagggcttccccaaccggatcgtcttccaggagttccgccaacgctacgagatcctggcggcgaatgccatccccaaaggcttcatggacgggaagcaggcctgcattctcatgatcaaagccctggaacttgaccccaacttatacaggatagggcagagcaaaatcttcttccgaactggcgtcctggcccacctagaggaggagcgagatttgaagatcaccgatgtcatcatggccttccaggcgatgtgtcgtggctacttggccagaaaggcttttgccaagaggcagcagcagctgaccgccatgaaggtgattcagaggaactgcgccgcctacctcaagctgcggaactggcagtggtggaggcttttcaccaaagtgaagccactgctgcaggtgacacggcaggaggaggagatgcaggccaaggaggatgaactgcagaagaccaaggagcggcagcagaaggcagagaatgagcttaaggagctggaacagaagcactcgcagctgaccgaggagaagaacctgctacaggaacagctgcaggcagagacagagctgtatgcagaggctgaggagatgcgggtgcggctggcggccaagaagcaggagctggaggagatactgcatgagatggaggcccgcctggaggaggaggaagacaggggccagcagctacaggctgaaaggaagaagatggcccagcagatgctggaccttgaagaacagctggaggaggaggaagctgccaggcagaagctgcaacttgagaaggtcacggctgaggccaagatcaagaaactggaggatgagatcctggtcatggatgatcagaacaataaactatcaaaagaacgaaaactccttgaggagaggattagtgacttaacgacaaatcttgcagaagaggaagaaaaggccaagaatcttaccaagctgaaaaacaagcatgaatctatgatttcagaactggaagtgcggctaaagaaggaagagaagagccgacaggagctggagaagctgaaacggaagctggagggtgatgccagcgacttccacgagcagatcgctgacctccaggcgcagatcgcagagctcaagatgcagctggccaagaaggaggaggagctgcaggcggccctggccaggcttgacgatgaaatcgctcagaagaacaatgccctgaagaagatccgggagctggagggccacatctcagacctccaggaggacctggactcagagcgggccgccaggaacaaggctgaaaagcagaagcgagacctcggcgaggagctggaggccctaaagacagagctggaagacacactggacagcacagccactcagcaggagctcagggccaagagggagcaggaggtgacggtgctgaagaaggccctggatgaagagacgcggtcccatgaggctcaggtccaggagatgaggcagaaacacgcacaggcggtggaggagctcacagagcagcttgagcagttcaagagggccaaggcgaacctagacaagaataagcagacgctggagaaagagaacgcagacctggccggggagctgcgggtcctgggccaggccaagcaggaggtggaacataagaagaagaagctggaggcgcaggtgcaggagctgcagtccaagtgcagcgatggggagcgggcccgggcggagctcaatgacaaagtccacaagctgcagaatgaagttgagagcgtcacagggatgcttaacgaggccgaggggaaggccattaagctggccaaggacgtggcgtccctcagttcccagctccaggacacccaggagctgcttcaagaagaaacccggcagaagctcaacgtgtctacgaagctgcgccagctggaggaggagcggaacagcctgcaagaccagctggacgaggagatggaggccaagcagaacctggagcgccacatctccactctcaacatccagctctccgactcgaagaagaagctgcaggactttgccagcaccgtggaagctctggaagaggggaagaagaggttccagaaggagatcgagaacctcacccagcagtacgaggagaaggcggccgcttatgataaactggaaaagaccaagaacaggcttcagcaggagctggacgacctggttgttgatttggacaaccagcggcaactcgtgtccaacctggaaaagaagcagaggaaatttgatcagttgttagccgaggagaaaaacatctcttccaaatacgcggatgagagggacagagctgaggcagaagccagggagaaggaaaccaaggccctgtccctggctcgggcccttgaagaggccttggaagccaaagaggaactcgagcggaccaacaaaatgctcaaagccgaaatggaagacctggtcagctccaaggatgacgtgggcaagaacgtccatgagctggagaagtccaagcgggccctggagacccagatggaggagatgaagacgcagctggaagagctggaggacgagctgcaagccacggaggacgccaaactgcggctggaagtcaacatgcaggcgctcaagggccagttcgaaagggatctccaagcccgggacgagcagaatgaggagaagaggaggcaactgcagagacagcttcacgagtatgagacggaactggaagacgagcgaaagcaacgtgccctggcagctgcagcaaagaagaagctggaaggggacctgaaagacctggagcttcaggccgactctgccatcaaggggagggaggaagccatcaagcagctacgcaaactgcaggctcagatgaaggactttcaaagagagctggaagatgcccgtgcctccagagatgagatctttgccacagccaaagagaatgagaagaaagccaagagcttggaagcagacctcatgcagctacaagaggacctcgccgccgctgagagggctcgcaaacaagcggacctcgagaaggaggaactggcagaggagctggccagtagcctgtcgggaaggaacgcactccaggacgagaagcgccgcctggaggcccggatcgcccagctggaggaggagctggaggaggagcagggcaacatggaggccatgagcgaccgggtccgcaaagccacacagcaggccgagcagctcagcaacgagctggccacagagcgcagcacggcccagaagaatgagagtgcccggcagcagctcgagcggcagaacaaggagctccggagcaagctccacgagatggagggggccgtcaagtccaagttcaagtccaccatcgcggcgctggaggccaagattgcacagctggaggagcaggtcgagcaggaggccagagagaaacaggcggccaccaagtcgctgaagcagaaagacaagaagctgaaggaaatcttgctgcaggtggaggacgagcgcaagatggccgagcagtacaaggagcaggcagagaaaggcaatgccagggtcaagcagctcaagaggcagctggaggaggcagaggaggagtcccagcgcatcaacgccaaccgcaggaagctgcagcgggagctggatgaggccacggagagcaacgaggccatgggccgcgaggtgaacgcactcaagagcaagctcaggcgaggaaacgagacctctttcgttccttctagaaggtctggaggacgtagagttattgaaaatgcagatggttctgaggaggaaacggacactcgagacgcagacttcaatggaaccaaggccagtgaataagcaactttctacagttttgcaccacggcaagaaaaccaaaaaccaaaacaaacaaacaaaaaaaacccaacaacaacccagaacaaagcaaaacccagcagactgtacttagcattgtctaaatccattctcaaattccaaatatcacagacacccctcacacaaggaatataaaaaccaccaccctccagcctgggcaacgtagtaaaacctcatctatacaagaatttaaaaataagctgggcgtggtggtacacacctgtggtcccagctactagggaggctgagccaggaagaacgctccagcccaggacttcgaggctgcaatgagctataattgcatcattgcactccagcctgggcaacagagaccctgtctcaaccaccaccaccaccaccacccctactacccctgtattcaaggtaaaaattgaagtttgtatgatgtaagagatgagaaaaacccaacaggaaacacagacacatcctccagttctatcaatggattgtgcagacactgagtttttagaaaaacatatccacggtaaccggtccctggcaattctgtttacatgaaatggggagaaagtcaccgaaatgggtgccgccggcccccactcccaattcattccctaacctgcaaacctttccaacttctcacgtcaggcctttgagaattctttccccctctcctggtttccacacctcagacacgcacagttcaccaagtgccttctgtagtcacatgaattgaaaaggagacgctgctcccacggaggggagcaggaatgctgcactgtttacaccctgactgtgcttaaaaacactttcactaataaatggttataaatcacaa

SEQ ID NO: 367294 - DNA, 4233 bp, Homo sapiens
  misc_feature (42)..(42): n is a, c, g, or t
  misc_feature (45)..(45): n is a, c, g, or t
tcccccccccggccccccccccggctccggccagccactacngcntactactactactaaattcgcggccgcgtcgacccacgcccaacttcgtgcgctgcatcatccccaaccacgagaagaggtccggcaagctggatgcgttcctggtgctggagcagctgcggtgcaatggggtgctggaaggcattcgcatctgccggcagggcttccccaaccggatcgtcttccaggagttccgccaacgctacgagatcctggcggcgaatgccatccccaaaggcttcatggacgggaagcaggcctgcattctcatgatcaaagccctggaacttgaccccaacttatacaggatagggcagagcaaaatcttcttccgaactggcgtcctggcccacctagaggaggagcgagatttgaagatcaccgatgtcatcatggccttccaggcgatgtgtcgtggctacttggccagaaaggcttttgccaagaggcagcagcagctgaccgccatgaaggtgattcagaggaactgcgccgcctacctcaagctgcggaactggcagtggtggaggcttttcaccaaagtgaagccactgctgcaggtgacacggcaggaggaggagatgcaggccaaggaggatgaactgcagaagaccaaggagcggcagcagaaggcagagaatgagcttaaggagctggaacagaagcactcgcagctgaccgaggagaagaacctgctacaggaacagctgcaggcagagacagagctgtatgcagaggctgaggagatgcgggtgcggctggcggccaagaagcaggagctggaggagatactgcatgagatggaggcccgcctggaggaggaggaagacaggggccagcagctacaggctgaaaggaagaagatggcccagcagatgctggaccttgaagaacagctggaggaggaggaagctgccaggcagaagctgcaacttgagaaggtcacggctgaggccaagatcaagaaactggaggatgagatcctggtcatggatgatcagaacaataaactatcaaaagaacgaaaactccttgaggagaggattagtgacttaacgacaaatcttgcagaagaggaagaaaaggccaagaatcttaccaagctgaaaaacaagcatgaatctatgatttcagaactggaagtgcggctaaagaaggaagagaagagccgacaggagctggagaagctgaaacggaagctggagggtgatgccagcgacttccacgagcagaatgaagttgagagcgtcacagggatgcttaacgaggccgaggggaaggccattaagctggccaaggacgtggcgtccctcagttcccagctccaggacacccaggagctgcttcaagaagaaacccggcagaagctcaacgtgtctacgaagctgcgccagctggaggaggagcggaacagcctgcaagaccagctggacgaggagatggaggccaagcagaacctggagcgccacatctccactctcaacatccagctctccgactcgaagaagaagctgcaggactttgccagcaccgtggaagctctggaagaggggaagaagaggttccagaaggagatcgagaacctcacccagcagtacgaggagaaggcggccgcttatgataaactggaaaagaccaagaacaggcttcagcaggagctggacgacctggttgttgatttggacaaccagcggcaactcgtgtccaacctggaaaagaagcagaggaaatttgatcagttgttagccgaggagaaaaacatctcttccaaatacgcggatgagagggacagagctgaggcagaagccagggagaaggaaaccaaggccctgtccctggctcgggcccttgaagaggccttggaagccaaagaggaactcgagcggaccaacaaaatgctcaaagccgaaatggaagacctggtcagctccaaggatgacgtgggcaagaacgtccatgagctggagaagtccaagcgggccctggagacccagatggaggagatgaagacgcagctggaagagctggaggacgagctgcaagccacggaggacgccaaactgcggctggaagtcaacatgcaggcgctcaagggccagttcgaaagggatctccaagcccgggacgagcagaatgaggagaagaggaggcaactgcagagacagcttcacgagtatgagacggaactggaagacgagcgaaagcaacgtgccctggcagctgcagcaaagaagaagctggaaggggacctgaaagacctggagcttcaggccgactctgccatcaaggggagggaggaagccatcaagcagctacgcaaactgcaggctcagatgaaggactttcaaagagagctggaagatgcccgtgcctccagagatgagatctttgccacagccaaagagaatgagaagaaagccaagagcttggaagcagacctcatgcagctacaagaggacctcgccgccgctgagagggctcgcaaacaagcggacctcgagaaggaggaactggcagaggagctggccagtagcctgtcgggaaggaacgcactccaggacgagaagcgccgcctggaggcccggatcgcccagctggaggaggagctggaggaggagcagggcaacatggaggccatgagcgaccgggtccgcaaagccacacagcaggccgagcagctcagcaacgagctggccacagagcgcagcacggcccagaagaatgagagtgcccggcagcagctcgagcggcagaacaaggagctccggagcaagctccacgagatggagggggccgtcaagtccaagttcaagtccaccatcgcggcgctggaggccaagattgcacagctggaggagcaggtcgagcaggaggccagagagaaacaggcggccaccaagtcgctgaagcagaaagacaagaagctgaaggaaatcttgctgcaggtggaggacgagcgcaagatggccgagcagtacaaggagcaggcagagaaaggcaatgccagggtcaagcagctcaagaggcagctggaggaggcagaggaggagtcccagcgcatcaacgccaaccgcaggaagctgcagcgggagctggatgaggccacggagagcaacgaggccatgggccgcgaggtgaacgcactcaagagcaagctcagagggccccccccacaggaaacttcgcagtgatgcaccaggcgaggaaacgagacctctttcgttccttctagaaggtctggaggacgtagagttattgaaaatgcagatggttctgaggaggaaacggacactcgagacgcagacttcaatggaaccaaggccagtgaataagcaactttctacagttttgcaccacggcaagaaaaccaaaaaccaaaacaaacaaacaaaaaaaacccaacaacaacccagaacaaagcaaaacccagcagactgtacttagcattgtctaaatccattctcaaattccaaatatcacagacacccctcacacaaggaatataaaaaccaccaccctccagcctgggcaacgtagtaaaacctcatctatacaagaatttaaaaataagctgggcgtggtggtacacacctgtggtcccagctactagggaggctgagccaggaagaacgctccagcccaggacttcgaggctgcaatgagctataattgcatcattgcactccagcctgggcaacagagaccctgtctcaaccaccaccaccaccaccacccctactacccctgtattcaaggtaaaaattgaagtttgtatgatgtaagagatgagaaaaacccaacaggaaacacagacacatcctccagttctatcaatggattgtgcagacactgagtttttagaaaaacatatccacggtaaccggtccctggcaattctgtttacatgaaatggggagaaagtcaccgaaatgggtgccgccggcccccactcccaattcattccctaacctgcaaacctttccaacttctcacgtcaggcctttgagaattctttccccctctcctggtttccacacctcagacacgcacagttcaccaagtgccttctgtagtcacatgaattgaaaaggagacgctgctcccacggaggggagcaggaatgctgcactgtttacaccctgactgtgcttaaaaacactttcactaataaatggttataaatcacaa

SEQ ID NO: 367295 - DNA, 5021 bp, Homo sapiens
  misc_feature (42)..(42): n is a, c, g, or t
  misc_feature (45)..(45): n is a, c, g, or t
tcccccccccggccccccccccggctccggccagccactacngcntactactactactaaattcgcggccgcgtcgacccacgcccaacttcgtgcgctgcatcatccccaaccacgagaagaggtccggcaagctggatgcgttcctggtgctggagcagctgcggtgcaatggggtgctggaaggcattcgcatctgccggcagggcttccccaaccggatcgtcttccaggagttccgccaacgctacgagatcctggcggcgaatgccatccccaaaggcttcatggacgggaagcaggcctgcattctcatgatcaaagccctggaacttgaccccaacttatacaggatagggcagagcaaaatcttcttccgaactggcgtcctggcccacctagaggaggagcgagatttgaagatcaccgatgtcatcatggccttccaggcgatgtgtcgtggctacttggccagaaaggcttttgccaagaggcagcagcagctgaccgccatgaaggtgattcagaggaactgcgccgcctacctcaagctgcggaactggcagtggtggaggcttttcaccaaagtgaagccactgctgcaggtgacacggcaggaggaggagatgcaggccaaggaggatgaactgcagaagaccaaggagcggcagcagaaggcagagaatgagcttaaggagctggaacagaagcactcgcagctgaccgaggagaagaacctgctacaggaacagctgcaggcagagacagagctgtatgcagaggctgaggagatgcgggtgcggctggcggccaagaagcaggagctggaggagatactgcatgagatggaggcccgcctggaggaggaggaagacaggggccagcagctacaggctgaaaggaagaagatggcccagcagatgctggaccttgaagaacagctggaggaggaggaagctgccaggcagaagctgcaacttgagaaggtcacggctgaggccaagatcaagaaactggaggatgagatcctggtcatggatgatcagaacaataaactatcaaaagaacgaaaactccttgaggagaggattagtgacttaacgacaaatcttgcagaagaggaagaaaaggccaagaatcttaccaagctgaaaaacaagcatgaatctatgatttcagaactggaagtgcggctaaagaaggaagagaagagccgacaggagctggagaagctgaaacggaagctggagggtgatgccagcgacttccacgagcagatcgctgacctccaggcgcagatcgcagagctcaagatgcagctggccaagaaggaggaggagctgcaggcggccctggccaggcttgacgatgaaatcgctcagaagaacaatgccctgaagaagatccgggagctggagggccacatctcagacctccaggaggacctggactcagagcgggccgccaggaacaaggctgaaaagcagaagcgagacctcggcgaggagctggaggccctaaagacagagctggaagacacactggacagcacagccactcagcaggagctcagggccaagagggagcaggaggtgacggtgctgaagaaggccctggatgaagagacgcggtcccatgaggctcaggtccaggagatgaggcagaaacacgcacaggcggtggaggagctcacagagcagcttgagcagttcaagagggccaaggcgaacctagacaagaataagcagacgctggagaaagagaacgcagacctggccggggagctgcgggtcctgggccaggccaagcaggaggtggaacataagaagaagaagctggaggcgcaggtgcaggagctgcagtccaagtgcagcgatggggagcgggcccgggcggagctcaatgacaaagtccacaagctgcagaatgaagttgagagcgtcacagggatgcttaacgaggccgaggggaaggccattaagctggccaaggacgtggcgtccctcagttcccagctccaggacacccaggagctgcttcaagaagaaacccggcagaagctcaacgtgtctacgaagctgcgccagctggaggaggagcggaacagcctgcaagaccagctggacgaggagatggaggccaagcagaacctggagcgccacatctccactctcaacatccagctctccgactcgaagaagaagctgcaggactttgccagcaccgtggaagctctggaagaggggaagaagaggttccagaaggagatcgagaacctcacccagcagtacgaggagaaggcggccgcttatgataaactggaaaagaccaagaacaggcttcagcaggagctggacgacctggttgttgatttggacaaccagcggcaactcgtgtccaacctggaaaagaagcagaggaaatttgatcagttgttagccgaggagaaaaacatctcttccaaatacgcggatgagagggacagagctgaggcagaagccagggagaaggaaaccaaggccctgtccctggctcgggcccttgaagaggccttggaagccaaagaggaactcgagcggaccaacaaaatgctcaaagccgaaatggaagacctggtcagctccaaggatgacgtgggcaagaacgtccatgagctggagaagtccaagcgggccctggagacccagatggaggagatgaagacgcagctggaagagctggaggacgagctgcaagccacggaggacgccaaactgcggctggaagtcaacatgcaggcgctcaagggccagttcgaaagggatctccaagcccgggacgagcagaatgaggagaagaggaggcaactgcagagacagcttcacgagtatgagacggaactggaagacgagcgaaagcaacgtgccctggcagctgcagcaaagaagaagctggaaggggacctgaaagacctggagcttcaggccgactctgccatcaaggggagggaggaagccatcaagcagctacgcaaactgcaggctcagatgaaggactttcaaagagagctggaagatgcccgtgcctccagagatgagatctttgccacagccaaagagaatgagaagaaagccaagagcttggaagcagacctcatgcagctacaagaggacctcgccgccgctgagagggctcgcaaacaagcggacctcgagaaggaggaactggcagaggagctggccagtagcctgtcgggaaggaacgcactccaggacgagaagcgccgcctggaggcccggatcgcccagctggaggaggagctggaggaggagcagggcaacatggaggccatgagcgaccgggtccgcaaagccacacagcaggccgagcagctcagcaacgagctggccacagagcgcagcacggcccagaagaatgagagtgcccggcagcagctcgagcggcagaacaaggagctccggagcaagctccacgagatggagggggccgtcaagtccaagttcaagtccaccatcgcggcgctggaggccaagattgcacagctggaggagcaggtcgagcaggaggccagagagaaacaggcggccaccaagtcgctgaagcagaaagacaagaagctgaaggaaatcttgctgcaggtggaggacgagcgcaagatggccgagcagtacaaggagcaggcagagaaaggcaatgccagggtcaagcagctcaagaggcagctggaggaggcagaggaggagtcccagcgcatcaacgccaaccgcaggaagctgcagcgggagctggatgaggccacggagagcaacgaggccatgggccgcgaggtgaacgcactcaagagcaagctcagagggccccccccacaggaaacttcgcagtgatgcaccaggcgaggaaacgagacctctttcgttccttctagaaggtctggaggacgtagagttattgaaaatgcagatggttctgaggaggaaacggacactcgagacgcagacttcaatggaaccaaggccagtgaataagcaactttctacagttttgcaccacggcaagaaaaccaaaaaccaaaacaaacaaacaaaaaaaacccaacaacaacccagaacaaagcaaaacccagcagactgtacttagcattgtctaaatccattctcaaattccaaatatcacagacacccctcacacaaggaatataaaaaccaccaccctccagcctgggcaacgtagtaaaacctcatctatacaagaatttaaaaataagctgggcgtggtggtacacacctgtggtcccagctactagggaggctgagccaggaagaacgctccagcccaggacttcgaggctgcaatgagctataattgcatcattgcactccagcctgggcaacagagaccctgtctcaaccaccaccaccaccaccacccctactacccctgtattcaaggtaaaaattgaagtttgtatgatgtaagagatgagaaaaacccaacaggaaacacagacacatcctccagttctatcaatggattgtgcagacactgagtttttagaaaaacatatccacggtaaccggtccctggcaattctgtttacatgaaatggggagaaagtcaccgaaatgggtgccgccggcccccactcccaattcattccctaacctgcaaacctttccaacttctcacgtcaggcctttgagaattctttccccctctcctggtttccacacctcagacacgcacagttcaccaagtgccttctgtagtcacatgaattgaaaaggagacgctgctcccacggaggggagcaggaatgctgcactgtttacaccctgactgtgggagcagcgtctcctggtttccacacctcagacacgcacagttcaccaagtgccttctgtagtcacatgaattgaaaaggagacgctgctcccacggaggggagcaggaatgctgcactgtttacaccctgactgtgcttaaaaacactttcactaataaatggttataaatcaaaaaaa

SEQ ID NO: 367296 - DNA, 4719 bp, Homo sapiens
  misc_feature (42)..(42): n is a, c, g, or t
  misc_feature (45)..(45): n is a, c, g, or t
tcccccccccggccccccccccggctccggccagccactacngcntactactactactaaattcgcggccgcgtcgacccacgcccaacttcgtgcgctgcatcatccccaaccacgagaagaggtccggcaagctggatgcgttcctggtgctggagcagctgcggtgcaatggggtgctggaaggcattcgcatctgccggcagggcttccccaaccggatcgtcttccaggagttccgccaacgctacgagatcctggcggcgaatgccatccccaaaggcttcatggacgggaagcaggcctgcattctcatgatcaaagccctggaacttgaccccaacttatacaggatagggcagagcaaaatcttcttccgaactggcgtcctggcccacctagaggaggagcgagatttgaagatcaccgatgtcatcatggccttccaggcgatgtgtcgtggctacttggccagaaaggcttttgccaagaggcagcagcagctgaccgccatgaaggtgattcagaggaactgcgccgcctacctcaagctgcggaactggcagtggtggaggcttttcaccaaagtgaagccactgctgcaggtgacacggcaggaggaggagatgcaggccaaggaggatgaactgcagaagaccaaggagcggcagcagaaggcagagaatgagcttaaggagctggaacagaagcactcgcagctgaccgaggagaagaacctgctacaggaacagctgcaggcagagacagagctgtatgcagaggctgaggagatgcgggtgcggctggcggccaagaagcaggagctggaggagatactgcatgagatggaggcccgcctggaggaggaggaagacaggggccagcagctacaggctgaaaggaagaagatggcccagcagatgctggaccttgaagaacagctggaggaggaggaagctgccaggcagaagctgcaacttgagaaggtcacggctgaggccaagatcaagaaactggaggatgagatcctggtcatggatgatcagaacaataaactatcaaaagaacgaaaactccttgaggagaggattagtgacttaacgacaaatcttgcagaagaggaagaaaaggccaagaatcttaccaagctgaaaaacaagcatgaatctatgatttcagaactggaagtgcggctaaagaaggaagagaagagccgacaggagctggagaagctgaaacggaagctggagggtgatgccagcgacttccacgagcagatcgctgacctccaggcgcagatcgcagagctcaagatgcagctggccaagaaggaggaggagctgcaggcggccctggccaggcttgacgatgaaatcgctcagaagaacaatgccctgaagaagatccgggagctggagggccacatctcagacctccaggaggacctggactcagagcgggccgccaggaacaaggctgaaaagcagaagcgagacctcggcgaggagctggaggccctaaagacagagctggaagacacactggacagcacagccactcagcaggagctcagggccaagagggagcaggaggtgacggtgctgaagaaggccctggatgaagagacgcggtcccatgaggctcaggtccaggagatgaggcagaaacacgcacaggcggtggaggagctcacagagcagcttgagcagttcaagagggccaaggcgaacctagacaagaataagcagacgctggagaaagagaacgcagacctggccggggagctgcgggtcctgggccaggccaagcaggaggtggaacataagaagaagaagctggaggcgcaggtgcaggagctgcagtccaagtgcagcgatggggagcgggcccgggcggagctcaatgacaaagtccacaagctgcagaatgaagttgagagcgtcacagggatgcttaacgaggccgaggggatggaggccaagcagaacctggagcgccacatctccactctcaacatccagctctccgactcgaagaagaagctgcaggactttgccagcaccgtggaagctctggaagaggggaagaagaggttccagaaggagatcgagaacctcacccagcagtacgaggagaaggcggccgcttatgataaactggaaaagaccaagaacaggcttcagcaggagctggacgacctggttgttgatttggacaaccagcggcaactcgtgtccaacctggaaaagaagcagaggaaatttgatcagttgttagccgaggagaaaaacatctcttccaaatacgcggatgagagggacagagctgaggcagaagccagggagaaggaaaccaaggccctgtccctggctcgggcccttgaagaggccttggaagccaaagaggaactcgagcggaccaacaaaatgctcaaagccgaaatggaagacctggtcagctccaaggatgacgtgggcaagaacgtccatgagctggagaagtccaagcgggccctggagacccagatggaggagatgaagacgcagctggaagagctggaggacgagctgcaagccacggaggacgccaaactgcggctggaagtcaacatgcaggcgctcaagggccagttcgaaagggatctccaagcccgggacgagcagaatgaggagaagaggaggcaactgcagagacagcttcacgagtatgagacggaactggaagacgagcgaaagcaacgtgccctggcagctgcagcaaagaagaagctggaaggggacctgaaagacctggagcttcaggccgactctgccatcaaggggagggaggaagccatcaagcagctacgcaaactgcaggctcagatgaaggactttcaaagagagctggaagatgcccgtgcctccagagatgagatctttgccacagccaaagagaatgagaagaaagccaagagcttggaagcagacctcatgcagctacaagaggacctcgccgccgctgagagggctcgcaaacaagcggacctcgagaaggaggaactggcagaggagctggccagtagcctgtcgggaaggaacgcactccaggacgagaagcgccgcctggaggcccggatcgcccagctggaggaggagctggaggaggagcagggcaacatggaggccatgagcgaccgggtccgcaaagccacacagcaggccgagcagctcagcaacgagctggccacagagcgcagcacggcccagaagaatgagagtgcccggcagcagctcgagcggcagaacaaggagctccggagcaagctccacgagatggagggggccgtcaagtccaagttcaagtccaccatcgcggcgctggaggccaagattgcacagctggaggagcaggtcgagcaggaggccagagagaaacaggcggccaccaagtcgctgaagcagaaagacaagaagctgaaggaaatcttgctgcaggtggaggacgagcgcaagatggccgagcagtacaaggagcaggcagagaaaggcaatgccagggtcaagcagctcaagaggcagctggaggaggcagaggaggagtcccagcgcatcaacgccaaccgcaggaagctgcagcgggagctggatgaggccacggagagcaacgaggccatgggccgcgaggtgaacgcactcaagagcaagctcagagggccccccccacaggaaacttcgcagtgatgcaccaggcgaggaaacgagacctctttcgttccttctagaaggtctggaggacgtagagttattgaaaatgcagatggttctgaggaggaaacggacactcgagacgcagacttcaatggaaccaaggccagtgaataagcaactttctacagttttgcaccacggcaagaaaaccaaaaaccaaaacaaacaaacaaaaaaaacccaacaacaacccagaacaaagcaaaacccagcagactgtacttagcattgtctaaatccattctcaaattccaaatatcacagacacccctcacacaaggaatataaaaaccaccaccctccagcctgggcaacgtagtaaaacctcatctatacaagaatttaaaaataagctgggcgtggtggtacacacctgtggtcccagctactagggaggctgagccaggaagaacgctccagcccaggacttcgaggctgcaatgagctataattgcatcattgcactccagcctgggcaacagagaccctgtctcaaccaccaccaccaccaccacccctactacccctgtattcaaggtaaaaattgaagtttgtatgatgtaagagatgagaaaaacccaacaggaaacacagacacatcctccagttctatcaatggattgtgcagacactgagtttttagaaaaacatatccacggtaaccggtccctggcaattctgtttacatgaaatggggagaaagtcaccgaaatgggtgccgccggcccccactcccaattcattccctaacctgcaaacctttccaacttctcacgtcaggcctttgagaattctttccccctctcctggtttccacacctcagacacgcacagttcaccaagtgccttctgtagtcacatgaattgaaaaggagacgctgctcccacggaggggagcaggaatgctgcactgtttacaccctgactgtgcttaaaaacactttcactaataaatggttataaatcacaa

SEQ ID NO: 367297 - DNA, 4753 bp, Homo sapiens
  misc_feature (42)..(42): n is a, c, g, or t
  misc_feature (45)..(45): n is a, c, g, or t
  misc_feature (1970)..(1971): n is a, c, g, or t
  misc_feature (1975)..(1976): n is a, c, g, or t
  misc_feature (1978)..(1978): n is a, c, g, or t
  misc_feature (1981)..(1981): n is a, c, g, or t
tcccccccccggccccccccccggctccggccagccactacngcntactactactactaaattcgcggccgcgtcgacccacgcccaacttcgtgcgctgcatcatccccaaccacgagaagaggtccggcaagctggatgcgttcctggtgctggagcagctgcggtgcaatggggtgctggaaggcattcgcatctgccggcagggcttccccaaccggatcgtcttccaggagttccgccaacgctacgagatcctggcggcgaatgccatccccaaaggcttcatggacgggaagcaggcctgcattctcatgatcaaagccctggaacttgaccccaacttatacaggatagggcagagcaaaatcttcttccgaactggcgtcctggcccacctagaggaggagcgagatttgaagatcaccgatgtcatcatggccttccaggcgatgtgtcgtggctacttggccagaaaggcttttgccaagaggcagcagcagctgaccgccatgaaggtgattcagaggaactgcgccgcctacctcaagctgcggaactggcagtggtggaggcttttcaccaaagtgaagccactgctgcaggtgacacggcaggaggaggagatgcaggccaaggaggatgaactgcagaagaccaaggagcggcagcagaaggcagagaatgagcttaaggagctggaacagaagcactcgcagctgaccgaggagaagaacctgctacaggaacagctgcaggcagagacagagctgtatgcagaggctgaggagatgcgggtgcggctggcggccaagaagcaggagctggaggagatactgcatgagatggaggcccgcctggaggaggaggaagacaggggccagcagctacaggctgaaaggaagaagatggcccagcagatgctggaccttgaagaacagctggaggaggaggaagctgccaggcagaagctgcaacttgagaaggtcacggctgaggccaagatcaagaaactggaggatgagatcctggtcatggatgatcagaacaataaactatcaaaagaacgaaaactccttgaggagaggattagtgacttaacgacaaatcttgcagaagaggaagaaaaggccaagaatcttaccaagctgaaaaacaagcatgaatctatgatttcagaactggaagtgcggctaaagaaggaagagaagagccgacaggagctggagaagctgaaacggaagctggagggtgatgccagcgacttccacgagcagatcgctgacctccaggcgcagatcgcagagctcaagatgcagctggccaagaaggaggaggagctgcaggcggccctggccaggcttgacgatgaaatcgctcagaagaacaatgccctgaagaagatccgggagctggagggccacatctcagacctccaggaggacctggactcagagcgggccgccaggaacaaggctgaaaagcagaagcgagacctcggcgaggagctggaggccctaaagacagagctggaagacacactggacagcacagccactcagcaggagctcagggccaagagggagcaggaggtgacggtgctgaagaaggccctggatgaagagacgcggtcccatgaggctcaggtccaggagatgaggcagaaacacgcacaggcggtggaggagctcacagagcagcttgagcagttcaagagggccaaggcgaacctagacaagaataagcagacgctggagaaagagaacgcagacctggccggggagctgcgggtcctgggccaggccaagcaggaggtggaacataagaagaagaagctggaggcgcaggtgcaggagctgcagtccaagtgcagcgatggggagcgggcccgggcggagctcaatgacaaagtccacaagctgcagaatgaagttgagagcgtcacagggatgcttaacgaggccgagggnngcannancanctggacgaggagatggaggccagatggaggccaagcagaacctggagcgccacatctccactctcaacatccagctctccgactcgaagaagaagctgcaggactttgccagcaccgtggaagctctggaagaggggaagaagaggttccagaaggagatcgagaacctcacccagcagtacgaggagaaggcggccgcttatgataaactggaaaagaccaagaacaggcttcagcaggagctggacgacctggttgttgatttggacaaccagcggcaactcgtgtccaacctggaaaagaagcagaggaaatttgatcagttgttagccgaggagaaaaacatctcttccaaatacgcggatgagagggacagagctgaggcagaagccagggagaaggaaaccaaggccctgtccctggctcgggcccttgaagaggccttggaagccaaagaggaactcgagcggaccaacaaaatgctcaaagccgaaatggaagacctggtcagctccaaggatgacgtgggcaagaacgtccatgagctggagaagtccaagcgggccctggagacccagatggaggagatgaagacgcagctggaagagctggaggacgagctgcaagccacggaggacgccaaactgcggctggaagtcaacatgcaggcgctcaagggccagttcgaaagggatctccaagcccgggacgagcagaatgaggagaagaggaggcaactgcagagacagcttcacgagtatgagacggaactggaagacgagcgaaagcaacgtgccctggcagctgcagcaaagaagaagctggaaggggacctgaaagacctggagcttcaggccgactctgccatcaaggggagggaggaagccatcaagcagctacgcaaactgcaggctcagatgaaggactttcaaagagagctggaagatgcccgtgcctccagagatgagatctttgccacagccaaagagaatgagaagaaagccaagagcttggaagcagacctcatgcagctacaagaggacctcgccgccgctgagagggctcgcaaacaagcggacctcgagaaggaggaactggcagaggagctggccagtagcctgtcgggaaggaacgcactccaggacgagaagcgccgcctggaggcccggatcgcccagctggaggaggagctggaggaggagcagggcaacatggaggccatgagcgaccgggtccgcaaagccacacagcaggccgagcagctcagcaacgagctggccacagagcgcagcacggcccagaagaatgagagtgcccggcagcagctcgagcggcagaacaaggagctccggagcaagctccacgagatggagggggccgtcaagtccaagttcaagtccaccatcgcggcgctggaggccaagattgcacagctggaggagcaggtcgagcaggaggccagagagaaacaggcggccaccaagtcgctgaagcagaaagacaagaagctgaaggaaatcttgctgcaggtggaggacgagcgcaagatggccgagcagtacaaggagcaggcagagaaaggcaatgccagggtcaagcagctcaagaggcagctggaggaggcagaggaggagtcccagcgcatcaacgccaaccgcaggaagctgcagcgggagctggatgaggccacggagagcaacgaggccatgggccgcgaggtgaacgcactcaagagcaagctcagagggccccccccacaggaaacttcgcagtgatgcaccaggcgaggaaacgagacctctttcgttccttctagaaggtctggaggacgtagagttattgaaaatgcagatggttctgaggaggaaacggacactcgagacgcagacttcaatggaaccaaggccagtgaataagcaactttctacagttttgcaccacggcaagaaaaccaaaaaccaaaacaaacaaacaaaaaaaacccaacaacaacccagaacaaagcaaaacccagcagactgtacttagcattgtctaaatccattctcaaattccaaatatcacagacacccctcacacaaggaatataaaaaccaccaccctccagcctgggcaacgtagtaaaacctcatctatacaagaatttaaaaataagctgggcgtggtggtacacacctgtggtcccagctactagggaggctgagccaggaagaacgctccagcccaggacttcgaggctgcaatgagctataattgcatcattgcactccagcctgggcaacagagaccctgtctcaaccaccaccaccaccaccacccctactacccctgtattcaaggtaaaaattgaagtttgtatgatgtaagagatgagaaaaacccaacaggaaacacagacacatcctccagttctatcaatggattgtgcagacactgagtttttagaaaaacatatccacggtaaccggtccctggcaattctgtttacatgaaatggggagaaagtcaccgaaatgggtgccgccggcccccactcccaattcattccctaacctgcaaacctttccaacttctcacgtcaggcctttgagaattctttccccctctcctggtttccacacctcagacacgcacagttcaccaagtgccttctgtagtcacatgaattgaaaaggagacgctgctcccacggaggggagcaggaatgctgcactgtttacaccctgactgtgcttaaaaacactttcactaataaatggttataaatcacaa

SEQ ID NO: 367298 - DNA, 4472 bp, Homo sapiens
  misc_feature (42)..(42): n is a, c, g, or t
  misc_feature (45)..(45): n is a, c, g, or t
tcccccccccggccccccccccggctccggccagccactacngcntactactactactaaattcgcggccgcgtcgacccacgcccaacttcgtgcgctgcatcatccccaaccacgagaagaggtccggcaagctggatgcgttcctggtgctggagcagctgcggtgcaatggggtgctggaaggcattcgcatctgccggcagggcttccccaaccggatcgtcttccaggagttccgccaacgctacgagatcctggcggcgaatgccatccccaaaggcttcatggacgggaagcaggcctgcattctcatgatcaaagccctggaacttgaccccaacttatacaggatagggcagagcaaaatcttcttccgaactggcgtcctggcccacctagaggaggagcgagatttgaagatcaccgatgtcatcatggccttccaggcgatgtgtcgtggctacttggccagaaaggcttttgccaagaggcagcagcagctgaccgccatgaaggtgattcagaggaactgcgccgcctacctcaagctgcggaactggcagtggtggaggcttttcaccaaagtgaagccactgctgcaggtgacacggcaggaggaggagatgcaggccaaggaggatgaactgcagaagaccaaggagcggcagcagaaggcagagaatgagcttaaggagctggaacagaagcactcgcagctgaccgaggagaagaacctgctacaggaacagctgcaggcagagacagagctgtatgcagaggctgaggagatgcgggtgcggctggcggccaagaagcaggagctggaggagatactgcatgagatggaggcccgcctggaggaggaggaagacaggggccagcagctacaggctgaaaggaagaagatggcccagcagatgctggaccttgaagaacagctggaggaggaggaagctgccaggcagaagctgcaacttgagaaggtcacggctgaggccaagatcaagaaactggaggatgagatcctggtcatggatgatcagaacaataaactatcaaaagaacgaaaactccttgaggagaggattagtgacttaacgacaaatcttgcagaagaggaagaaaaggccaagaatcttaccaagctgaaaaacaagcatgaatctatgatttcagaactggaagtgcggctaaagaaggaagagaagagccgacaggagctggagaagctgaaacggaagctggagggtgatgccagcgacttccacgagcagatcgctgacctccaggcgcagatcgcagagctcaagatgcagctggccaagaaggaggaggagctgcaggcggccctggccaggcttgacgatgaaatcgctcagaagaacaatgccctgaagaagatccgggagctggagggccacatctcagacctccaggaggacctggactcagagcgggccgccaggaacaaggctgaaaagcagaagcgagacctcggcgaggagctggaggccctaaagacagagctggaagacacactggacagcacagccactcagcaggagctcagggccaagagggagcaggaggtgacggtgctgaagaaggccctggatgaagagacgcggtcccatgaggctcaggtccaggagatgaggcagaaacacgcacaggcggtggaggagctcacagagcagcttgagcagttcaagagggccaaggcgaacctagacaagaataagcagacgctggagaaagagaacgcagacctggccggggagctgcgggtcctgggccaggccaagcaggaggtggaacataagaagaagaagctggaggcgcaggtgcaggagctgcagtccaagtgcagcgatggggagcgggcccgggcggagctcaatgacaaagtccacaagctgcagaatgaagttgagagcgtcacagggatgcttaacgaggccgaggggaaggccattaagctggccaaggacgtggcgtccctcagttcccagctccaggacacccaggagctgcttcaagaagaaacccggcagaagctcaacgtgtctacgaagctgcgccagctggaggaggagcggaacagcctgcaagaccagctggacgaggagatggaggccaagcagaacctggagcgccacatctccactctcaacatccagctctccgactcgaagaagaagctgcaggactttgccagcaccgtggaagctctggaagaggggaagaagaggttccagaaggagatcgagaacctcacccagcagtacgaggagaaggcggccgcttatgataaactggaaaagaccaagaacaggcttcagcaggagctggacgacctggttgttgatttggacaaccagcggcaactcgtgtccaacctggaaaagaagcagaggaaatttgatcagttgttagccgaggagaaaaacatctcttccaaatacgcggatgagagggacagagctgaggcagaagccagggagaaggaaaccaaggccctgtccctggctcgggcccttgaagaggccttggaagccaaagaggaactcgagcggaccaacaaaatgctcaaagccgaaatggaagacctggtcagctccaaggatgacgtgggcaagaacgtccatgagctggagaagtccaagcgggccctggagacccagatggaggagatgaagacgcagctggaagagctggaggacgagctgcaagccacggaggacgccaaactgcggctggaagtcaacatgcaggcgctcaagggccagttcgaaagggatctccaagcccgggacgagcagaatgaggagaagaggaggcaactgcagagacagcttcacgagtatgagacggaactggaagacgagcgaaagcaacgtgccctggcagctgcagcaaagaagaagctggaaggggacctgaaagacctggagcttcaggccgactctgccatcaaggggagggaggaagccatcaagcagctacgcaaactgcaggctcagatgaaggactttcaaagagagctggaagatgcccgtgcctccagagatgagatctttgccacagccaaagagaatgagaagaaagccaagagcttggaagcagacctcatgcagctacaagaggacctcgccgccgctgagagggctcgcaaacaagcggacctcgagaaggaggaactggcagaggagctggccagtagcctgtcgggaaggaacgcactccaggacgagaagcgccgcctggaggcccggatcgcccagctggaggaggagctggaggaaggcagctggaggaggcagaggaggagtcccagcgcatcaacgccaaccgcaggaagctgcagcgggagctggatgaggccacggagagcaacgaggccatgggccgcgaggtgaacgcactcaagagcaagctcagagggccccccccacaggaaacttcgcagtgatgcaccaggcgaggaaacgagacctctttcgttccttctagaaggtctggaggacgtagagttattgaaaatgcagatggttctgaggaggaaacggacactcgagacgcagacttcaatggaaccaaggccagtgaataagcaactttctacagttttgcaccacggcaagaaaaccaaaaaccaaaacaaacaaacaaaaaaaacccaacaacaacccagaacaaagcaaaacccagcagactgtacttagcattgtctaaatccattctcaaattccaaatatcacagacacccctcacacaaggaatataaaaaccaccaccctccagcctgggcaacgtagtaaaacctcatctatacaagaatttaaaaataagctgggcgtggtggtacacacctgtggtcccagctactagggaggctgagccaggaagaacgctccagcccaggacttcgaggctgcaatgagctataattgcatcattgcactccagcctgggcaacagagaccctgtctcaaccaccaccaccaccaccacccctactacccctgtattcaaggtaaaaattgaagtttgtatgatgtaagagatgagaaaaacccaacaggaaacacagacacatcctccagttctatcaatggattgtgcagacactgagtttttagaaaaacatatccacggtaaccggtccctggcaattctgtttacatgaaatggggagaaagtcaccgaaatgggtgccgccggcccccactcccaattcattccctaacctgcaaacctttccaacttctcacgtcaggcctttgagaattctttccccctctcctggtttccacacctcagacacgcacagttcaccaagtgccttctgtagtcacatgaattgaaaaggagacgctgctcccacggaggggagcaggaatgctgcactgtttacaccctgactgtgcttaaaaacactttcactaataaatggttataaatcacaa

SEQ ID NO: 367299 - DNA, 4690 bp, Homo sapiens
  misc_feature (42)..(42): n is a, c, g, or t
  misc_feature (45)..(45): n is a, c, g, or t
  misc_feature (4406)..(4406): n is a, c, g, or t
  misc_feature (4414)..(4414): n is a, c, g, or t
tcccccccccggccccccccccggctccggccagccactacngcntactactactactaaattcgcggccgcgtcgacccacgcccaacttcgtgcgctgcatcatccccaaccacgagaagaggtccggcaagctggatgcgttcctggtgctggagcagctgcggtgcaatggggtgctggaaggcattcgcatctgccggcagggcttccccaaccggatcgtcttccaggagttccgccaacgctacgagatcctggcggcgaatgccatccccaaaggcttcatggacgggaagcaggcctgcattctcatgatcaaagccctggaacttgaccccaacttatacaggatagggcagagcaaaatcttcttccgaactggcgtcctggcccacctagaggaggagcgagatttgaagatcaccgatgtcatcatggccttccaggcgatgtgtcgtggctacttggccagaaaggcttttgccaagaggcagcagcagctgaccgccatgaaggtgattcagaggaactgcgccgcctacctcaagctgcggaactggcagtggtggaggcttttcaccaaagtgaagccactgctgcaggtgacacggcaggaggaggagatgcaggccaaggaggatgaactgcagaagaccaaggagcggcagcagaaggcagagaatgagcttaaggagctggaacagaagcactcgcagctgaccgaggagaagaacctgctacaggaacagctgcaggcagagacagagctgtatgcagaggctgaggagatgcgggtgcggctggcggccaagaagcaggagctggaggagatactgcatgagatggaggcccgcctggaggaggaggaagacaggggccagcagctacaggctgaaaggaagaagatggcccagcagatgctggaccttgaagaacagctggaggaggaggaagctgccaggcagaagctgcaacttgagaaggtcacggctgaggccaagatcaagaaactggaggatgagatcctggtcatggatgatcagaacaataaactatcaaaagaacgaaaactccttgaggagaggattagtgacttaacgacaaatcttgcagaagaggaagaaaaggccaagaatcttaccaagctgaaaaacaagcatgaatctatgatttcagaactggaagtgcggctaaagaaggaagagaagagccgacaggagctggagaagctgaaacggaagctggagggtgatgccagcgacttccacgagcagatcgctgacctccaggcgcagatcgcagagctcaagatgcagctggccaagaaggaggaggagctgcaggcggccctggccaggcttgacgatgaaatcgctcagaagaacaatgccctgaagaagatccgggagctggagggccacatctcagacctccaggaggacctggactcagagcgggccgccaggaacaaggctgaaaagcagaagcgagacctcggcgaggagctggaggccctaaagacagagctggaagacacactggacagcacagccactcagcaggagctcagggccaagagggagcaggaggtgacggtgctgaagaaggccctggatgaagagacgcggtcccatgaggctcaggtccaggagatgaggcagaaacacgcacaggcggtggaggagctcacagagcagcttgagcagttcaagagggccaaggcgaacctagacaagaataagcagacgctggagaaagagaacgcagacctggccggggagctgcgggtcctgggccaggccaagcaggaggtggaacataagaagaagaagctggaggcgcaggtgcaggagctgcagtccaagtgcagcgatggggagcgggcccgggcggagctcaatgacaaagtccacaagctgcagaatgaagttgagagcgtcacagggatgcttaacgaggccgaggggaaggccattaagctggccaaggacgtggcgtccctcagttcccagctccaggacacccaggagctgcttcaagaagaaacccggcagaagctcaacgtgtctacgaagctgcgccagctggaggaggagcggaacagcctgcaagaccagctggacgaggagatggaggccaagcagaacctggagcgccacatctccactctcaacatccagctctccgactcgaagaagaagctgcaggactttgccagcaccgtggaagctctggaagaggggaagaagaggttccagaaggagatcgagaacctcacccagcagtacgaggagaaggcggccgcttatgataaactggaaaagaccaagaacaggcttcagcaggagctggacgacctggttgttgatttggacaaccagcggcaactcgtgtccaacctggaaaagaagcagaggaaatttgatcagttgttagccgaggagaaaaacatctcttccaaatacgcggatgagagggacagagctgaggcagaagccagggagaaggaaaccaaggccctgtccctggctcgggcccttgaagaggccttggaagccaaagaggaactcgagcggaccaacaaaatgctcaaagccgaaatggaagacctggtcagctccaaggatgacgtgggcaagaacgtccatgagctggagaagtccaagcgggccctggagacccagatggaggagatgaagacgcagctggaagagctggaggacgagctgcaagccacggaggacgccaaactgcggctggaagtcaacatgcaggcgctcaagggccagttcgaaagggatctccaagcccgggacgagcagaatgaggagaagaggaggcaactgcagagacagcttcacgagtatgagacggaactggaagacgagcgaaagcaacgtgccctggcagctgcagcaaagaagaagctggaaggggacctgaaagacctggagcttcaggccgactctgccatcaaggggagggaggaagccatcaagcagctacgcaaactgcaggctcagatgaaggactttcaaagagagctggaagatgcccgtgcctccagagatgagatctttgccacagccaaagagaatgagaagaaagccaagagcttggaagcagacctcatgcagctacaagaggacctcgccgccgctgagagggctcgcaaacaagcggacctcgagaaggaggaactggcagaggagctggccagtagcctgtcgggaaggaacgcactccaggacgagaagcgccgcctggaggcccggatcgcccagctggaggaggagctggaggaggagcagggcaacatggaggccatgagcgaccgggtccgcaaagccacacagcaggccgagcagctcagcaacgagctggccacagagcgcagcacggcccagaagaatgagagtgcccggcagcagctcgagcggcagaacaaggagctccggagcaagctccacgagatggagggggccgtcaagtccaagttcaagtccaccatcgcggcgctggaggccaagattgcacagctggaggagcaggtcgagcaggaggccagagagaaacaggcggccaccaagtcgctgaagcagaaagacaagaagctgaaggaaatcttgctgcaggtggaggacgagcgcaagatggccgagcagtacaaggagcaggcagagaaaggcaatgccagggtcaagcagctcaagaggcagctggaggaggcagaggaggagtcccagcgcatcaacgccaaccgcaggaagctgcagcgggagctggatgaggccacggagagcaacgaggccatgggccgcgaggtgaacgcactcaagagcaagctcagagggccccccccacaggaaacttcgcagtgatgcaccaggcgaggaaacgagacctctttcgttccttctagaaggtctggaggacgtagagttattgaaaatgcagatggttctgaggaggaaacggacactcgagacgcagacttcaatggaaccaaggccagtgaataagcaactttctacagttttgcaccacggcaagaaaaccaaaaaccaaaacaaacaaacaaaaaaaacccaacaacaacccagaacaaagcaaaacccagcagactgtacttagcattgtctaaatccattctcaaattccaaatatcacagacacccctcacacaaggaatataaaaaccaccaccctccagcctgggcaacgtagtaaaacctcatctatacaagaatttaaaaataagctgggcgtggtggtacacacctgtggtcccagctactagggaggctgagccaggaagaacgctccagcccaggacttcgaggctgcaatgagctataattgcatcattgcactccagcctgggcaacagagacctgtctcanacacacancaacaacacctactacccctgtatcaaggtcacaatgacgtgttgatgcaaaaaaaaaaaaaaaaaaaatttgggggcggtccgacccagaaaggtttaaaccactcggtggggccgggcccaagtgaatgaaatggcctcgggccagaggccgggcagcagcgggttccccaaagacccggcggccgggttcgacacccaggtcggcctcgtcaccaggcgccgagcccccccgccgcgaaagcaaaataaacgaaaaaagacaaccgcaaaacg

SEQ ID NO: 367300 - DNA, 4411 bp, Homo sapiens
  misc_feature (42)..(42): n is a, c, g, or t
  misc_feature (45)..(45): n is a, c, g, or t
tcccccccccggccccccccccggctccggccagccactacngcntactactactactaaattcgcggccgcgtcgacccacgcccaacttcgtgcgctgcatcatccccaaccacgagaagaggtccggcaagctggatgcgttcctggtgctggagcagctgcggtgcaatggggtgctggaaggcattcgcatctgccggcagggcttccccaaccggatcgtcttccaggagttccgccaacgctacgagatcctggcggcgaatgccatccccaaaggcttcatggacgggaagcaggcctgcattctcatgatcaaagccctggaacttgaccccaacttatacaggatagggcagagcaaaatcttcttccgaactggcgtcctggcccacctagaggaggagcgagatttgaagatcaccgatgtcatcatggccttccaggcgatgtgtcgtggctacttggccagaaaggcttttgccaagaggcagcagcagctgaccgccatgaaggtgattcagaggaactgcgccgcctacctcaagctgcggaactggcagtggtggaggcttttcaccaaagtgaagccactgctgcaggtgacacggcaggaggaggagatgcaggccaaggaggatgaactgcagaagaccaaggagcggcagcagaaggcagagaatgagcttaaggagctggaacagaagcactcgcagctgaccgaggagaagaacctgctacaggaacagctgcaggcagagacagagctgtatgcagaggctgaggagatgcgggtgcggctggcggccaagaagcaggagctggaggagatactgcatgagatggaggcccgcctggaggaggaggaagacaggggccagcagctacaggctgaaaggaagaagatggcccagcagatgctggaccttgaagaacagctggaggaggaggaagctgccaggcagaagctgcaacttgagaaggtcacggctgaggccaagatcaagaaactggaggatgagatcctggtcatggatgatcagaacaataaactatcaaaagaacgaaaactccttgaggagaggattagtgacttaacgacaaatcttgcagaagaggaagaaaaggccaagaatcttaccaagctgaaaaacaagcatgaatctatgatttcagaactggaagtgcggctaaagaaggaagagaagagccgacaggagctggagaagctgaaacggaagctggagggtgatgccagcgacttccacgagcagatcgctgacctccaggcgcagatcgcagagctcaagatgcagctggccaagaaggaggaggagctgcaggcggccctggccaggcttgacgatgaaatcgctcagaagaacaatgccctgaagaagatccgggagctggagggccacatctcagacctccaggaggacctggactcagagcgggccgccaggaacaaggctgaaaagcagaagcgagacctcggcgaggagctggaggccctaaagacagagctggaagacacactggacagcacagccactcagcaggagctcagggccaagagggagcaggaggtgacggtgctgaagaaggccctggatgaagagacgcggtcccatgaggctcaggtccaggagatgaggcagaaacacgcacaggcggtggaggagctcacagagcagcttgagcagttcaagagggccaaggcgaacctagacaagaataagcagacgctggagaaagagaacgcagacctggccggggagctgcgggtcctgggccaggccaagcaggaggtggaacataagaagaagaagctggaggcgcaggtgcaggagctgcagtccaagtgcagcgatggggagcgggcccgggcggagctcaatgacaaagtccacaagctgcagaatgaagttgagagcgtcacagggatgcttaacgaggccgaggggaaggccattaagctggccaaggacgtggcgtccctcagttcccagctccaggacacccaggagctgcttcaagaagaaacccggcagaagctcaacgtgtctacgaagctgcgccagctggaggaggagcggaacagcctgcaagaccagctggacgaggagatggaggccaagcagaacctggagcgccacatctccactctcaacatccagctctccgactcgaagaagaagctgcaggactttgccagcaccgtggaagctctggaagaggggaagaagaggttccagaaggagatcgagaacctcacccagcagtacgaggagaaggcggccgcttatgataaactggaaaagaccaagaacaggcttcagcaggagctggacgacctggttgttgatttggacaaccagcggcaactcgtgtccaacctggaaaagaagcagaggaaatttgatcagttgttagccgaggagaaaaacatctcttccaaatacgcggatgagagggacagagctgaggcagaagccagggagaaggaaaccaaggccctgtccctggctcgggcccttgaagaggccttggaagccaaagaggaactcgagcggaccaacaaaatgctcaaagccgaaatggaagacctggtcagctccaaggatgacgtgggcaagaacgtccatgagctggagaagtccaagcgggccctggagacccagatggaggagatgaagacgcagctggaagagctggaggacgagctgcaagccacggaggacgccaaactgcggctggaagtcaacatgcaggcgctcaagggccagttcgaaagggatctccaagcccgggacgagcagaatgaggagaagaggaggcaactgcagagacagcttcacgagtatgagacggaactggaagacgagcgaaagcaacgtgccctggcagctgcagcaaagaagaagctggaaggggacctgaaagacctggagcttcaggccgactctgccatcaaggggagggaggaagccatcaagcagctacgcaaactgcaggctcagatgaaggactttcaaagagagctggaagatgcccgtgcctccagagatgagatctttgccacagccaaagagaatgagaagaaagccaagagcttggaagcagacctcatgcagctacaagaggacctcgccgccgctgagagggctcgcaaacaagcggacctcgagaaggaggaactggcagaggagctggccagtagcctgtcgggaaggaacgcactccaggacgagaagcgccgcctggaggcccggatcgcccagctggaggaggagctggaggaggagcagggcaacatggaggccatgagcgaccgggtccgcaaagccacacagcaggccgagcagctcagcaacgagctggccacagagcgcagcacggcccagaagaatgagagtgcccggcagcagctcgagcggcagaacaaggagctccggagcaagctccacgagatggagggggccgtcaagtccaagttcaagtccaccatcgcggcgctggaggccaagattgcacagctggaggagcaggtcgagcaggaggccagagagaaacaggcggccaccaagtcgctgaagcagaaagacaagaagctgaaggaaatcttgctgcaggtggaggacgagcgcaagatggccgagcagtacaaggagcaggcagagaaaggcaatgccagggtcaagcagctcaagaggcagctggaggaggcagaggaggagtcccagcgcatcaacgccaaccgcaggaagctgcagcgggagctggatgaggccacggagagcaacgaggccatgggccgcgaggtgaacgcactcaagagcaagctcagagggccccccccacaggaaacttcgcagtgatgcaccaggcgaggaaacgagacctctttcgttccttctagaaggtctggaggacgtagagttattgaaaatgcagatggttctgaggaggaaacggacactcgagacgcagacttcaatggaaccaaggccagtgaataagcaactttctacagttttgcaccacggcaagaaaaccaaaaaccaaaacaaacaaacaaaaaaaacccaacaacaacccagaacaaagcaaaacccagcagactgtacttagcattgtctaaatccattctcaaattccaaatatcacagacacccctcacacaaggaatataaaaaccaccaccctccagcctgggcaacgtagtaaaacctcatctatacaagaaaccaaaaaccaaaacaaacaaacaaaaaaaacccaacaacaacccagaacaaagcaaaacccagcagactgtacttagcattgtctaaatccattctcaaattccaaatatcacagacacccctcatcctaccaaaggggagtcctctagagtgacctc

SEQ ID NO: 367301 - DNA, 3924 bp, Homo sapiens
  misc_feature (42)..(42): n is a, c, g, or t
  misc_feature (45)..(45): n is a, c, g, or t
tcccccccccggccccccccccggctccggccagccactacngcntactactactactaaattcgcggccgcgtcgacccacgcccaacttcgtgcgctgcatcatccccaaccacgagaagaggtccggcaagctggatgcgttcctggtgctggagcagctgcggtgcaatggggtgctggaaggcattcgcatctgccggcagggcttccccaaccggatcgtcttccaggagttccgccaacgctacgagatcctggcggcgaatgccatccccaaaggcttcatggacgggaagcaggcctgcattctcatgatcaaagccctggaacttgaccccaacttatacaggatagggcagagcaaaatcttcttccgaactggcgtcctggcccacctagaggaggagcgagatttgaagatcaccgatgtcatcatggccttccaggcgatgtgtcgtggctacttggccagaaaggcttttgccaagaggcagcagcagctgaccgccatgaaggtgattcagaggaactgcgccgcctacctcaagctgcggaactggcagtggtggaggcttttcaccaaagtgaagccactgctgcaggtgacacggcaggaggaggagatgcaggccaaggaggatgaactgcagaagaccaaggagcggcagcagaaggcagagaatgagcttaaggagctggaacagaagcactcgcagctgaccgaggagaagaacctgctacaggaacagctgcaggcagagacagagctgtatgcagaggctgaggagatgcgggtgcggctggcggccaagaagcaggagctggaggagatactgcatgagatggaggcccgcctggaggaggaggaagacaggggccagcagctacaggctgaaaggaagaagatggcccagcagatgctggaccttgaagaacagctggaggaggaggaagctgccaggcagaagctgcaacttgagaaggtcacggctgaggccaagatcaagaaactggaggatgagatcctggtcatggatgatcagaacaataaactatcaaaagaacgaaaactccttgaggagaggattagtgacttaacgacaaatcttgcagaagaggaagaaaaggccaagaatcttaccaagctgaaaaacaagcatgaatctatgatttcagaactggaagtgcggctaaagaaggaagagaagagccgacaggagctggagaagctgaaacggaagctggagggtgatgccagcgacttccacgagcagatcgctgacctccaggcgcagatcgcagagctcaagatgcagctggccaagaaggaggaggagctgcaggcggccctggccaggcttgacgatgaaatcgctcagaagaacaatgccctgaagaagatccgggagctggagggccacatctcagacctccaggaggacctggactcagagcgggccgccaggaacaaggctgaaaagcagaagcgagacctcggcgaggagctggaggccctaaagacagagctggaagacacactggacagcacagccactcagcaggagctcagggccaagagggagcaggaggtgacggtgctgaagaaggccctggatgaagagacgcggtcccatgaggctcaggtccaggagatgaggcagaaacacgcacaggcggtggaggagctcacagagcagcttgagcagttcaagagggccaaggcgaacctagacaagaataagcagacgctggagaaagagaacgcagacctggccggggagctgcgggtcctgggccaggccaagcaggaggtggaacataagaagaagaagctggaggcgcaggtgcaggagctgcagtccaagtgcagcgatggggagcgggcccgggcggagctcaatgacaaagtccacaagctgcagaatgaagttgagagcgtcacagggatgcttaacgaggccgaggggaaggccattaagctggccaaggacgtggcgtccctcagttcccagctccaggacacccaggaggaagccatcaagcagctacgcaaactgcaggctcagatgaaggactttcaaagagagctggaagatgcccgtgcctccagagatgagatctttgccacagccaaagagaatgagaagaaagccaagagcttggaagcagacctcatgcagctacaagaggacctcgccgccgctgagagggctcgcaaacaagcggacctcgagaaggaggaactggcagaggagctggccagtagcctgtcgggaaggaacgcactccaggacgagaagcgccgcctggaggcccggatcgcccagctggaggaggagctggaggaggagcagggcaacatggaggccatgagcgaccgggtccgcaaagccacacagcaggccgagcagctcagcaacgagctggccacagagcgcagcacggcccagaagaatgagagtgcccggcagcagctcgagcggcagaacaaggagctccggagcaagctccacgagatggagggggccgtcaagtccaagttcaagtccaccatcgcggcgctggaggccaagattgcacagctggaggagcaggtcgagcaggaggccagagagaaacaggcggccaccaagtcgctgaagcagaaagacaagaagctgaaggaaatcttgctgcaggtggaggacgagcgcaagatggccgagcagtacaaggagcaggcagagaaaggcaatgccagggtcaagcagctcaagaggcagctggaggaggcagaggaggagtcccagcgcatcaacgccaaccgcaggaagctgcagcgggagctggatgaggccacggagagcaacgaggccatgggccgcgaggtgaacgcactcaagagcaagctcagagggccccccccacaggaaacttcgcagtgatgcaccaggcgaggaaacgagacctctttcgttccttctagaaggtctggaggacgtagagttattgaaaatgcagatggttctgaggaggaaacggacactcgagacgcagacttcaatggaaccaaggccagtgaataagcaactttctacagttttgcaccacggcaagaaaaccaaaaaccaaaacaaacaaacaaaaaaaacccaacaacaacccagaacaaagcaaaacccagcagactgtacttagcattgtctaaatccattctcaaattccaaatatcacagacacccctcacacaaggaatataaaaaccaccaccctccagcctgggcaacgtagtaaaacctcatctatacaagaatttaaaaataagctgggcgtggtggtacacacctgtggtcccagctactagggaggctgagccaggaagaacgctccagcccaggacttcgaggctgcaatgagctataattgcatcattgcactccagcctgggcaacagagaccctgtctcaaccaccaccaccaccaccacccctactacccctgtattcaaggtaaaaattgaagtttgtatgatgtaagagatgagaaaaacccaacaggaaacacagacacatcctccagttctatcaatggattgtgcagacactgagtttttagaaaaacatatccacggtaaccggtccctggcaattctgtttacatgaaatggggagaaagtcaccgaaatgggtgccgccggcccccactcccaattcattccctaacctgcaaacctttccaacttctcacgtcaggcctttgagaattctttccccctctcctggtttccacacctcagacacgcacagttcaccaagtgccttctgtagtcacatgaattgaaaaggagacgctgctcccacggaggggagcaggaatgctgcactgtttacaccctgactgtgcttaaaaacactttcactaataaatggttataaatcacaa

SEQ ID NO: 367302 - DNA, 4218 bp, Homo sapiens
  misc_feature (42)..(42): n is a, c, g, or t
  misc_feature (45)..(45): n is a, c, g, or t
tcccccccccggccccccccccggctccggccagccactacngcntactactactactaaattcgcggccgcgtcgacccacgcccaacttcgtgcgctgcatcatccccaaccacgagaagaggtccggcaagctggatgcgttcctggtgctggagcagctgcggtgcaatggggtgctggaaggcattcgcatctgccggcagggcttccccaaccggatcgtcttccaggagttccgccaacgctacgagatcctggcggcgaatgccatccccaaaggcttcatggacgggaagcaggcctgcattctcatgatcaaagccctggaacttgaccccaacttatacaggatagggcagagcaaaatcttcttccgaactggcgtcctggcccacctagaggaggagcgagatttgaagatcaccgatgtcatcatggccttccaggcgatgtgtcgtggctacttggccagaaaggcttttgccaagaggcagcagcagctgaccgccatgaaggtgattcagaggaactgcgccgcctacctcaagctgcggaactggcagtggtggaggcttttcaccaaagtgaagccactgctgcaggtgacacggcaggaggaggagatgcaggccaaggaggatgaactgcagaagaccaaggagcggcagcagaaggcagagaatgagcttaaggagctggaacagaagcactcgcagctgaccgaggagaagaacctgctacaggaacagctgcaggcagagacagagctgtatgcagaggctgaggagatgcgggtgcggctggcggccaagaagcaggagctggaggagatactgcatgagatggaggcccgcctggaggaggaggaagacaggggccagcagctacaggctgaaaggaagaagatggcccagcagatgctggaccttgaagaacagctggaggaggaggaagctgccaggcagaagctgcaacttgagaaggtcacggctgaggccaagatcaagaaactggaggatgagatcctggtcatggatgatcagaacaataaactatcaaaagaacgaaaactccttgaggagaggattagtgacttaacgacaaatcttgcagaagaggaagaaaaggccaagaatcttaccaagctgaaaaacaagcatgaatctatgatttcagaactggaagtgcggctaaagaaggaagagaagagccgacaggagctggagaagctgaaacggaagctggagggtgatgccagcgacttccacgagcagatcgctgacctccaggcgcagatcgcagagctcaagatgcagctggccaagaaggaggaggagctgcaggcggccctggccaggcttgacgatgaaatcgctcagaagaacaatgccctgaagaagatccgggagctggagggccacatctcagacctccaggaggacctggactcagagcgggccgccaggaacaaggctgaaaagcagaagcgagacctcggcgaggagctggaggccctaaagacagagctggaagacacactggacagcacagccactcagcaggagctcagggccaagagggagcaggaggtgacggtgctgaagaaggccctggatgaagagacgcggtcccatgaggctcaggtccaggagatgaggcagaaacacgcacaggcggtggaggagctcacagagcagcttgagcagttcaagagggccaaggcgaacctagacaagaataagcagacgctggagaaagagaacgcagacctggccggggagctgcgggtcctgggccaggccaagcaggaggtggaacataagaagaagaagctggaggcgcaggtgcaggagctgcagtccaagtgcagcgatggggagcgggcccgggcggagctcaatgacaaagtccacaagctgcagaatgaagttgagagcgtcacagggatgcttaacgaggccgaggggaaggccattaagctggccaaggacgtggcgtccctcagttcccagctccaggacacccaggagctgcttcaagaagaaacccggcagaagctcaacgtgtctacgaagctgcgccagctggaggaggagcggaacagcctgcaagaccagctggacgaggagatggaggccaagcagaacctggagcgccacatctccactctcaacatccagctctccgactcgaagaagaagctgcaggactttgccagcaccgtggaagctctggaagaggggaagaagaggttccagaaggagatcgagaacctcacccagcagtacgaggagaaggcggccgcttatgataaactggaaaagaccaagaacaggcttcagcaggagctggacgacctggttgttgatttggacaaccagcggcaactcgtgtccaacctggaaaagaagcagaggaaatttgatcagttgttagccgaggagaaaaacatctcttccaaatacgcggatgagagggacagagctgaggcagaagccagggagaaggaaaccaaggccctgtccctggctcgggcccttgaagaggccttggaagccaaagaggaactcgagcggaccaacaaaatgctcaaagccgaaatggaagacctggtcagctccaaggatgacgtgggcaagaacgtccatgagctggagaagtccaagcgggccctggagacccagatggaggagatgaagacgcagctggaagagctggaggacgagctgcaagccacggaggacgccaaactgcggctggaagtcaacatgcaggcgctcaagggccagttcgaaagggatctccaagcccgggacgagcagaatgaggagaagaggaggcaactgcagagacagcttcacgagtatgagacggaactggaagacgagcgaaagcaacgtgccctggcagctgcagcaaagaagaagctggaaggggacctgaaagacctggagcttcaggccgactctgccatcaaggggagggaggaagccatcaagcagctacgcaaactgcaggctcagatgaaggactttcaaagagagctggaagatgcccgtgcctccagagatgagatctttgccacagccaaagagaatgagaagaaagccaagagcttggaagcagacctcatgcagctacaagaggacctcgccgccgctgagagggctcgcaaacaagcggacctcgagaaggaggaactggcagaggagctggccagtagcctgtcgggaaggaacgcactccaggacgagaagcgccgcctggaggcccggatcgcccagctggaggaggagctggaggaggagcagggcaacatggaggccatgagcgaccgggtccgcaaagccacacagcaggccgagcagctcagcaacgagctggccacagagcgcagcacggcccagaagaatgagagtgcccggcagcagctcgagcggcagaacaaggagctccggagcaagctccacgagatggagggggccgtcaagtccaagttcaagtccaccatcgcggcgctggaggccaagattgcacagctggaggagcaggtcgagcaggaggccagagagaaacaggcggccaccaagtcgctgaagcagaaagacaagaagctgaaggaaatcttgctgcaggtggaggacgagcgcaagatggccgagcagtacaaggagcaggcagagaaaggcaatgccagggtcaagcagctcaagaggcagctggaggaggcagaggaggagtcccagcgcatcaacgccaaccgcaggaagctgcagcgggagctggatgaggccacggagagcaacgaggccatgggccgcgaggtgaacgcactcaagagcaagctcagagggccccccccacaggaaacttcgcagtgatgcaccaggcgaggaaacgagacctctttcgttccttctagaaggtctggaggacgtagagttattgaaaatgcagatggttctgaggaggaaacggacactcgagacgcagacttcaatggaaccaaggccagtgaataagcaactttctacagttttgcaccacggcaagaaaaccaaaaaccaaaacaaacaaacaaaaaaaacccaacaacaacccagaacaaagcaaaacccagcagactgtacttagcattgtctaaatccattctcaaattccaaatatcacagacacccctcatcctaccaaaggggagtcctctagagtgacctc

SEQ ID NO: 367303 - DNA, 4126 bp, Homo sapiens
  misc_feature (42)..(42): n is a, c, g, or t
  misc_feature (45)..(45): n is a, c, g, or t
tcccccccccggccccccccccggctccggccagccactacngcntactactactactaaattcgcggccgcgtcgacccacgcccaacttcgtgcgctgcatcatccccaaccacgagaagaggtccggcaagctggatgcgttcctggtgctggagcagctgcggtgcaatggggtgctggaaggcattcgcatctgccggcagggcttccccaaccggatcgtcttccaggagttccgccaacgctacgagatcctggcggcgaatgccatccccaaaggcttcatggacgggaagcaggcctgcattctcatgatcaaagccctggaacttgaccccaacttatacaggatagggcagagcaaaatcttcttccgaactggcgtcctggcccacctagaggaggagcgagatttgaagatcaccgatgtcatcatggccttccaggcgatgtgtcgtggctacttggccagaaaggcttttgccaagaggcagcagcagctgaccgccatgaaggtgattcagaggaactgcgccgcctacctcaagctgcggaactggcagtggtggaggcttttcaccaaagtgaagccactgctgcaggtgacacggcaggaggaggagatgcaggccaaggaggatgaactgcagaagaccaaggagcggcagcagaaggcagagaatgagcttaaggagctggaacagaagcactcgcagctgaccgaggagaagaacctgctacaggaacagctgcaggcagagacagagctgtatgcagaggctgaggagatgcgggtgcggctggcggccaagaagcaggagctggaggagatactgcatgagatggaggcccgcctggaggaggaggaagacaggggccagcagctacaggctgaaaggaagaagatggcccagcagatgctggaccttgaagaacagctggaggaggaggaagctgccaggcagaagctgcaacttgagaaggtcacggctgaggccaagatcaagaaactggaggatgagatcctggtcatggatgatcagaacaataaactatcaaaagaacgaaaactccttgaggagaggattagtgacttaacgacaaatcttgcagaagaggaagaaaaggccaagaatcttaccaagctgaaaaacaagcatgaatctatgatttcagaactggaagtgcggctaaagaaggaagagaagagccgacaggagctggagaagctgaaacggaagctggagggtgatgccagcgacttccacgagcagatcgctgacctccaggcgcagatcgcagagctcaagatgcagctggccaagaaggaggaggagctgcaggcggccctggccaggcttgacgatgaaatcgctcagaagaacaatgccctgaagaagatccgggagctggagggccacatctcagacctccaggaggacctggactcagagcgggccgccaggaacaaggctgaaaagcagaagcgagacctcggcgaggagctggaggccctaaagacagagctggaagacacactggacagcacagccactcagcaggagctcagggccaagagggagcaggaggtgacggtgctgaagaaggccctggatgaagagacgcggtcccatgaggctcaggtccaggagatgaggcagaaacacgcacaggcggtggaggagctcacagagcagcttgagcagttcaagagggccaaggcgaacctagacaagaataagcagacgctggagaaagagaacgcagacctggccggggagctgcgggtcctgggccaggccaagcaggaggtggaacataagaagaagaagctggaggcgcaggtgcaggagctgcagtccaagtgcagcgatggggagcgggcccgggcggagctcaatgacaaagtccacaagctgcagaatgaagttgagagcgtcacagggatgcttaacgaggccgaggggaaggccattaagctggccaaggacgtggcgtccctcagttcccagctccaggacacccaggagctgcttcaagaagaaacccggcagaagctcaacgtgtctacgaagctgcgccagctggaggaggagcggaacagcctgcaagaccagctggacgaggagatggaggccaagcagaacctggagcgccacatctccactctcaacatccagctctccgactcgaagaagaagctgcaggactttgccagcaccgtggaagctctggaagaggggaagaagaggttccagaaggagatcgagaacctcacccagcagtacgaggagaaggcggccgcttatgataaactggaaaagaccaagaacaggcttcagcaggagctggacgacctggttgttgatttggacaaccagcggcaactcgtgtccaacctggaaaagaagcagaggaaatttgatcagttgttagccgaggagaaaaacatctcttccaaatacgcggatgagagggacagagctgaggcagaagccagggagaaggaaaccaaggccctgtccctggctcgggcccttgaagaggccttggaagccaaagaggaactcgagcggaccaacaaaatgctcaaagccgaaatggaagacctggtcagctccaaggatgacgtgggcaagaacgtccatgagctggagaagtccaagcgggccctggagacccagatggaggagatgaagacgcagctggaagagctggaggacgagctgcaagccacggaggacgccaaactgcggctggaagtcaacatgcaggcgctcaagggccagttcgaaagggatctccaagcccgggacgagcagaatgaggagaagaggaggcaactgcagagacagcttcacgagtatgagacggaactggaagacgagcgaaagcaacgtgccctggcagctgcagcaaagaagaagctggaaggggacctgaaagacctggagcttcaggccgactctgccatcaaggggagggaggaagccatcaagcagctacgcaaactgcaggctcagatgaaggactttcaaagagagctggaagatgcccgtgcctccagagatgagatctttgccacagccaaagagaatgagaagaaagccaagagcttggaagcagacctcatgcagctacaagaggacctcgccgccgctgagagggctcgcaaacaagcggacctcgagaaggaggaactggcagaggagctggccagtagcctgtcgggaaggaacgcactccaggacgagaagcgccgcctggaggcccggatcgcccagctggaggaggagctggaggaggagcagggcaacatggaggccatgagcgaccgggtccgcaaagccacacagcaggccgagcagctcagcaacgagctggccacagagcgcagcacggcccagaagaatgagagtgcccggcagcagctcgagcggcagaacaaggagctccggagcaagctccacgagatggagggggccgtcaagtccaagttcaagtccaccatcgcggcgctggaggccaagattgcacagctggaggagcaggtcgagcaggaggccagagagaaacaggcggccaccaagtcgctgaagcagaaagacaagaagctgaaggaaatcttgctgcaggtggaggacgagcgcaagatggccgagcagtacaaggagcaggcagagaaaggcaatgccagggtcaagcagctcaagaggcagctggaggaggcagaggaggagtcccagcgcatcaacgccaaccgcaggaagctgcagcgggagctggatgaggccacggagagcaacgaggccatgggccgcgaggtgaacgcactcaagagcaagctcagagggccccccccacaggaaacttcgcagtgatgcaccaggcgaggaaacgagacctctttcgttccttctagaaggtctggaggacgtagagttattgaaaatgcagatggttctgaggaggaaacggacactcgagacgcagacttcaatggaaccaaggccagtgaataagcaactttctacagttttgcaccacggcaagaaaatacctataaaccctaaaactaaactatatcaaaaataaaaatccctaaccaacaatccccagtaaa

SEQ ID NO: 367304 - DNA, 4156 bp, Homo sapiens
  misc_feature (42)..(42): n is a, c, g, or t
  misc_feature (45)..(45): n is a, c, g, or t
tcccccccccggccccccccccggctccggccagccactacngcntactactactactaaattcgcggccgcgtcgacccacgcccaacttcgtgcgctgcatcatccccaaccacgagaagaggtccggcaagctggatgcgttcctggtgctggagcagctgcggtgcaatggggtgctggaaggcattcgcatctgccggcagggcttccccaaccggatcgtcttccaggagttccgccaacgctacgagatcctggcggcgaatgccatccccaaaggcttcatggacgggaagcaggcctgcattctcatgatcaaagccctggaacttgaccccaacttatacaggatagggcagagcaaaatcttcttccgaactggcgtcctggcccacctagaggaggagcgagatttgaagatcaccgatgtcatcatggccttccaggcgatgtgtcgtggctacttggccagaaaggcttttgccaagaggcagcagcagctgaccgccatgaaggtgattcagaggaactgcgccgcctacctcaagctgcggaactggcagtggtggaggcttttcaccaaagtgaagccactgctgcaggtgacacggcaggaggaggagatgcaggccaaggaggatgaactgcagaagaccaaggagcggcagcagaaggcagagaatgagcttaaggagctggaacagaagcactcgcagctgaccgaggagaagaacctgctacaggaacagctgcaggcagagacagagctgtatgcagaggctgaggagatgcgggtgcggctggcggccaagaagcaggagctggaggagatactgcatgagatggaggcccgcctggaggaggaggaagacaggggccagcagctacaggctgaaaggaagaagatggcccagcagatgctggaccttgaagaacagctggaggaggaggaagctgccaggcagaagctgcaacttgagaaggtcacggctgaggccaagatcaagaaactggaggatgagatcctggtcatggatgatcagaacaataaactatcaaaagaacgaaaactccttgaggagaggattagtgacttaacgacaaatcttgcagaagaggaagaaaaggccaagaatcttaccaagctgaaaaacaagcatgaatctatgatttcagaactggaagtgcggctaaagaaggaagagaagagccgacaggagctggagaagctgaaacggaagctggagggtgatgccagcgacttccacgagcagatcgctgacctccaggcgcagatcgcagagctcaagatgcagctggccaagaaggaggaggagctgcaggcggccctggccaggcttgacgatgaaatcgctcagaagaacaatgccctgaagaagatccgggagctggagggccacatctcagacctccaggaggacctggactcagagcgggccgccaggaacaaggctgaaaagcagaagcgagacctcggcgaggagctggaggccctaaagacagagctggaagacacactggacagcacagccactcagcaggagctcagggccaagagggagcaggaggtgacggtgctgaagaaggccctggatgaagagacgcggtcccatgaggctcaggtccaggagatgaggcagaaacacgcacaggcggtggaggagctcacagagcagcttgagcagttcaagagggccaaggcgaacctagacaagaataagcagacgctggagaaagagaacgcagacctggccggggagctgcgggtcctgggccaggccaagcaggaggtggaacataagaagaagaagctggaggcgcaggtgcaggagctgcagtccaagtgcagcgatggggagcgggcccgggcggagctcaatgacaaagtccacaagctgcagaatgaagttgagagcgtcacagggatgcttaacgaggccgaggggaaggccattaagctggccaaggacgtggcgtccctcagttcccagctccaggacacccaggagctgcttcaagaagaaacccggcagaagctcaacgtgtctacgaagctgcgccagctggaggaggagcggaacagcctgcaagaccagctggacgaggagatggaggccaagcagaacctggagcgccacatctccactctcaacatccagctctccgactcgaagaagaagctgcaggactttgccagcaccgtggaagctctggaagaggggaagaagaggttccagaaggagatcgagaacctcacccagcagtacgaggagaaggcggccgcttatgataaactggaaaagaccaagaacaggcttcagcaggagctggacgacctggttgttgatttggacaaccagcggcaactcgtgtccaacctggaaaagaagcagaggaaatttgatcagttgttagccgaggagaaaaacatctcttccaaatacgcggatgagagggacagagctgaggcagaagccagggagaaggaaaccaaggccctgtccctggctcgggcccttgaagaggccttggaagccaaagaggaactcgagcggaccaacaaaatgctcaaagccgaaatggaagacctggtcagctccaaggatgacgtgggcaagaacgtccatgagctggagaagtccaagcgggccctggagacccagatggaggagatgaagacgcagctggaagagctggaggacgagctgcaagccacggaggacgccaaactgcggctggaagtcaacatgcaggcgctcaagggccagttcgaaagggatctccaagcccgggacgagcagaatgaggagaagaggaggcaactgcagagacagcttcacgagtatgagacggaactggaagacgagcgaaagcaacgtgccctggcagctgcagcaaagaagaagctggaaggggacctgaaagacctggagcttcaggccgactctgccatcaaggggagggaggaagccatcaagcagctacgcaaactgcaggctcagatgaaggactttcaaagagagctggaagatgcccgtgcctccagagatgagatctttgccacagccaaagagaatgagaagaaagccaagagcttggaagcagacctcatgcagctacaagaggacctcgccgccgctgagagggctcgcaaacaagcggacctcgagaaggaggaactggcagaggagctggccagtagcctgtcgggaaggaacgcactccaggacgagaagcgccgcctggaggcccggatcgcccagctggaggaggagctggaggaggagcagggcaacatggaggccatgagcgaccgggtccgcaaagccacacagcaggccgagcagctcagcaacgagctggccacagagcgcagcacggcccagaagaatgagagtgcccggcagcagctcgagcggcagaacaaggagctccggagcaagctccacgagatggagggggccgtcaagtccaagttcaagtccaccatcgcggcgctggaggccaagattgcacagctggaggagcaggtcgagcaggaggccagagagaaacaggcggccaccaagtcgctgaagcagaaagacaagaagctgaaggaaatcttgctgcaggtggaggacgagcgcaagatggccgagcagtacaaggagcaggcagagaaaggcaatgccagggtcaagcagctcaagaggcagctggaggaggcagaggaggagtcccagcgcatcaacgccaaccgcaggaagctgcagcgggagctggatgaggccacggagagcaacgaggccatgggccgcgaggtgaacgcactcaagagcaagctcaggcgaggaaacgagacctctttcgttccttctagaaggtctggaggacgtagagttattgaaaatgcagatggttctgaggaggaaacggacactcgagacgcagacttcaatggaaccaaggccagtgattagcatttaagtttggaccaggaaaaaaaaaaaaaaaaaaaaaaatttttgggccgggcccagaaagtttagactctttgggggggccaaggtggacggtaggttcaggaacggggagagggtggtctccaaaaagggggggagggtggacacaagggtgggtggtacaggcg

SEQ ID NO: 367305 - DNA, 4117 bp, Homo sapiens
  misc_feature (42)..(42): n is a, c, g, or t
  misc_feature (45)..(45): n is a, c, g, or t
tcccccccccggccccccccccggctccggccagccactacngcntactactactactaaattcgcggccgcgtcgacccacgcccaacttcgtgcgctgcatcatccccaaccacgagaagaggtccggcaagctggatgcgttcctggtgctggagcagctgcggtgcaatggggtgctggaaggcattcgcatctgccggcagggcttccccaaccggatcgtcttccaggagttccgccaacgctacgagatcctggcggcgaatgccatccccaaaggcttcatggacgggaagcaggcctgcattctcatgatcaaagccctggaacttgaccccaacttatacaggatagggcagagcaaaatcttcttccgaactggcgtcctggcccacctagaggaggagcgagatttgaagatcaccgatgtcatcatggccttccaggcgatgtgtcgtggctacttggccagaaaggcttttgccaagaggcagcagcagctgaccgccatgaaggtgattcagaggaactgcgccgcctacctcaagctgcggaactggcagtggtggaggcttttcaccaaagtgaagccactgctgcaggtgacacggcaggaggaggagatgcaggccaaggaggatgaactgcagaagaccaaggagcggcagcagaaggcagagaatgagcttaaggagctggaacagaagcactcgcagctgaccgaggagaagaacctgctacaggaacagctgcaggcagagacagagctgtatgcagaggctgaggagatgcgggtgcggctggcggccaagaagcaggagctggaggagatactgcatgagatggaggcccgcctggaggaggaggaagacaggggccagcagctacaggctgaaaggaagaagatggcccagcagatgctggaccttgaagaacagctggaggaggaggaagctgccaggcagaagctgcaacttgagaaggtcacggctgaggccaagatcaagaaactggaggatgagatcctggtcatggatgatcagaacaataaactatcaaaagaacgaaaactccttgaggagaggattagtgacttaacgacaaatcttgcagaagaggaagaaaaggccaagaatcttaccaagctgaaaaacaagcatgaatctatgatttcagaactggaagtgcggctaaagaaggaagagaagagccgacaggagctggagaagctgaaacggaagctggagggtgatgccagcgacttccacgagcagatcgctgacctccaggcgcagatcgcagagctcaagatgcagctggccaagaaggaggaggagctgcaggcggccctggccaggcttgacgatgaaatcgctcagaagaacaatgccctgaagaagatccgggagctggagggccacatctcagacctccaggaggacctggactcagagcgggccgccaggaacaaggctgaaaagcagaagcgagacctcggcgaggagctggaggccctaaagacagagctggaagacacactggacagcacagccactcagcaggagctcagggccaagagggagcaggaggtgacggtgctgaagaaggccctggatgaagagacgcggtcccatgaggctcaggtccaggagatgaggcagaaacacgcacaggcggtggaggagctcacagagcagcttgagcagttcaagagggccaaggcgaacctagacaagaataagcagacgctggagaaagagaacgcagacctggccggggagctgcgggtcctgggccaggccaagcaggaggtggaacataagaagaagaagctggaggcgcaggtgcaggagctgcagtccaagtgcagcgatggggagcgggcccgggcggagctcaatgacaaagtccacaagctgcagaatgaagttgagagcgtcacagggatgcttaacgaggccgaggggaaggccattaagctggccaaggacgtggcgtccctcagttcccagctccaggacacccaggagctgcttcaagaagaaacccggcagaagctcaacgtgtctacgaagctgcgccagctggaggaggagcggaacagcctgcaagaccagctggacgaggagatggaggccaagcagaacctggagcgccacatctccactctcaacatccagctctccgactcgaagaagaagctgcaggactttgccagcaccgtggaagctctggaagaggggaagaagaggttccagaaggagatcgagaacctcacccagcagtacgaggagaaggcggccgcttatgataaactggaaaagaccaagaacaggcttcagcaggagctggacgacctggttgttgatttggacaaccagcggcaactcgtgtccaacctggaaaagaagcagaggaaatttgatcagttgttagccgaggagaaaaacatctcttccaaatacgcggatgagagggacagagctgaggcagaagccagggagaaggaaaccaaggccctgtccctggctcgggcccttgaagaggccttggaagccaaagaggaactcgagcggaccaacaaaatgctcaaagccgaaatggaagacctggtcagctccaaggatgacgtgggcaagaacgtccatgagctggagaagtccaagcgggccctggagacccagatggaggagatgaagacgcagctggaagagctggaggacgagctgcaagccacggaggacgccaaactgcggctggaagtcaacatgcaggcgctcaagggccagttcgaaagggatctccaagcccgggacgagcagaatgaggagaagaggaggcaactgcagagacagcttcacgagtatgagacggaactggaagacgagcgaaagcaacgtgccctggcagctgcagcaaagaagaagctggaaggggacctgaaagacctggagcttcaggccgactctgccatcaaggggagggaggaagccatcaagcagctacgcaaactgcaggctcagatgaaggactttcaaagagagctggaagatgcccgtgcctccagagatgagatctttgccacagccaaagagaatgagaagaaagccaagagcttggaagcagacctcatgcagctacaagaggacctcgccgccgctgagagggctcgcaaacaagcggacctcgagaaggaggaactggcagaggagctggccagtagcctgtcgggaaggaacgcactccaggacgagaagcgccgcctggaggcccggatcgcccagctggaggaggagctggaggaggagcagggcaacatggaggccatgagcgaccgggtccgcaaagccacacagcaggccgagcagctcagcaacgagctggccacagagcgcagcacggcccagaagaatgagagtgcccggcagcagctcgagcggcagaacaaggagctccggagcaagctccacgagatggagggggccgtcaagtccaagttcaagtccaccatcgcggcgctggaggccaagattgcacagctggaggagcaggtcgagcaggaggccagagagaaacaggcggccaccaagtcgctgaagcagaaagacaagaagctgaaggaaatcttgctgcaggtggaggacgagcgcaagatggccgagcagtacaaggagcaggcagagaaaggcaatgccagggtcaagcagctcaagaggcagctggaggaggcagaggaggagtcccagcgcatcaacgccaaccgcaggaagctgcagcgggagctggatgaggccacggagagcaacgaggccatgggccgcgaggtgaacgcactcaagagcaagctcagagggccccccccacaggaaacttcgcagtgatgcaccaggcgaggaaacgagacctctttcgttccttctagaaggtctggaggacgtagagttattgaaaatgcagatggttctgaggaggaaacggacactcgagacgcagacttcaatggaaccaaggccagtgaataagcaactttctacagttttgcaccacggcaagaaaaccaaaacctagacaaccaccaaaacccgacacaccccgatccgtgcatcatttcgtc

SEQ ID NO: 367306 - DNA, 3862 bp, Homo sapiens
  misc_feature (42)..(42): n is a, c, g, or t
  misc_feature (45)..(45): n is a, c, g, or t
tcccccccccggccccccccccggctccggccagccactacngcntactactactactaaattcgcggccgcgtcgacccacgcccaacttcgtgcgctgcatcatccccaaccacgagaagaggtccggcaagctggatgcgttcctggtgctggagcagctgcggtgcaatggggtgctggaaggcattcgcatctgccggcagggcttccccaaccggatcgtcttccaggagttccgccaacgctacgagatcctggcggcgaatgccatccccaaaggcttcatggacgggaagcaggcctgcattctcatgatcaaagccctggaacttgaccccaacttatacaggatagggcagagcaaaatcttcttccgaactggcgtcctggcccacctagaggaggagcgagatttgaagatcaccgatgtcatcatggccttccaggcgatgtgtcgtggctacttggccagaaaggcttttgccaagaggcagcagcagctgaccgccatgaaggtgattcagaggaactgcgccgcctacctcaagctgcggaactggcagtggtggaggcttttcaccaaagtgaagccactgctgcaggtgacacggcaggaggaggagatgcaggccaaggaggatgaactgcagaagaccaaggagcggcagcagaaggcagagaatgagcttaaggagctggaacagaagcactcgcagctgaccgaggagaagaacctgctacaggaacagctgcaggcagagacagagctgtatgcagaggctgaggagatgcgggtgcggctggcggccaagaagcaggagctggaggagatactgcatgagatggaggcccgcctggaggaggaggaagacaggggccagcagctacaggctgaaaggaagaagatggcccagcagatgctggaccttgaagaacagctggaggaggaggaagctgccaggcagaagctgcaacttgagaaggtcacggctgaggccaagatcaagaaactggaggatgagatcctggtcatggatgatcagaacaataaactatcaaaagaacgaaaactccttgaggagaggattagtgacttaacgacaaatcttgcagaagaggaagaaaaggccaagaatcttaccaagctgaaaaacaagcatgaatctatgatttcagaactggaagtgcggctaaagaaggaagagaagagccgacaggagctggagaagctgaaacggaagctggagggtgatgccagcgacttccacgagcagatcgctgacctccaggcgcagatcgcagagctcaagatgcagctggccaagaaggaggaggagctgcaggcggccctggccaggcttgacgatgaaatcgctcagaagaacaatgccctgaagaagatccgggagctggagggccacatctcagacctccaggaggacctggactcagagcgggccgccaggaacaaggctgaaaagcagaagcgagacctcggcgaggagctggaggccctaaagacagagctggaagacacactggacagcacagccactcagcaggagctcagggccaagagggagcaggaggtgacggtgctgaagaaggccctggatgaagagacgcggtcccatgaggctcaggtccaggagatgaggcagaaacacgcacaggcggtggaggagctcacagagcagcttgagcagttcaagagggccaaggcgaacctagacaagaataagcagacgctggagaaagagaacgcagacctggccggggagctgcgggtcctgggccaggccaagcaggaggtggaacataagaagaagaagctggaggcgcaggtgcaggagctgcagtccaagtgcagcgatggggagcgggcccgggcggagctcaatgacaaagtccacaagctgcagaatgaagttgagagcgtcacagggatgcttaacgaggccgaggggaaggccattaagctggccaaggacgtggcgtccctcagttcccagctccaggacacccaggagctgcttcaagaagaaacccggcagaagctcaacgtgtctacgaagctgcgccagctggaggaggagcggaacagcctgcaagaccagctggacgaggagatggaggccaagcagaacctggagcgccacatctccactctcaacatccagctctccgactcgaagaagaagctgcaggactttgccagcaccgtggaagctctggaagaggggaagaagaggttccagaaggagatcgagaacctcacccagcagtacgaggagaaggcggccgcttatgataaactggaaaagaccaagaacaggcttcagcaggagctggacgacctggttgttgatttggacaaccagcggcaactcgtgtccaacctggaaaagaagcagaggaaatttgatcagttgttagccgaggagaaaaacatctcttccaaatacgcggatgagagggacagagctgaggcagaagccagggagaaggaaaccaaggccctgtccctggctcgggcccttgaagaggccttggaagccaaagaggaactcgagcggaccaacaaaatgctcaaagccgaaatggaagacctggtcagctccaaggatgacgtgggcaagaacgtccatgagctggagaagtccaagcgggccctggagacccagatggaggagatgaagacgcagctggaagagctggaggacgagctgcaagccacggaggacgccaaactgcggctggaagtcaacatgcaggcgctcaagggccagttcgaaagggatctccaagcccgggacgagcagaatgaggagaagaggaggcaactgcagagacagcttcacgagtatgagacggaactggaagacgagcgaaagcaacgtgccctggcagctgcagcaaagaagaagctggaaggggacctgaaagacctggagcttcaggccgactctgccatcaaggggagggaggaagccatcaagcagctacgcaaactgcaggctcagatgaaggactttcaaagagagctggaagatgcccgtgcctccagagatgagatctttgccacagccaaagagaatgagaagaaagccaagagcttggaagcagacctcatgcagctacaagaggacctcgccgccgctgagagggctcgcaaacaagcggacctcgagaaggaggaactggcagaggagctggccagtagcctgtcgggaaggaacgcactccaggacgagaagcgccgcctggaggcccggatcgcccagctggaggaggagctggaggaggagcagggcaacatggaggccatgagcgaccgggtccgcaaagccacacagcaggccgagcagctcagcaacgagctggccacagagcgcagcacggcccagaagaatgagagtgcccggcagcagctcgagcggcagaacaaggagctccggagcaagctccacgagatggagggggccgtcaagtccaagttcaagtccaccatcgcggcgctggaggccaagattgcacagctggaggagcaggtcgagcaggaggccagagagaaacaggcggccaccaagtcgctgaagcagaaagacaagaagctgaaggaaatcttgctgcaggtggaggacgagcgcaagatggccgagcagtacaaggagcaggcagagaaaggcaatgccagggtcaagcagctcaagaggcagctggaggaggcagaggaggagtcccagcttctcaggaggctgaagcaggagaatcgcttgaacccaggaggcagaggttgcagtgagtcaagatcatgccactgcactccagcctggccaacagagtgagactccttctc

SEQ ID NO: 367307 - DNA, 2881 bp, Homo sapiens
  misc_feature (42)..(42): n is a, c, g, or t
  misc_feature (45)..(45): n is a, c, g, or t
tcccccccccggccccccccccggctccggccagccactacngcntactactactactaaattcgcggccgcgtcgacccacgcccaacttcgtgcgctgcatcatccccaaccacgagaagaggtccggcaagctggatgcgttcctggtgctggagcagctgcggtgcaatggggtgctggaaggcattcgcatctgccggcagggcttccccaaccggatcgtcttccaggagttccgccaacgctacgagatcctggcggcgaatgccatccccaaaggcttcatggacgggaagcaggcctgcattctcatgatcaaagccctggaacttgaccccaacttatacaggatagggcagagcaaaatcttcttccgaactggcgtcctggcccacctagaggaggagcgagatttgaagatcaccgatgtcatcatggccttccaggcgatgtgtcgtggctacttggccagaaaggcttttgccaagaggcagcagcagctgaccgccatgaaggtgattcagaggaactgcgccgcctacctcaagctgcggaactggcagtggtggaggcttttcaccaaagtgaagccactgctgcaggtgacacggcaggaggaggagatgcaggccaaggaggatgaactgcagaagaccaaggagcggcagcagaaggcagagaatgagcttaaggagctggaacagaagcactcgcagctgaccgaggagaagaacctgctacaggaacagctgcaggcagagacagagctgtatgcagaggctgaggagatgcgggtgcggctggcggccaagaagcaggagctggaggagatactgcatgagatggaggcccgcctggaggaggaggaagacaggggccagcagctacaggctgaaaggaagaagatggcccagcagatgctggaccttgaagaacagctggaggaggaggaagctgccaggcagaagctgcaacttgagaaggtcacggctgaggccaagatcaagaaactggaggatgagatcctggtcatggatgatcagaacaataaactatcaaaagaacgaaaactccttgaggagaggattagtgacttaacgacaaatcttgcagaagaggaagaaaaggccaagaatcttaccaagctgaaaaacaagcatgaatctatgatttcagaactggaagtgcggctaaagaaggaagagaagagccgacaggagctggagaagctgaaacggaagctggagggtgatgccagcgacttccacgagcagatcgctgacctccaggcgcagatcgcagagctcaagatgcagctggccaagaaggaggaggagctgcaggcggccctggccaggcttgacgatgaaatcgctcagaagaacaatgccctgaagaagatccgggagctggagggccacatctcagacctccaggaggacctggactcagagcgggccgccaggaacaaggctgaaaagcagaagcgagacctcggcgaggagctggaggccctaaagacagagctggaagacacactggacagcacagccactcagcaggagctcagggccaagagggagcaggaggtgacggtgctgaagaaggccctggatgaagagacgcggtcccatgaggctcaggtccaggagatgaggcagaaacacgcacaggcggtggaggagctcacagagcagcttgagcagttcaagagggccaaggcgaacctagacaagaataaacggacactcgagacgcagacttcaatggaaccaaggccagtgaataagcaactttctacagttttgcaccacggcaagaaaaccaaaaaccaaaacaaacaaacaaaaaaaacccaacaacaacccagaacaaagcaaaacccagcagactgtacttagcattgtctaaatccattctcaaaaccccggaggacgtagagttattgaaaatgcagatggttctgaggaggaaacggacactcgagacgcagacttcaatggaaccaaggccagtgaataagcaactttctacagttttgcaccacggcaagaaaaccaaaaaccaaaacaaacaaacaaaaaaaacccaacaacaacccagaacaaagcaaaacccagcagactgtacttagcattgtctaaatccattctcaaattccaaatatcacagacacccctcacacaaggaatataaaaaccaccaccctccagcctgggcaacgtagtaaaacctcatctatacaagaatttaaaaataagctgggcgtggtggtacacacctgtggtcccagctactagggaggctgagccaggaagaacgctccagcccaggacttcgaggctgcaatgagctataattgcatcattgcactccagcctgggcaacagagaccctgtctcaaccaccaccaccaccaccacccctactacccctgtattcaaggtaaaaattgaagtttgtatgatgtaagagatgagaaaaacccaacaggaaacacagacacatcctccagttctatcaatggattgtgcagacactgagtttttagaaaaacatatccacggtaaccggtccctggcaattctgtttacatgaaatggggagaaagtcaccgaaatgggtgccgccggcccccactcccaattcattccctaacctgcaaacctttccaacttctcacgtcaggcctttgagaattctttccccctctcctggtttccacacctcagacacgcacagttcaccaagtgccttctgtagtcacatgaattgaaaaggagacgctgctcccacggaggggagcaggaatgctgcactgtttacaccctgactgtgcttaaaaacactttcactaataaatggttataaatcacaa

SEQ ID NO: 367308 - DNA, 3548 bp, Homo sapiens
  misc_feature (42)..(42): n is a, c, g, or t
  misc_feature (45)..(45): n is a, c, g, or t
tcccccccccggccccccccccggctccggccagccactacngcntactactactactaaattcgcggccgcgtcgacccacgcccaacttcgtgcgctgcatcatccccaaccacgagaagaggtccggcaagctggatgcgttcctggtgctggagcagctgcggtgcaatggggtgctggaaggcattcgcatctgccggcagggcttccccaaccggatcgtcttccaggagttccgccaacgctacgagatcctggcggcgaatgccatccccaaaggcttcatggacgggaagcaggcctgcattctcatgatcaaagccctggaacttgaccccaacttatacaggatagggcagagcaaaatcttcttccgaactggcgtcctggcccacctagaggaggagcgagatttgaagatcaccgatgtcatcatggccttccaggcgatgtgtcgtggctacttggccagaaaggcttttgccaagaggcagcagcagctgaccgccatgaaggtgattcagaggaactgcgccgcctacctcaagctgcggaactggcagtggtggaggcttttcaccaaagtgaagccactgctgcaggtgacacggcaggaggaggagatgcaggccaaggaggatgaactgcagaagaccaaggagcggcagcagaaggcagagaatgagcttaaggagctggaacagaagcactcgcagctgaccgaggagaagaacctgctacaggaacagctgcaggcagagacagagctgtatgcagaggctgaggagatgcgggtgcggctggcggccaagaagcaggagctggaggagatactgcatgagatggaggcccgcctggaggaggaggaagacaggggccagcagctacaggctgaaaggaagaagatggcccagcagatgctggaccttgaagaacagctggaggaggaggaagctgccaggcagaagctgcaacttgagaaggtcacggctgaggccaagatcaagaaactggaggatgagatcctggtcatggatgatcagaacaataaactatcaaaagaacgaaaactccttgaggagaggattagtgacttaacgacaaatcttgcagaagaggaagaaaaggccaagaatcttaccaagctgaaaaacaagcatgaatctatgatttcagaactggaagtgcggctaaagaaggaagagaagagccgacaggagctggagaagctgaaacggaagctggagggtgatgccagcgacttccacgagcagatcgctgacctccaggcgcagatcgcagagctcaagatgcagctggccaagaaggaggaggagctgcaggcggccctggccaggcttgacgatgaaatcgctcagaagaacaatgccctgaagaagatccgggagctggagggccacatctcagacctccaggaggacctggactcagagcgggccgccaggaacaaggctgaaaagcagaagcgagacctcggcgaggagctggaggccctaaagacagagctggaagacacactggacagcacagccactcagcaggagctcagggccaagagggagcaggaggtgacggtgctgaagaaggccctggatgaagagacgcggtcccatgaggctcaggtccaggagatgaggcagaaacacgcacaggcggtggaggagctcacagagcagcttgagcagttcaagagggccaaggcgaacctagacaagaataagcagacgctggagaaagagaacgcagacctggccggggagctgcgggtcctgggccaggccaagcaggaggtggaacataagaagaagaagctggaggcgcaggtgcaggagctgcagtccaagtgcagcgatggggagcgggcccgggcggagctcaatgacaaagtccacaagctgcagaatgaagttgagagcgtcacagggatgcttaacgaggccgaggggaaggccattaagctggccaaggacgtggcgtccctcagttcccagctccaggacacccaggagctgcttcaagaagaaacccggcagaagctcaacgtgtctacgaagctgcgccagctggaggaggagcggaacagcctgcaagaccagctggacgaggagatggaggccaagcagaacctggagcgccacatctccactctcaacatccagctctccgactcgaagaagaagctgcaggactttgccagcaccgtggaagctctggaagaggggaagaagaggttccagaaggagatcgagaacctcacccagcagtacgaggagaaggcggccgcttatgataaactggaaaagaccaagaacaggcttcagcaggagctggacgacctggttgttgatttggacaaccagcggcaactcgtgtccaacctggaaaagaagcagaggaaatttgatcagttgttagccgaggagaaaaacatctcttccaaatacgcggatgagagggacagagctgaggcagaagccagggagaaggaaaccaaggccctgtccctggctcgggcccttgaagaggccttggaagccaaagaggaactcgagcggaccaacaaaatgctcaaagccgaaatggaagacctggtcagctccaaggatgacgtgggcaagaacgtccatgagctggagaagtccaagcgggccctggagacccagatggaggagatgaagacgcagctggaagagctggaggacgagctgcaagccacggaggacgccaaactgcggctggaagtcaacatgcaggcgctcaagggccagttcgaaagggatctccaagcccgggacgagcagaatgaggagaagaggaggcaactgcagagacagcttcacgagtatgagacggaactggaagacgagcgaaagcaacgtgccctggcagctgcagcaaagaagaagctggaaggggacctgaaagacctggagcttcaggccgactctgccatcaaggggagggaggaagccatcaagcagctacgcaaactgcaggctcagatgaaggactttcaaagagagctggaagatgcccgtgcctccagagatgagatctttgccacagccaaagagaatgagaagaaagccaagagcttggaagcagacctcatgcagctacaagaggacctcgccgccgctgagagggctcgcaaacaagcggacctcgagaaggaggaactggcagaggagctggccagtagcctgtcgggaaggaacgcactccaggacgagaagcgccgcctggaggcccggatcgcccagctggaggaggagctggaggagctctatgtggaggacttcgccagcattgactggctggcgcagaggaacaacgtggcccccgacgagctgtacacgccgcacagctggctgctccgcgtggtatatgcgctcctcaacctgtatgagcaccaccacagtgcccacctgcggcagcgggccgtgcagaagctgtatgaacacattgtggccgacgaccgattcaccaagagcatcagcatcggcccgatctcgaaaaccatc

SEQ ID NO: 367309 - DNA, 2718 bp, Homo sapiens
  misc_feature (42)..(42): n is a, c, g, or t
  misc_feature (45)..(45): n is a, c, g, or t
tcccccccccggccccccccccggctccggccagccactacngcntactactactactaaattcgcggccgcgtcgacccacgcccaacttcgtgcgctgcatcatccccaaccacgagaagaggtccggcaagctggatgcgttcctggtgctggagcagctgcggtgcaatggggtgctggaaggcattcgcatctgccggcagggcttccccaaccggatcgtcttccaggagttccgccaacgctacgagatcctggcggcgaatgccatccccaaaggcttcatggacgggaagcaggcctgcattctcatgatcaaagccctggaacttgaccccaacttatacaggatagggcagagcaaaatcttcttccgaactggcgtcctggcccacctagaggaggagcgagatttgaagatcaccgatgtcatcatggccttccaggcgatgtgtcgtggctacttggccagaaaggcttttgccaagaggcagcagcagctgaccgccatgaaggtgattcagaggaactgcgccgcctacctcaagctgcggaactggcagtggtggaggcttttcaccaaagtgaagccactgctgcaggtgacacggcaggaggaggagatgcaggccaaggaggatgaactgcagaagaccaaggagcggcagcagaaggcagagaatgagcttaaggagctggaacagaagcactcgcagctgaccgaggagaagaacctgctacaggaacagctgcaggcagagacagagctgtatgcagaggctgaggagatgcgggtgcggctggcggccaagaagcaggagctggaggagatactgcatgagatggaggcccgcctggaggaggaggaagacaggggccagcagctacaggctgaaaggaagaagatggcccagcagatgctggaccttgaagaacagctggaggaggaggaagctgccaggcagaagctgcaacttgagaaggtcacggctgaggccaagatcaagaaactggaggatgagatcctggtcatggatgatcagaacaataaactatcaaaagaacgaaaactccttgaggagaggattagtgacttaacgacaaatcttgcagaagaggaagaaaaggccaagaatcttaccaagctgaaaaacaagcatgaatctatgatttcagaactggaagtgcggctaaagaaggaagagaagagccgacaggagctggagaagctgaaacggaagctggagggtgatgccagcgacttccacgagcagatcgctgacctccaggcgcagatcgcagagctcaagatgcagctggccaagaaggaggaggagctgcaggcggccctggccaggcttgacgatgaaatcgctcagaagaacaatgccctgaagaagatccgggagctggagggccacatctcagacctccaggaggacctggactcagagcgggccgccaggaacaaggctgaaaagcagaagcgagacctcggcgaggagctggaggccctaaagacagagctggaagacacactggacagcacagccactcagcaggagctcagggccaagagggagcaggaggtgacggtgctgaagaaggccctggatgaagagacgcggtcccatgaggctcaggtccaggagatgaggcagaaacacgcacaggcggtggaggagctcacagagcagcttgagcagttcaagagggccaaggcgaacctagacaagaataagcagacgctggagaaagagaacgcagacctggccggggagctgcgggtcctgggccaggccaagcaggaggtggaacataagaagaagaagctggaggcgcaggtgcaggagctgcagtccaagtgcagcgatggggagcgggcccgggcggagctcaatgacaaagtccacaagctgcagaatgaagttgagagcgtcacagggatgcttaacgaggccgaggggaaggccattaagctggccaaggacgtggcgtccctcagttcccagctccaggacacccaggagctgcttcaagaagaaacccggcagaagctcaacgtgtctacgaagctgcgccagctggaggaggagcggaacagcctgcaagaccagctggacgaggagatggaggccaagcagaacctggagcgccacatctccactctcaacatccagctctccgactcgaagaagaagctgcaggactttgccagcaccgtggaagctctggaagaggggaagaagaggttccagaaggagatcgagaacctcacccagcagtacgaggagaaggcggccgcttatgataaactggaaaagaccaagaacaggcttcagcaggagctggacgacctggttgttgatttggacaaccagcggcaactcgtgtccaacctggaaaagaagcagaggaaatttgatcagttgttagccgaggagaaaaacatctcttccaaatacgcggatgagagggacagagctgaggcagaagccagggagaaggaaaccaaggccctgtccctggctcgggcccttgaagaggccttggaagccaaagaggaactcgagcggaccaacaaaatgctcaaagccgaaatggaagacctggtcagctccaaggatgacgtgggcaagaacgtccatgagctggagaagtccaagcgggccctggagtcccggaagaagaaaatgatacgggtccgagctgcat

SEQ ID NO: 367310 - DNA, 2787 bp, Homo sapiens
  misc_feature (42)..(42): n is a, c, g, or t
  misc_feature (45)..(45): n is a, c, g, or t
  misc_feature (2682)..(2682): n is a, c, g, or t
  misc_feature (2687)..(2687): n is a, c, g, or t
tcccccccccggccccccccccggctccggccagccactacngcntactactactactaaattcgcggccgcgtcgacccacgcccaacttcgtgcgctgcatcatccccaaccacgagaagaggtccggcaagctggatgcgttcctggtgctggagcagctgcggtgcaatggggtgctggaaggcattcgcatctgccggcagggcttccccaaccggatcgtcttccaggagttccgccaacgctacgagatcctggcggcgaatgccatccccaaaggcttcatggacgggaagcaggcctgcattctcatgatcaaagccctggaacttgaccccaacttatacaggatagggcagagcaaaatcttcttccgaactggcgtcctggcccacctagaggaggagcgagatttgaagatcaccgatgtcatcatggccttccaggcgatgtgtcgtggctacttggccagaaaggcttttgccaagaggcagcagcagctgaccgccatgaaggtgattcagaggaactgcgccgcctacctcaagctgcggaactggcagtggtggaggcttttcaccaaagtgaagccactgctgcaggtgacacggcaggaggaggagatgcaggccaaggaggatgaactgcagaagaccaaggagcggcagcagaaggcagagaatgagcttaaggagctggaacagaagcactcgcagctgaccgaggagaagaacctgctacaggaacagctgcaggcagagacagagctgtatgcagaggctgaggagatgcgggtgcggctggcggccaagaagcaggagctggaggagatactgcatgagatggaggcccgcctggaggaggaggaagacaggggccagcagctacaggctgaaaggaagaagatggcccagcagatgctggaccttgaagaacagctggaggaggaggaagctgccaggcagaagctgcaacttgagaaggtcacggctgaggccaagatcaagaaactggaggatgagatcctggtcatggatgatcagaacaataaactatcaaaagaacgaaaactccttgaggagaggattagtgacttaacgacaaatcttgcagaagaggaagaaaaggccaagaatcttaccaagctgaaaaacaagcatgaatctatgatttcagaactggaagtgcggctaaagaaggaagagaagagccgacaggagctggagaagctgaaacggaagctggagggtgatgccagcgacttccacgagcagatcgctgacctccaggcgcagatcgcagagctcaagatgcagctggccaagaaggaggaggagctgcaggcggccctggccaggcttgacgatgaaatcgctcagaagaacaatgccctgaagaagatccgggagctggagggccacatctcagacctccaggaggacctggactcagagcgggccgccaggaacaaggctgaaaagcagaagcgagacctcggcgaggagctggaggccctaaagacagagctggaagacacactggacagcacagccactcagcaggagctcagggccaagagggagcaggaggtgacggtgctgaagaaggccctggatgaagagacgcggtcccatgaggctcaggtccaggagatgaggcagaaacacgcacaggcggtggaggagctcacagagcagcttgagcagttcaagagggccaaggcgaacctagacaagaataagcagacgctggagaaagagaacgcagacctggccggggagctgcgggtcctgggccaggccaagcaggaggtggaacataagaagaagaagctggaggcgcaggtgcaggagctgcagtccaagtgcagcgatggggagcgggcccgggcggagctcaatgacaaagtccacaagctgcagaatgaagttgagagcgtcacagggatgcttaacgaggccgaggggaaggccattaagctggccaaggacgtggcgtccctcagttcccagctccaggacacccaggagctgcttcaagaagaaacccggcagaagctcaacgtgtctacgaagctgcgccagctggaggaggagcggaacagcctgcaagaccagctggacgaggagatggaggccaagcagaacctggagcgccacatctccactctcaacatccagctctccgactcgaagaagaagctgcaggactttgccagcaccgtggaagctctggaagaggggaagaagaggttccagaaggagatcgagaacctcacccagcagtacgaggagaaggcggccgcttatgataaactggaaaagaccaagaacaggcttcagcaggagctggacgacctggttgttgatttggacaaccagcggcaactcgtgtccaacctggaaaagaagcagaggaaatttgatcagttgttagccgaggagaaaaacatctcttccaaatacgcggatgagagggacagagctgaggcagaagccagggagaaggaaaccaaggccctgtccctggctcgggcccttgaagaggccttggaagccaaagaggaactcgagcggaccaacaaaatgctcaaagccgaaatggaagacctggtcagctccaaggatgacgtgggcaagaacgtccatgagctggagaagtccaagcgggccctggagncccanatggaggagatgaagacgcagctggaagagcatggaggacgagctgcaagccacggagacgcccaactgcggctggaagtcaacagggatcctctagatc

SEQ ID NO: 367311 - DNA, 2830 bp, Homo sapiens
  misc_feature (42)..(42): n is a, c, g, or t
  misc_feature (45)..(45): n is a, c, g, or t
tcccccccccggccccccccccggctccggccagccactacngcntactactactactaaattcgcggccgcgtcgacccacgcccaacttcgtgcgctgcatcatccccaaccacgagaagaggtccggcaagctggatgcgttcctggtgctggagcagctgcggtgcaatggggtgctggaaggcattcgcatctgccggcagggcttccccaaccggatcgtcttccaggagttccgccaacgctacgagatcctggcggcgaatgccatccccaaaggcttcatggacgggaagcaggcctgcattctcatgatcaaagccctggaacttgaccccaacttatacaggatagggcagagcaaaatcttcttccgaactggcgtcctggcccacctagaggaggagcgagatttgaagatcaccgatgtcatcatggccttccaggcgatgtgtcgtggctacttggccagaaaggcttttgccaagaggcagcagcagctgaccgccatgaaggtgattcagaggaactgcgccgcctacctcaagctgcggaactggcagtggtggaggcttttcaccaaagtgaagccactgctgcaggtgacacggcaggaggaggagatgcaggccaaggaggatgaactgcagaagaccaaggagcggcagcagaaggcagagaatgagcttaaggagctggaacagaagcactcgcagctgaccgaggagaagaacctgctacaggaacagctgcaggcagagacagagctgtatgcagaggctgaggagatgcgggtgcggctggcggccaagaagcaggagctggaggagatactgcatgagatggaggcccgcctggaggaggaggaagacaggggccagcagctacaggctgaaaggaagaagatggcccagcagatgctggaccttgaagaacagctggaggaggaggaagctgccaggcagaagctgcaacttgagaaggtcacggctgaggccaagatcaagaaactggaggatgagatcctggtcatggatgatcagaacaataaactatcaaaagaacgaaaactccttgaggagaggattagtgacttaacgacaaatcttgcagaagaggaagaaaaggccaagaatcttaccaagctgaaaaacaagcatgaatctatgatttcagaactggaagtgcggctaaagaaggaagagaagagccgacaggagctggagaagctgaaacggaagctggagggtgatgccagcgacttccacgagcagatcgctgacctccaggcgcagatcgcagagctcaagatgcagctggccaagaaggaggaggagctgcaggcggccctggccaggcttgacgatgaaatcgctcagaagaacaatgccctgaagaagatccgggagctggagggccacatctcagacctccaggaggacctggactcagagcgggccgccaggaacaaggctgaaaagcagaagcgagacctcggcgaggagctggaggccctaaagacagagctggaagacacactggacagcacagccactcagcaggagctcagggccaagagggagcaggaggtgacggtgctgaagaaggccctggatgaagagacgcggtcccatgaggctcaggtccaggagatgaggcagaaacacgcacaggcggtggaggagctcacagagcagcttgagcagttcaagagggccaaggcgaacctagacaagaataagcagacgctggagaaagagaacgcagacctggccggggagctgcgggtcctgggccaggccaagcaggaggtggaacataagaagaagaagctggaggcgcaggtgcaggagctgcagtccaagtgcagcgatggggagcgggcccgggcggagctcaatgacaaagtccacaagctgcagaatgaagttgagagcgtcacagggatgcttaacgaggccgaggggaaggccattaagctggccaaggacgtggcgtccctcagttcccagctccaggacacccaggtgagtgtcctgccacatcatccaggggacctggggggtggccttcctcggggcaggtccctgggacctctttgcatcccttttgcaggagctgcttcaagaagaaacccggcagaagctcaacgtgtctacgaagctgcgccagctggaggaggagcggaacagcctgcaagaccagctggacgaggagatggaggccaagcagaacctggagcgccacatctccactctcaacatccaggtgcctgccccgtgtccttgcttccttcatgggtcctctcaacttctctgcgctgagatcccccgcaggcagatcgcggtggagtgttggtgcgatggtgcttgaccccccagcttcccctgctattgggtttctccaacgaggagacatggtcttcgcttctcagagtctgtggggccagggacaggggccattcatggtccccctctcaccctaccctggacgctgtccttgtagctctccgactcgaagaagaagctgcaggactttgccagcaccgtggaagctctggaagaggggaagaagaggttccagaaggagatcgagaacctcacccagcagtacgaggagaaggcggccgcttatgataaactggaaaagaccaagaacaggcttcagcaggagctggacgacctggttgttgatttggacaaccagcggcaactcgtgtccaaccccttatcacccaaaggcacgctggtgctgcttggccgtctctccccgccatctctgttcttgctgctccgcccagaggctgggccacctgttcggtttgggg

SEQ ID NO: 367312 - DNA, 2224 bp, Homo sapiens
  misc_feature (42)..(42): n is a, c, g, or t
  misc_feature (45)..(45): n is a, c, g, or t
tcccccccccggccccccccccggctccggccagccactacngcntactactactactaaattcgcggccgcgtcgacccacgcccaacttcgtgcgctgcatcatccccaaccacgagaagaggtccggcaagctggatgcgttcctggtgctggagcagctgcggtgcaatggggtgctggaaggcattcgcatctgccggcagggcttccccaaccggatcgtcttccaggagttccgccaacgctacgagatcctggcggcgaatgccatccccaaaggcttcatggacgggaagcaggcctgcattctcatgatcaaagccctggaacttgaccccaacttatacaggatagggcagagcaaaatcttcttccgaactggcgtcctggcccacctagaggaggagcgagatttgaagatcaccgatgtcatcatggccttccaggcgatgtgtcgtggctacttggccagaaaggcttttgccaagaggcagcagcagctgaccgccatgaaggtgattcagaggaactgcgccgcctacctcaagctgcggaactggcagtggtggaggcttttcaccaaagtgaagccactgctgcaggtgacacggcaggaggaggagatgcaggccaaggaggatgaactgcagaagaccaaggagcggcagcagaaggcagagaatgagcttaaggagctggaacagaagcactcgcagctgaccgaggagaagaacctgctacaggaacagctgcaggcagagacagagctgtatgcagaggctgaggagatgcgggtgcggctggcggccaagaagcaggagctggaggagatactgcatgagatggaggcccgcctggaggaggaggaagacaggggccagcagctacaggctgaaaggaagaagatggcccagcagatgctggaccttgaagaacagctggaggaggaggaagctgccaggcagaagctgcaacttgagaaggtcacggctgaggccaagatcaagaaactggaggatgagatcctggtcatggatgatcagaacaataaactatcaaaagaacgaaaactccttgaggagaggattagtgacttaacgacaaatcttgcagaagaggaagaaaaggccaagaatcttaccaagctgaaaaacaagcatgaatctatgatttcagaactggaagtgcggctaaagaaggaagagaagagccgacaggagctggagaagctgaaacggaagctggagggtgatgccagcgacttccacgagcagatcgctgacctccaggcgcagatcgcagagctcaagatgcagctggccaagaaggaggaggagctgcaggcggccctggccaggcttgacgatgaaatcgctcagaagaacaatgccctgaagaagatccgggagctggagggccacatctcagacctccaggaggacctggactcagagcgggccgccaggaacaaggctgaaaagcagaagcgagacctcggcgaggagctggaggccctaaagacagagctggaagacacactggacagcacagccactcagcaggagctcagggccaagagggagcaggaggtgacggtgctgaagaaggccctggatgaagagacgcggtcccatgaggctcaggtccaggagatgaggcagaaacacgcacaggcggtggaggagctcacagagcagcttgagcagttcaagagggccaaggcgaacctagacaagaataagcagacgctggagaaagagaacgcagacctggccggggagctgcgggtcctgggccaggccaagcaggaggtggaacataagaagaagaagctggaggcgcaggtgcaggagctgcagtccaagtgcagcgatggggagcgggcccgggcggagctcaatgacaaagtccacaagctgcaggtgaggaggtggcgcggtggtgtggtgggcagtgctgggtggtgcccagttctgtggggaggagcctcttcccggctcgctgaggtctctcttgctgcaaggcaagtcctttcctctagttgcgttcctggaggagaggcgatgatctccctgttcaattaaatattaaaaaaaccttctggccaggcacggtggctcatgcctgtaatcccagcactttgggagacagaggtgggtggatcacctgaggtcaggggtttgagaccagtctggccaacatggtgaaaagtctctactaa

SEQ ID NO: 367313 - DNA, 149 bp, Homo sapiens
gcaggttcaggatgctgcagggcagggctctgttgacagcagggtgtggcttcatgacccccgcaccttctcttcccccctccctagggcttttgccaagaggcagcagcagctgaccgccatgaaggtgattcagaggaactgcgccg

SEQ ID NO: 367314 - DNA, 589 bp, Homo sapiens
ttgtccaggcaggagaagatagtggagacaatggtggtgaagagaagtgggggggttgggagatatttgggagctagaagcaatcaaactgctgatggacaggaagtgagggagacgaggtgatgaggaggaagccccaggttccagccaggcgatgctagtgtcaccaagaaccagagagatcatgaggcagccattgccgaagcaaagagatgaaaacccagaggggggcactgctttgcccctcggccctcagctaagccctccttgggtgcttctgttggtaccctcatggcctggccaggtgggtcatccaggtaggaggtttggggctttgctgcgccatggtttctggccccagggatccactgccctctttgacctttgcagtccggcaagctggatgcgttcctggtgctggagcagctgcggtgcaatggggtgctggaaggcattcgcatctgccggcagggcttccccaaccggatcgtcttccaggagttccgccaacggtaagtcccaaggtctggcccaggtagggcagggggtgagcgggactgggtggaggaatggatgctggaggtacccg

SEQ ID NO: 367315 - DNA, 482 bp, Homo sapiens
tctgcctcctgcttgcccacagcatggggttaacggctgaagttgggcagcaaagcctgaactgtgttttcctgttggcagggcaaattcatccgcatcaacttcgacgtcacgggttacatcgtgggagccaacattgagacctgtatcctttccctgagcctgggccaaatgggtacccctgccccctaccaatctcctgcccagaggctgggagagtccaagagccacctctatctttccagcctcttaggtttcttccagaacaaatctccccttaacagcaggcattgtggtgcagtggttatacatgtgtggaccggacccctggtttgaaccctaaacaagcagcctaggctgcatgtgatgctcaaatgatctgtcccttagctgagtgaccttgggctggttactccacctctctgtgcctcatcagcaaaatggggatgataatgaatggtacctgcctcatagaaatgtga

SEQ ID NO: 367316 - DNA, 6925 bp, Homo sapiens
cgcagggagatttggacgctccggcctgggaggtgcgtcagatccgagctcgccatccagtttcctctccactagtccccccagttggagatctgggaccaacaaggcaccatggcgcagaagggccaactcagtgacgatgagaagttcctctttgtggacaaaaacttcatcaacagcccagtggcccaggctgactgggccgccaagagactcgtctgggtcccctcggagaagcagggcttcgaggcagccagcattaaggaggagaagggggatgaggtggttgtggagctggtggagaatggcaagaaggtcacggttgggaaagatgacatccagaagatgaacccacccaagttctccaaggtggaggacatggcggagctgacgtgcctcaacgaagcctccgtgctacacaacctgagggagcggtacttctcagggctaatatatacgtactctggcctcttctgcgtggtggtcaacccctataaacacctgcccatctactcggagaagatcgtcgacatgtacaagggcaagaagaggcacgagatgccgcctcacatctacgccatcgcagacacggcctaccggagcatgcttcaagatcgggaggaccagtccattctatgcacaggcgagtctggagccgggaaaaccgaaaacaccaagaaggtcattcagtacctggccgtggtggcctcctcccacaagggcaagaaagacacaagtatcacgggagagctggaaaagcagcttctacaagcaaacccgattctggaggctttcggcaacgccaaaacagtgaagaacgacaactcctcacgattcggcaaattcatccgcatcaacttcgacgtcacgggttacatcgtgggagccaacattgagacctatctgctagaaaaatcacgggcaattcgccaagccagagacgagaggacattccacatcttttactacatgattgctggagccaaggagaagatgagaagtgacttgcttttggagggcttcaacaactacaccttcctctccaatggctttgtgcccatcccagcagcccaggatgatgagatgttccaggaaaccgtggaggccatggcaatcatgggtttcagcgaggaggagcagctatccatattgaaggtggtatcatcggtcctgcagcttggaaatatcgtcttcaagaaggaaagaaacacagaccaggcgtccatgccagataacacagctgctcagaaagtttgccacctcatgggaattaatgtgacagatttcaccagatccatcctcactcctcgtatcaaggttgggcgagatgtggtacagaaagctcagacaaaagaacaggctgactttgctgtagaggctttggccaaggcaacatatgagcgccttttccgctggatactcacccgcgtgaacaaagccctggacaagacccatcggcaaggggcttccttcctggggatcctggatatagctggatttgagatctttgaggtgaactccttcgagcagctgtgcatcaactacaccaacgagaagctgcagcagctcttcaaccacaccatgttcatcctggagcaggaggagtaccagcgcgagggcatcgagtggaacttcatcgactttgggctggacctacagccctgcatcgagctcatcgagcgaccgaacaaccctccaggtgtgctggccctgctggacgaggaatgctggttccccaaagccacggacaagtctttcgtggagaagctgtgcacggagcagggcagccaccccaagttccagaagcccaagcagctcaaggacaagactgagttctccatcatccattatgctgggaaggtggactataatgcgagtgcctggctgaccaagaatatggacccgctgaatgacaacgtgacttccctgctcaatgcctcctccgacaagtttgtggccgacctgtggaaggacgtggaccgcatcgtgggcctggaccagatggccaagatgacggagagctcgctgcccagcgcctccaagaccaagaagggcatgttccgcacagtggggcagctgtacaaggagcagctgggcaagctgatgaccacgctacgcaacaccacgcccaacttcgtgcgctgcatcatccccaaccacgagaagaggtccggcaagctggatgcgttcctggtgctggagcagctgcggtgcaatggggtgctggaaggcattcgcatctgccggcagggcttccccaaccggatcgtcttccaggagttccgccaacgctacgagatcctggcggcgaatgccatccccaaaggcttcatggacgggaagcaggcctgcattctcatgatcaaagccctggaacttgaccccaacttatacaggatagggcagagcaaaatcttcttccgaactggcgtcctggcccacctagaggaggagcgagatttgaagatcaccgatgtcatcatggccttccaggcgatgtgtcgtggctacttggccagaaaggcttttgccaagaggcagcagcagctgaccgccatgaaggtgattcagaggaactgcgccgcctacctcaagctgcggaactggcagtggtggaggcttttcaccaaagtgaagccactgctgcaggtgacacggcaggaggaggagatgcaggccaaggaggatgaactgcagaagaccaaggagcggcagcagaaggcagagaatgagcttaaggagctggaacagaagcactcgcagctgaccgaggagaagaacctgctacaggaacagctgcaggcagagacagagctgtatgcagaggctgaggagatgcgggtgcggctggcggccaagaagcaggagctggaggagatactgcatgagatggaggcccgcctggaggaggaggaagacaggggccagcagctacaggctgaaaggaagaagatggcccagcagatgctggaccttgaagaacagctggaggaggaggaagctgccaggcagaagctgcaacttgagaaggtcacggctgaggccaagatcaagaaactggaggatgagatcctggtcatggatgatcagaacaataaactatcaaaagaacgaaaactccttgaggagaggattagtgacttaacgacaaatcttgcagaagaggaagaaaaggccaagaatcttaccaagctgaaaaacaagcatgaatctatgatttcagaactggaagtgcggctaaagaaggaagagaagagccgacaggagctggagaagctgaaacggaagctggagggtgatgccagcgacttccacgagcagatcgctgacctccaggcgcagatcgcagagctcaagatgcagctggccaagaaggaggaggagctgcaggcggccctggccaggcttgacgatgaaatcgctcagaagaacaatgccctgaagaagatccgggagctggagggccacatctcagacctccaggaggacctggactcagagcgggccgccaggaacaaggctgaaaagcagaagcgagacctcggcgaggagctggaggccctaaagacagagctggaagacacactggacagcacagccactcagcaggagctcagggccaagagggagcaggaggtgacggtgctgaagaaggccctggatgaagagacgcggtcccatgaggctcaggtccaggagatgaggcagaaacacgcacaggcggtggaggagctcacagagcagcttgagcagttcaagagggccaaggcgaacctagacaagaataagcagacgctggagaaagagaacgcagacctggccggggagctgcgggtcctgggccaggccaagcaggaggtggaacataagaagaagaagctggaggcgcaggtgcaggagctgcagtccaagtgcagcgatggggagcgggcccgggcggagctcaatgacaaagtccacaagctgcagaatgaagttgagagcgtcacagggatgcttaacgaggccgaggggaaggccattaagctggccaaggacgtggcgtccctcagttcccagctccaggacacccaggagctgcttcaagaagaaacccggcagaagctcaacgtgtctacgaagctgcgccagctggaggaggagcggaacagcctgcaagaccagctggacgaggagatggaggccaagcagaacctggagcgccacatctccactctcaacatccagctctccgactcgaagaagaagctgcaggactttgccagcaccgtggaagctctggaagaggggaagaagaggttccagaaggagatcgagaacctcacccagcagtacgaggagaaggcggccgcttatgataaactggaaaagaccaagaacaggcttcagcaggagctggacgacctggttgttgatttggacaaccagcggcaactcgtgtccaacctggaaaagaagcagaggaaatttgatcagttgttagccgaggagaaaaacatctcttccaaatacgcggatgagagggacagagctgaggcagaagccagggagaaggaaaccaaggccctgtccctggctcgggcccttgaagaggccttggaagccaaagaggaactcgagcggaccaacaaaatgctcaaagccgaaatggaagacctggtcagctccaaggatgacgtgggcaagaacgtccatgagctggagaagtccaagcgggccctggagacccagatggaggagatgaagacgcagctggaagagctggaggacgagctgcaagccacggaggacgccaaactgcggctggaagtcaacatgcaggcgctcaagggccagttcgaaagggatctccaagcccgggacgagcagaatgaggagaagaggaggcaactgcagagacagcttcacgagtatgagacggaactggaagacgagcgaaagcaacgtgccctggcagctgcagcaaagaagaagctggaaggggacctgaaagacctggagcttcaggccgactctgccatcaaggggagggaggaagccatcaagcagctacgcaaactgcaggctcagatgaaggactttcaaagagagctggaagatgcccgtgcctccagagatgagatctttgccacagccaaagagaatgagaagaaagccaagagcttggaagcagacctcatgcagctacaagaggacctcgccgccgctgagagggctcgcaaacaagcggacctcgagaaggaggaactggcagaggagctggccagtagcctgtcgggaaggaacgcactccaggacgagaagcgccgcctggaggcccggatcgcccagctggaggaggagctggaggaggagcagggcaacatggaggccatgagcgaccgggtccgcaaagccacacagcaggccgagcagctcagcaacgagctggccacagagcgcagcacggcccagaagaatgagagtgcccggcagcagctcgagcggcagaacaaggagctccggagcaagctccacgagatggagggggccgtcaagtccaagttcaagtccaccatcgcggcgctggaggccaagattgcacagctggaggagcaggtcgagcaggaggccagagagaaacaggcggccaccaagtcgctgaagcagaaagacaagaagctgaaggaaatcttgctgcaggtggaggacgagcgcaagatggccgagcagtacaaggagcaggcagagaaaggcaatgccagggtcaagcagctcaagaggcagctggaggaggcagaggaggagtcccagcgcatcaacgccaaccgcaggaagctgcagcgggagctggatgaggccacggagagcaacgaggccatgggccgcgaggtgaacgcactcaagagcaagctcagagggccccccccacaggaaacttcgcagtgatgcaccaggcgaggaaacgagacctctttcgttccttctagaaggtctggaggacgtagagttattgaaaatgcagatggttctgaggaggaaacggacactcgagacgcagacttcaatggaaccaaggccagtgaataagcaactttctacagttttgcaccacggcaagaaaaccaaaaaccaaaacaaacaaacaaaaaaaacccaacaacaacccagaacaaagcaaaacccagcagactgtacttagcattgtctaaatccattctcaaattccaaatatcacagacacccctcacacaaggaatataaaaaccaccaccctccagcctgggcaacgtagtaaaacctcatctatacaagaatttaaaaataagctgggcgtggtggtacacacctgtggtcccagctactagggaggctgagccaggaagaacgctccagcccaggacttcgaggctgcaatgagctataattgcatcattgcactccagcctgggcaacagagaccctgtctcaaccaccaccaccaccaccacccctactacccctgtattcaaggtaaaaattgaagtttgtatgatgtaagagatgagaaaaacccaacaggaaacacagacacatcctccagttctatcaatggattgtgcagacactgagtttttagaaaaacatatccacggtaaccggtccctggcaattctgtttacatgaaatggggagaaagtcaccgaaatgggtgccgccggcccccactcccaattcattccctaacctgcaaacctttccaacttctcacgtcaggcctttgagaattctttccccctctcctggtttccacacctcagacacgcacagttcaccaagtgccttctgtagtcacatgaattgaaaaggagacgctgctcccacggaggggagcaggaatgctgcactgtttacaccctgactgtgcttaaaaacactttcactaataaatggttataaatcacaa

SEQ ID NO: 367317 - DNA, 954 bp, Homo sapiens
gatctcggcggatgcccatgcgttgtgtatagttggccagctcttcatggaatgcctgaggttgggtgttctctctgattcaagccctacttgtctcccacagaacaaccctccaggtgtgctggccctgctggacgaggaatgctggttccccaaagccacggacaagtctttcgtggagaagctgtgcacggagcagggcagccaccccaagttccagaagcccaagcagctcaaggacaagactgagttctccatcatccattatgctgggaaggtaccagccacagggcccaggggactctgtctcaggggacccccagtggctgctcagcgcagagacagtctgagagtggcagaaccttgggctgcctggaaactgcaaagccatctgctgctaagcgaatcccaaccaagtcctattcgtaatttgtctacgcatctgtaaggcatcagctgtagccactctcgtgttttccaaccgtgacgtccgagacagttatttctttctgtttttgttggagacagggtctcgctttgtcgcccaggctggagtgcagtggtgcgatcatagctcactacagcctcaacctcctgggctcacacgatcctcctgcctcagcttcccaagtagctgggactacaggtgtacaccaccatgcccagctaaaatcttttttcctttttgagatggaattttgctcttgtcatccaggctggagtgcaatggcgtgatctctgctaactgcaacctctccctccgggttcaagagattctcctgcctcagcctcccaaatagctgggattacaggcacctgccaccacacccagctaatttttgtatttttagtagagaagggtttcgccatgttggccaggctggtctcaaactcctgacctcaggtgatccacccgcctcggcctcccaaggtgctaggattacaggcatgagc

SEQ ID NO: 367318 - DNA, 404 bp, Homo sapiens
  misc_feature (42)..(42): n is a, c, g, or t
  misc_feature (45)..(45): n is a, c, g, or t
tcccccccccggccccccccccggctccggccagccactacngcntactactactactaaattcgcggccgcgtcgacccacgcccaacttcgtgcgctgcatcatccccaaccacgagaagaggtccggcaagctggatgcgttcctggtgctggagcagctgcggtgcaatggggtgctggaaggcattcgcatctgccggcagggcttccccaaccggatcgtcttccaggagttccgccaacgctacgagatcctggcggcgaatgccatccccaaaggcttcatggacgggaagcaggcctgcattctcatgatcaaagccctggaacttgaccccaacttatacaggtccagggcagaggaccaacgtcgacgcggccgcgaatttagtagtagtaga

SEQ ID NO: 367319 - DNA, 4881 bp, Homo sapiens
  misc_feature (42)..(42): n is a, c, g, or t
  misc_feature (45)..(45): n is a, c, g, or t
tcccccccccggccccccccccggctccggccagccactacngcntactactactactaaattcgcggccgcgtcgacccacgcccaacttcgtgcgctgcatcatccccaaccacgagaagaggtccggcaagctggatgcgttcctggtgctggagcagctgcggtgcaatggggtgctggaaggcattcgcatctgccggcagggcttccccaaccggatcgtcttccaggagttccgccaacgctacgagatcctggcggcgaatgccatccccaaaggcttcatggacgggaagcaggcctgcattctcatgatcaaagccctggaacttgaccccaacttatacaggatagggcagagcaaaatcttcttccgaactggcgtcctggcccacctagaggaggagcgagatttgaagatcaccgatgtcatcatggccttccaggcgatgtgtcgtggctacttggccagaaaggcttttgccaagaggcagcagcagctgaccgccatgaaggtgattcagaggaactgcgccgcctacctcaagctgcggaactggcagtggtggaggcttttcaccaaagtgaagccactgctgcaggtgacacggcaggaggaggagatgcaggccaaggaggatgaactgcagaagaccaaggagcggcagcagaaggcagagaatgagcttaaggagctggaacagaagcactcgcagctgaccgaggagaagaacctgctacaggaacagctgcaggcagagacagagctgtatgcagaggctgaggagatgcgggtgcggctggcggccaagaagcaggagctggaggagatactgcatgagatggaggcccgcctggaggaggaggaagacaggggccagcagctacaggctgaaaggaagaagatggcccagcagatgctggaccttgaagaacagctggaggaggaggaagctgccaggcagaagctgcaacttgagaaggtcacggctgaggccaagatcaagaaactggaggatgagatcctggtcatggatgatcagaacaataaactatcaaaagaacgaaaactccttgaggagaggattagtgacttaacgacaaatcttgcagaagaggaagaaaaggccaagaatcttaccaagctgaaaaacaagcatgaatctatgatttcagaactggaagtgcggctaaagaaggaagagaagagccgacaggagctggagaagctgaaacggaagctggagggtgatgccagcgacttccacgagcagatcgctgacctccaggcgcagatcgcagagctcaagatgcagctggccaagaaggaggaggagctgcaggcggccctggccaggcttgacgatgaaatcgctcagaagaacaatgccctgaagaagatccgggagctggagggccacatctcagacctccaggaggacctggactcagagcgggccgccaggaacaaggctgaaaagcagaagcgagacctcggcgaggagctggaggccctaaagacagagctggaagacacactggacagcacagccactcagcaggagctcagggccaagagggagcaggaggtgacggtgctgaagaaggccctggatgaagagacgcggtcccatgaggctcaggtccaggagatgaggcagaaacacgcacaggcggtggaggagctcacagagcagcttgagcagttcaagagggccaaggcgaacctagacaagaataagcagacgctggagaaagagaacgcagacctggccggggagctgcgggtcctgggccaggccaagcaggaggtggaacataagaagaagaagctggaggcgcaggtgcaggagctgcagtccaagtgcagcgatggggagcgggcccgggcggagctcaatgacaaagtccacaagctgcagaatgaagttgagagcgtcacagggatgcttaacgaggccgaggggaaggccattaagctggccaaggacgtggcgtccctcagttcccagctccaggacacccaggagctgcttcaagaagaaacccggcagaagctcaacgtgtctacgaagctgcgccagctggaggaggagcggaacagcctgcaagaccagctggacgaggagatggaggccaagcagaacctggagcgccacatctccactctcaacatccagctctccgactcgaagaagaagctgcaggactttgccagcaccgtggaagctctggaagaggggaagaagaggttccagaaggagatcgagaacctcacccagcagtacgaggagaaggcggccgcttatgataaactggaaaagaccaagaacaggcttcagcaggagctggacgacctggttgttgatttggacaaccagcggcaactcgtgtccaacctggaaaagaagcagaggaaatttgatcagttgttagccgaggagaaaaacatctcttccaaatacgcggatgagagggacagagctgaggcagaagccagggagaaggaaaccaaggccctgtccctggctcgggcccttgaagaggccttggaagccaaagaggaactcgagcggaccaacaaaatgctcaaagccgaaatggaagacctggtcagctccaaggatgacgtgggcaagaacgtccatgagctggagaagtccaagcgggccctggagacccagatggaggagatgaagacgcagctggaagagctggaggacgagctgcaagccacggaggacgccaaactgcggctggaagtcaacatgcaggcgctcaagggccagttcgaaagggatctccaagcccgggacgagcagaatgaggagaagaggaggcaactgcagagacagcttcacgagtatgagacggaactggaagacgagcgaaagcaacgtgccctggcagctgcagcaaagaagaagctggaaggggacctgaaagacctggagcttcaggccgactctgccatcaaggggagggaggaagccatcaagcagctacgcaaactgcaggctcagatgaaggactttcaaagagagctggaagatgcccgtgcctccagagatgagatctttgccacagccaaagagaatgagaagaaagccaagagcttggaagcagacctcatgcagctacaagaggacctcgccgccgctgagagggctcgcaaacaagcggacctcgagaaggaggaactggcagaggagctggccagtagcctgtcgggaaggaacgcactccaggacgagaagcgccgcctggaggcccggatcgcccagctggaggaggagctggaggaggagcagggcaacatggaggccatgagcgaccgggtccgcaaagccacacagcaggccgagcagctcagcaacgagctggccacagagcgcagcacggcccagaagaatgagagtgcccggcagcagctcgagcggcagaacaaggagctccggagcaagctccacgagatggagggggccgtcaagtccaagttcaagtccaccatcgcggcgctggaggccaagattgcacagctggaggagcaggtcgagcaggaggccagagagaaacaggcggccaccaagtcgctgaagcagaaagacaagaagctgaaggaaatcttgctgcaggtggaggacgagcgcaagatggccgagcagtacaaggagcaggcagagaaaggcaatgccagggtcaagcagctcaagaggcagctggaggaggcagaggaggagtcccagcgcatcaacgccaaccgcaggaagctgcagcgggagctggatgaggccacggagagcaacgaggccatgggccgcgaggtgaacgcactcaagagcaagctcagagggccccccccacaggaaacttcgcagtgatgcaccaggcgaggaaacgagacctctttcgttccttctagaaggtctggaggacgtagagttattgaaaatgcagatggttctgaggaggaaacggacactcgagacgcagacttcaatggaaccaaggccagtgaataagcaactttctacagttttgcaccacggcaagaaaaccaaaaaccaaaacaaacaaacaaaaaaaacccaacaacaacccagaacaaagcaaaacccagcagactgtacttagcattgtctaaatccattctcaaattccaaatatcacagacacccctcacacaaggaatataaaaaccaccaccctccagcctgggcaacgtagtaaaacctcatctatacaagaatttaaaaataagctgggcgtggtggtacacacctgtggtcccagctactagggaggctgagccaggaagaacgctccagcccaggacttcgaggctgcaatgagctataattgcatcattgcactccagcctgggcaacagagaccctgtctcaaccaccaccaccaccaccacccctactacccctgtattcaaggtaaaaattgaagtttgtatgatgtaagagatgagaaaaacccaacaggaaacacagacacatcctccagttctatcaatggattgtgcagacactgagtttttagaaaaacatatccacggtaaccggtccctggcaattctgtttacatgaaatggggagaaagtcaccgaaatgggtgccgccggcccccactcccaattcattccctaacctgcaaacctttccaacttctcacgtcaggcctttgagaattctttccccctctcctggtttccacacctcagacacgcacagttcaccaagtgccttctgtagtcacatgaattgaaaaggagacgctgctcccacggaggggagcaggaatgctgcactgtttacaccctgactgtgcttaaaaacactttcactaataaatggttataaatcacaa

SEQ ID NO: 367320 - DNA, 5182 bp, Homo sapiens
  misc_feature (42)..(42): n is a, c, g, or t
  misc_feature (45)..(45): n is a, c, g, or t
tcccccccccggccccccccccggctccggccagccactacngcntactactactactaaattcgcggccgcgtcgacccacgcccaacttcgtgcgctgcatcatccccaaccacgagaagaggtccggcaagctggatgcgttcctggtgctggagcagctgcggtgcaatggggtgctggaaggcattcgcatctgccggcagggcttccccaaccggatcgtcttccaggagttccgccaacgctacgagatcctggcggcgaatgccatccccaaaggcttcatggacgggaagcaggcctgcattctcatgatcaaagccctggaacttgaccccaacttatacaggatagggcagagcaaaatcttcttccgaactggcgtcctggcccacctagaggaggagcgagatttgaagatcaccgatgtcatcatggccttccaggcgatgtgtcgtggctacttggccagaaaggcttttgccaagaggcagcagcagctgaccgccatgaaggtgattcagaggaactgcgccgcctacctcaagctgcggaactggcagtggtggaggcttttcaccaaagtgaagccactgctgcaggtgacacggcaggaggaggagatgcaggccaaggaggatgaactgcagaagaccaaggagcggcagcagaaggcagagaatgagcttaaggagctggaacagaagcactcgcagctgaccgaggagaagaacctgctacaggaacagctgcaggcagagacagagctgtatgcagaggctgaggagatgcgggtgcggctggcggccaagaagcaggagctggaggagatactgcatgagatggaggcccgcctggaggaggaggaagacaggggccagcagctacaggctgaaaggaagaagatggcccagcagatgctggaccttgaagaacagctggaggaggaggaagctgccaggcagaagctgcaacttgagaaggtcacggctgaggccaagatcaagaaactggaggatgagatcctggtcatggatgatcagaacaataaactatcaaaagaacgaaaactccttgaggagaggattagtgacttaacgacaaatcttgcagaagaggaagaaaaggccaagaatcttaccaagctgaaaaacaagcatgaatctatgatttcagaactggaagtgcggctaaagaaggaagagaagagccgacaggagctggagaagctgaaacggaagctggagggtgatgccagcgacttccacgagcagatcgctgacctccaggcgcagatcgcagagctcaagatgcagctggccaagaaggaggaggagctgcaggcggccctggccaggcttgacgatgaaatcgctcagaagaacaatgccctgaagaagatccgggagctggagggccacatctcagacctccaggaggacctggactcagagcgggccgccaggaacaaggctgaaaagcagaagcgagacctcggcgaggagctggaggccctaaagacagagctggaagacacactggacagcacagccactcagcaggagctcagggccaagagggagcaggaggtgacggtgctgaagaaggccctggatgaagagacgcggtcccatgaggctcaggtccaggagatgaggcagaaacacgcacaggcggtggaggagctcacagagcagcttgagcagttcaagagggccaaggcgaacctagacaagaataagcagacgctggagaaagagaacgcagacctggccggggagctgcgggtcctgggccaggccaagcaggaggtggaacataagaagaagaagctggaggcgcaggtgcaggagctgcagtccaagtgcagcgatggggagcgggcccgggcggagctcaatgacaaagtccacaagctgcagaatgaagttgagagcgtcacagggatgcttaacgaggccgaggggaaggccattaagctggccaaggacgtggcgtccctcagttcccagctccaggacacccaggagctgcttcaagaagaaacccggcagaagctcaacgtgtctacgaagctgcgccagctggaggaggagcggaacagcctgcaagaccagctggacgaggagatggaggccaagcagaacctggagcgccacatctccactctcaacatccagctctccgactcgaagaagaagctgcaggactttgccagcaccgtggaagctctggaagaggggaagaagaggttccagaaggagatcgagaacctcacccagcagtacgaggagaaggcggccgcttatgataaactggaaaagaccaagaacaggcttcagcaggagctggacgacctggttgttgatttggacaaccagcggcaactcgtgtccaacctggaaaagaagcagaggaaatttgatcagttgttagccgaggagaaaaacatctcttccaaatacgcggatgagagggacagagctgaggcagaagccagggagaaggaaaccaaggccctgtccctggctcgggcccttgaagaggccttggaagccaaagaggaactcgagcggaccaacaaaatgctcaaagccgaaatggaagacctggtcagctccaaggatgacgtgggcaagaacgtccatgagctggagaagtccaagcgggccctggagacccagatggaggagatgaagacgcagctggaagagctggaggacgagctgcaagccacggaggacgccaaactgcggctggaagtcaacatgcaggcgctcaagggccagttcgaaagggatctccaagcccgggacgagcagaatgaggagaagaggaggcaactgcagagacagcttcacgagtatgagacggaactggaagacgagcgaaagcaacgtgccctggcagctgcagcaaagaagaagctggaaggggacctgaaagacctggagcttcaggccgactctgccatcaaggggagggaggaagccatcaagcagctacgcaaactgcaggctcagatgaaggactttcaaagagagctggaagatgcccgtgcctccagagatgagatctttgccacagccaaagagaatgagaagaaagccaagagcttggaagcagacctcatgcagctacaagaggacctcgccgccgctgagagggctcgcaaacaagcggacctcgagaaggaggaactggcagaggagctggccagtagcctgtcgggaaggaacgcactccaggacgagaagcgccgcctggaggcccggatcgcccagctggaggaggagctggaggaggagcagggcaacatggaggccatgagcgaccgggtccgcaaagccacacagcaggccgagcagctcagcaacgagctggccacagagcgcagcacggcccagaagaatgagagtgcccggcagcagctcgagcggcagaacaaggagctccggagcaagctccacgagatggagggggccgtcaagtccaagttcaagtccaccatcgcggcgctggaggccaagattgcacagctggaggagcaggtcgagcaggaggccagagagaaacaggcggccaccaagtcgctgaagcagaaagacaagaagctgaaggaaatcttgctgcaggtggaggacgagcgcaagatggccgagcagtacaaggagcaggcagagaaaggcaatgccagggtcaagcagctcaagaggcagctggaggaggcagaggaggagtcccagcgcatcaacgccaaccgcaggaagctgcagcgggagctggatgaggccacggagagcaacgaggccatgggccgcgaggtgaacgcactcaagagcaagctcagagggccccccccacaggaaacttcgcagtgatgcaccaggcgaggaaacgagacctctttcgttccttctagaaggtctggaggacgtagagttattgaaaatgcagatggttctgaggaggaaacggacactcgagacgcagacttcaatggaaccaaggccagtgaataagcaactttctacagttttgcaccacggcaagaaaaccaaaaaccaaaacaaacaaacaaaaaaaacccaacaacaacccagaacaaagcaaaacccagcagactgtacttagcattgtctaaatccattctcaaattccaaatatcacagacacccctcacacaaggaatataaaaaccaccaccctccagcctgggcaacgtagtaaaacctcatctatacaagaatttaaaaataagctgggcgtggtggtacacacctgtggtcccagctactagggaggctgagccaggaagaacgctccagcccaggacttcgaggctgcaatgagctataattgcatcattgcactccagcctgggcaacagagaccctgtctcaaccaccaccaccaccaccacccctactacccctgtattcaaggtaaaaattgaagtttgtatgatgtaagagatgagaaaaacccaacaggaaacacagacacatcctccagttctatcaatggattgtgcagacactgagtttttagaaaaacatatccacggtaaccggtccctggcaattctgtttacatgaaatggggagaaagtcaccgaaatgggtgccgccggcccccactcccaattcattccctaacctgcaaacctttccaacttctcacgtcaggcctttgagaattctttccccctctcctggtttccacacctcagacacgcacagttcaccaagtgccttctgtagtcacatgaattgaaaaggagacgctgctcccacggaggggagcaggaatgctgcactgtttacaccctgactgtgcttaaaaacactttcactaataaatggttataaatcacaaaaaaaaaaaacaaaaaaaaaaaaattgttgggggcgggagggccgcaaaaagagttttaaaacccactcgcgtggggcggccggggcccccaaatggtacgggaccgcatgggctacaacggggtgcccaaaaaaacacccgtggccaagacaaaggcggcgtggttcctcccaaaataaaaagacccgcgcgagacacaccaggccgttcggaccaaccccaagagggggtctggagggcacaaggggaccaacccaacaggggcccaggaggcgaaaaaaagagaggggcgggggggag

SEQ ID NO: 367321 - DNA, 5206 bp, Homo sapiens
  misc_feature (42)..(42): n is a, c, g, or t
  misc_feature (45)..(45): n is a, c, g, or t
tcccccccccggccccccccccggctccggccagccactacngcntactactactactaaattcgcggccgcgtcgacccacgcccaacttcgtgcgctgcatcatccccaaccacgagaagaggtccggcaagctggatgcgttcctggtgctggagcagctgcggtgcaatggggtgctggaaggcattcgcatctgccggcagggcttccccaaccggatcgtcttccaggagttccgccaacgctacgagatcctggcggcgaatgccatccccaaaggcttcatggacgggaagcaggcctgcattctcatgatcaaagccctggaacttgaccccaacttatacaggatagggcagagcaaaatcttcttccgaactggcgtcctggcccacctagaggaggagcgagatttgaagatcaccgatgtcatcatggccttccaggcgatgtgtcgtggctacttggccagaaaggcttttgccaagaggcagcagcagctgaccgccatgaaggtgattcagaggaactgcgccgcctacctcaagctgcggaactggcagtggtggaggcttttcaccaaagtgaagccactgctgcaggtgacacggcaggaggaggagatgcaggccaaggaggatgaactgcagaagaccaaggagcggcagcagaaggcagagaatgagcttaaggagctggaacagaagcactcgcagctgaccgaggagaagaacctgctacaggaacagctgcaggcagagacagagctgtatgcagaggctgaggagatgcgggtgcggctggcggccaagaagcaggagctggaggagatactgcatgagatggaggcccgcctggaggaggaggaagacaggggccagcagctacaggctgaaaggaagaagatggcccagcagatgctggaccttgaagaacagctggaggaggaggaagctgccaggcagaagctgcaacttgagaaggtcacggctgaggccaagatcaagaaactggaggatgagatcctggtcatggatgatcagaacaataaactatcaaaagaacgaaaactccttgaggagaggattagtgacttaacgacaaatcttgcagaagaggaagaaaaggccaagaatcttaccaagctgaaaaacaagcatgaatctatgatttcagaactggaagtgcggctaaagaaggaagagaagagccgacaggagctggagaagctgaaacggaagctggagggtgatgccagcgacttccacgagcagatcgctgacctccaggcgcagatcgcagagctcaagatgcagctggccaagaaggaggaggagctgcaggcggccctggccaggcttgacgatgaaatcgctcagaagaacaatgccctgaagaagatccgggagctggagggccacatctcagacctccaggaggacctggactcagagcgggccgccaggaacaaggctgaaaagcagaagcgagacctcggcgaggagctggaggccctaaagacagagctggaagacacactggacagcacagccactcagcaggagctcagggccaagagggagcaggaggtgacggtgctgaagaaggccctggatgaagagacgcggtcccatgaggctcaggtccaggagatgaggcagaaacacgcacaggcggtggaggagctcacagagcagcttgagcagttcaagagggccaaggcgaacctagacaagaataagcagacgctggagaaagagaacgcagacctggccggggagctgcgggtcctgggccaggccaagcaggaggtggaacataagaagaagaagctggaggcgcaggtgcaggagctgcagtccaagtgcagcgatggggagcgggcccgggcggagctcaatgacaaagtccacaagctgcagaatgaagttgagagcgtcacagggatgcttaacgaggccgaggggaaggccattaagctggccaaggacgtggcgtccctcagttcccagctccaggacacccaggtgagtgtcctgccacatcatccaggggacctggggggtggccttcctcggggcaggtccctgggacctctttgcatcccttttgcaggagctgcttcaagaagaaacccggcagaagctcaacgtgtctacgaagctgcgccagctggaggaggagcggaacagcctgcaagaccagctggacgaggagatggaggccaagcagaacctggagcgccacatctccactctcaacatccaggtgcctgccccgtgtccttgcttccttcatgggtcctctcaacttctctgcgctgagatcccccgcaggcagatcgcggtggagtgttggtgcgatggtgcttgaccccccagcttcccctgctattgggtttctccaacgaggagacatggtcttcgcttctcagagtctgtggggccagggacaggggccattcatggtccccctctcaccctaccctggacgctgtccttgtagctctccgactcgaagaagaagctgcaggactttgccagcaccgtggaagctctggaagaggggaagaagaggttccagaaggagatcgagaacctcacccagcagtacgaggagaaggcggccgcttatgataaactggaaaagaccaagaacaggcttcagcaggagctggacgacctggttgttgatttggacaaccagcggcaactcgtgtccaacctggaaaagaagcagaggaaatttgatcagttgttagccgaggagaaaaacatctcttccaaatacgcggatgagagggacagagctgaggcagaagccagggagaaggaaaccaaggccctgtccctggctcgggcccttgaagaggccttggaagccaaagaggaactcgagcggaccaacaaaatgctcaaagccgaaatggaagacctggtcagctccaaggatgacgtgggcaagaacgtccatgagctggagaagtccaagcgggccctggagacccagatggaggagatgaagacgcagctggaagagctggaggacgagctgcaagccacggaggacgccaaactgcggctggaagtcaacatgcaggcgctcaagggccagttcgaaagggatctccaagcccgggacgagcagaatgaggagaagaggaggcaactgcagagacagcttcacgagtatgagacggaactggaagacgagcgaaagcaacgtgccctggcagctgcagcaaagaagaagctggaaggggacctgaaagacctggagcttcaggccgactctgccatcaaggggagggaggaagccatcaagcagctacgcaaactgcaggctcagatgaaggactttcaaagagagctggaagatgcccgtgcctccagagatgagatctttgccacagccaaagagaatgagaagaaagccaagagcttggaagcagacctcatgcagctacaagaggacctcgccgccgctgagagggctcgcaaacaagcggacctcgagaaggaggaactggcagaggagctggccagtagcctgtcgggaaggaacgcactccaggacgagaagcgccgcctggaggcccggatcgcccagctggaggaggagctggaggaggagcagggcaacatggaggccatgagcgaccgggtccgcaaagccacacagcaggccgagcagctcagcaacgagctggccacagagcgcagcacggcccagaagaatgagagtgcccggcagcagctcgagcggcagaacaaggagctccggagcaagctccacgagatggagggggccgtcaagtccaagttcaagtccaccatcgcggcgctggaggccaagattgcacagctggaggagcaggtcgagcaggaggccagagagaaacaggcggccaccaagtcgctgaagcagaaagacaagaagctgaaggaaatcttgctgcaggtggaggacgagcgcaagatggccgagcagtacaaggagcaggcagagaaaggcaatgccagggtcaagcagctcaagaggcagctggaggaggcagaggaggagtcccagcgcatcaacgccaaccgcaggaagctgcagcgggagctggatgaggccacggagagcaacgaggccatgggccgcgaggtgaacgcactcaagagcaagctcagagggccccccccacaggaaacttcgcagtgatgcaccaggcgaggaaacgagacctctttcgttccttctagaaggtctggaggacgtagagttattgaaaatgcagatggttctgaggaggaaacggacactcgagacgcagacttcaatggaaccaaggccagtgaataagcaactttctacagttttgcaccacggcaagaaaaccaaaaaccaaaacaaacaaacaaaaaaaacccaacaacaacccagaacaaagcaaaacccagcagactgtacttagcattgtctaaatccattctcaaattccaaatatcacagacacccctcacacaaggaatataaaaaccaccaccctccagcctgggcaacgtagtaaaacctcatctatacaagaatttaaaaataagctgggcgtggtggtacacacctgtggtcccagctactagggaggctgagccaggaagaacgctccagcccaggacttcgaggctgcaatgagctataattgcatcattgcactccagcctgggcaacagagaccctgtctcaaccaccaccaccaccaccacccctactacccctgtattcaaggtaaaaattgaagtttgtatgatgtaagagatgagaaaaacccaacaggaaacacagacacatcctccagttctatcaatggattgtgcagacactgagtttttagaaaaacatatccacggtaaccggtccctggcaattctgtttacatgaaatggggagaaagtcaccgaaatgggtgccgccggcccccactcccaattcattccctaacctgcaaacctttccaacttctcacgtcaggcctttgagaattctttccccctctcctggtttccacacctcagacacgcacagttcaccaagtgccttctgtagtcacatgaattgaaaaggagacgctgctcccacggaggggagcaggaatgctgcactgtttacaccctgactgtgcttaaaaacactttcactaataaatggttataaatcacaa

SEQ ID NO: 367322 - DNA, 4885 bp, Homo sapiens
  misc_feature (42)..(42): n is a, c, g, or t
  misc_feature (45)..(45): n is a, c, g, or t
  misc_feature (2109)..(2110): n is a, c, g, or t
  misc_feature (2114)..(2115): n is a, c, g, or t
  misc_feature (2117)..(2117): n is a, c, g, or t
  misc_feature (2120)..(2120): n is a, c, g, or t
tcccccccccggccccccccccggctccggccagccactacngcntactactactactaaattcgcggccgcgtcgacccacgcccaacttcgtgcgctgcatcatccccaaccacgagaagaggtccggcaagctggatgcgttcctggtgctggagcagctgcggtgcaatggggtgctggaaggcattcgcatctgccggcagggcttccccaaccggatcgtcttccaggagttccgccaacgctacgagatcctggcggcgaatgccatccccaaaggcttcatggacgggaagcaggcctgcattctcatgatcaaagccctggaacttgaccccaacttatacaggatagggcagagcaaaatcttcttccgaactggcgtcctggcccacctagaggaggagcgagatttgaagatcaccgatgtcatcatggccttccaggcgatgtgtcgtggctacttggccagaaaggcttttgccaagaggcagcagcagctgaccgccatgaaggtgattcagaggaactgcgccgcctacctcaagctgcggaactggcagtggtggaggcttttcaccaaagtgaagccactgctgcaggtgacacggcaggaggaggagatgcaggccaaggaggatgaactgcagaagaccaaggagcggcagcagaaggcagagaatgagcttaaggagctggaacagaagcactcgcagctgaccgaggagaagaacctgctacaggaacagctgcaggcagagacagagctgtatgcagaggctgaggagatgcgggtgcggctggcggccaagaagcaggagctggaggagatactgcatgagatggaggcccgcctggaggaggaggaagacaggggccagcagctacaggctgaaaggaagaagatggcccagcagatgctggaccttgaagaacagctggaggaggaggaagctgccaggcagaagctgcaacttgagaaggtcacggctgaggccaagatcaagaaactggaggatgagatcctggtcatggatgatcagaacaataaactatcaaaagaacgaaaactccttgaggagaggattagtgacttaacgacaaatcttgcagaagaggaagaaaaggccaagaatcttaccaagctgaaaaacaagcatgaatctatgatttcagaactggaagtgcggctaaagaaggaagagaagagccgacaggagctggagaagctgaaacggaagctggagggtgatgccagcgacttccacgagcagatcgctgacctccaggcgcagatcgcagagctcaagatgcagctggccaagaaggaggaggagctgcaggcggccctggccaggcttgacgatgaaatcgctcagaagaacaatgccctgaagaagatccgggagctggagggccacatctcagacctccaggaggacctggactcagagcgggccgccaggaacaaggctgaaaagcagaagcgagacctcggcgaggagctggaggccctaaagacagagctggaagacacactggacagcacagccactcagcaggagctcagggccaagagggagcaggaggtgacggtgctgaagaaggccctggatgaagagacgcggtcccatgaggctcaggtccaggagatgaggcagaaacacgcacaggcggtggaggagctcacagagcagcttgagcagttcaagagggccaaggcgaacctagacaagaataagcagacgctggagaaagagaacgcagacctggccggggagctgcgggtcctgggccaggccaagcaggaggtggaacataagaagaagaagctggaggcgcaggtgcaggagctgcagtccaagtgcagcgatggggagcgggcccgggcggagctcaatgacaaagtccacaagctgcagaatgaagttgagagcgtcacagggatgcttaacgaggccgaggggaaggccattaagctggccaaggacgtggcgtccctcagttcccagctccaggacacccaggagctgcttcaagaagaaacccggcagaagctcaacgtgtctacgaagctgcgccagctggaggaggagcggaacagcnngcannancanctggacgaggagatggaggccatgcagaacctggaggcgccacatcttccactctacaacatccgagctctccgactcgaagaagaagctgcaggactttgccagcaccgtggaagctctggaagaggggaagaagaggttccagaaggagatcgagaacctcacccagcagtacgaggagaaggcggccgcttatgataaactggaaaagaccaagaacaggcttcagcaggagctggacgacctggttgttgatttggacaaccagcggcaactcgtgtccaacctggaaaagaagcagaggaaatttgatcagttgttagccgaggagaaaaacatctcttccaaatacgcggatgagagggacagagctgaggcagaagccagggagaaggaaaccaaggccctgtccctggctcgggcccttgaagaggccttggaagccaaagaggaactcgagcggaccaacaaaatgctcaaagccgaaatggaagacctggtcagctccaaggatgacgtgggcaagaacgtccatgagctggagaagtccaagcgggccctggagacccagatggaggagatgaagacgcagctggaagagctggaggacgagctgcaagccacggaggacgccaaactgcggctggaagtcaacatgcaggcgctcaagggccagttcgaaagggatctccaagcccgggacgagcagaatgaggagaagaggaggcaactgcagagacagcttcacgagtatgagacggaactggaagacgagcgaaagcaacgtgccctggcagctgcagcaaagaagaagctggaaggggacctgaaagacctggagcttcaggccgactctgccatcaaggggagggaggaagccatcaagcagctacgcaaactgcaggctcagatgaaggactttcaaagagagctggaagatgcccgtgcctccagagatgagatctttgccacagccaaagagaatgagaagaaagccaagagcttggaagcagacctcatgcagctacaagaggacctcgccgccgctgagagggctcgcaaacaagcggacctcgagaaggaggaactggcagaggagctggccagtagcctgtcgggaaggaacgcactccaggacgagaagcgccgcctggaggcccggatcgcccagctggaggaggagctggaggaggagcagggcaacatggaggccatgagcgaccgggtccgcaaagccacacagcaggccgagcagctcagcaacgagctggccacagagcgcagcacggcccagaagaatgagagtgcccggcagcagctcgagcggcagaacaaggagctccggagcaagctccacgagatggagggggccgtcaagtccaagttcaagtccaccatcgcggcgctggaggccaagattgcacagctggaggagcaggtcgagcaggaggccagagagaaacaggcggccaccaagtcgctgaagcagaaagacaagaagctgaaggaaatcttgctgcaggtggaggacgagcgcaagatggccgagcagtacaaggagcaggcagagaaaggcaatgccagggtcaagcagctcaagaggcagctggaggaggcagaggaggagtcccagcgcatcaacgccaaccgcaggaagctgcagcgggagctggatgaggccacggagagcaacgaggccatgggccgcgaggtgaacgcactcaagagcaagctcagagggccccccccacaggaaacttcgcagtgatgcaccaggcgaggaaacgagacctctttcgttccttctagaaggtctggaggacgtagagttattgaaaatgcagatggttctgaggaggaaacggacactcgagacgcagacttcaatggaaccaaggccagtgaataagcaactttctacagttttgcaccacggcaagaaaaccaaaaaccaaaacaaacaaacaaaaaaaacccaacaacaacccagaacaaagcaaaacccagcagactgtacttagcattgtctaaatccattctcaaattccaaatatcacagacacccctcacacaaggaatataaaaaccaccaccctccagcctgggcaacgtagtaaaacctcatctatacaagaatttaaaaataagctgggcgtggtggtacacacctgtggtcccagctactagggaggctgagccaggaagaacgctccagcccaggacttcgaggctgcaatgagctataattgcatcattgcactccagcctgggcaacagagaccctgtctcaaccaccaccaccaccaccacccctactacccctgtattcaaggtaaaaattgaagtttgtatgatgtaagagatgagaaaaacccaacaggaaacacagacacatcctccagttctatcaatggattgtgcagacactgagtttttagaaaaacatatccacggtaaccggtccctggcaattctgtttacatgaaatggggagaaagtcaccgaaatgggtgccgccggcccccactcccaattcattccctaacctgcaaacctttccaacttctcacgtcaggcctttgagaattctttccccctctcctggtttccacacctcagacacgcacagttcaccaagtgccttctgtagtcacatgaattgaaaaggagacgctgctcccacggaggggagcaggaatgctgcactgtttacaccctgactgtgcttaaaaacactttcactaataaatggttataaatcacaa

SEQ ID NO: 367323 - DNA, 4451 bp, Homo sapiens
  misc_feature (42)..(42): n is a, c, g, or t
  misc_feature (45)..(45): n is a, c, g, or t
tcccccccccggccccccccccggctccggccagccactacngcntactactactactaaattcgcggccgcgtcgacccacgcccaacttcgtgcgctgcatcatccccaaccacgagaagaggtccggcaagctggatgcgttcctggtgctggagcagctgcggtgcaatggggtgctggaaggcattcgcatctgccggcagggcttccccaaccggatcgtcttccaggagttccgccaacgctacgagatcctggcggcgaatgccatccccaaaggcttcatggacgggaagcaggcctgcattctcatgatcaaagccctggaacttgaccccaacttatacaggatagggcagagcaaaatcttcttccgaactggcgtcctggcccacctagaggaggagcgagatttgaagatcaccgatgtcatcatggccttccaggcgatgtgtcgtggctacttggccagaaaggcttttgccaagaggcagcagcagctgaccgccatgaaggtgattcagaggaactgcgccgcctacctcaagctgcggaactggcagtggtggaggcttttcaccaaagtgaagccactgctgcaggtgacacggcaggaggaggagatgcaggccaaggaggatgaactgcagaagaccaaggagcggcagcagaaggcagagaatgagcttaaggagctggaacagaagcactcgcagctgaccgaggagaagaacctgctacaggaacagctgcaggcagagacagagctgtatgcagaggctgaggagatgcgggtgcggctggcggccaagaagcaggagctggaggagatactgcatgagatggaggcccgcctggaggaggaggaagacaggggccagcagctacaggctgaaaggaagaagatggcccagcagatgctggaccttgaagaacagctggaggaggaggaagctgccaggcagaagctgcaacttgagaaggtcacggctgaggccaagatcaagaaactggaggatgagatcctggtcatggatgatcagaacaataaactatcaaaagaacgaaaactccttgaggagaggattagtgacttaacgacaaatcttgcagaagaggaagaaaaggccaagaatcttaccaagctgaaaaacaagcatgaatctatgatttcagaactggaagtgcggctaaagaaggaagagaagagccgacaggagctggagaagctgaaacggaagctggagggtgatgccagcgacttccacgagcagatcgctgacctccaggcgcagatcgcagagctcaagatgcagctggccaagaaggaggaggagctgcaggcggccctggccaggcttgacgatgaaatcgctcagaagaacaatgccctgaagaagatccgggagctggagggccacatctcagacctccaggaggacctggactcagagcgggccgccaggaacaaggctgaaaagcagaagcgagacctcggcgaggagctggaggccctaaagacagagctggaagacacactggacagcacagccactcagcaggagctcagggccaagagggagcaggaggtgacggtgctgaagaaggccctggatgaagagacgcggtcccatgaggctcaggtccaggagatgaggcagaaacacgcacaggcggtggaggagctcacagagcagcttgagcagttcaagagggccaaggcgaacctagacaagaataagcagacgctggagaaagagaacgcagacctggccggggagctgcgggtcctgggccaggccaagcaggaggtggaacataagaagaagaagctggaggcgcaggtgcaggagctgcagtccaagtgcagcgatggggagcgggcccgggcggagctcaatgacaaagtccacaagctgcagaatgaagttgagagcgtcacagggatgcttaacgaggccgaggggaaggccattaagctggccaaggacgtggcgtccctcagttcccagctccaggacacccaggagctgcttcaagaagaaacccggcagaagctcaacgtgtctacgaagctgcgccagctggaggaggagcggaacagcctgcaagaccagctggacgaggagatggaggccaagcagaacctggagcgccacatctccactctcaacatccagctctccgactcgaagaagaagctgcaggactttgccagcaccgtggaagctctggaagaggggaagaagaggttccagaaggagatcgagaacctcacccagcagtacgaggagaaggcggccgcttatgataaactggaaaagaccaagaacaggcttcagcaggagctggacgacctggttgttgatttggacaaccagcggcaactcgtgtccaacctggaaaagaagcagaggaaatttgatcagttgttagccgaggagaaaaacatctcttccaaatacgcggatgagagggacagagctgaggcagaagccagggagaaggaaaccaaggccctgtccctggctcgggcccttgaagaggccttggaagccaaagaggaactcgagcggaccaacaaaatgctcaaagccgaaatggaagacctggtcagctccaaggatgacgtgggcaagaacgtccatgagctggagaagtccaagcgggccctggagacccagatggaggagatgaagacgcagctggaagagctggaggacgagctgcaagccacggaggacgccaaactgcggctggaagtcaacatgcaggcgctcaagggccagttcgaaagggatctccaagcccgggacgagcagaatgaggagaagaggaggcaactgcagagacagcttcacgagtatgagacggaactggaagacgagcgaaagcaacgtgccctggcagctgcagcaaagaagaagctggaaggggacctgaaagacctggagcttcaggccgactctgccatcaaggggagggaggaagccatcaagcagctacgcaaactgcaggctcagatgaaggactttcaaagagagctggaagatgcccgtgcctccagagatgagatctttgccacagccaaagagaatgagaagaaagccaagagcttggaagcagacctcatgcagctacaagaggacctcgccgccgctgagagggctcgcaaacaagcggacctcgagaaggaggaactggcagaggagctggccagtagcctgtcgggaaggaacgcactccaggacgagaagcgccgcctggaggcccggatcgcccagctggaggaggagctggaggaggagcagggcaacatggaggccatgagcgaccgggtccgcaaagccacacaggcatcaacgccaaccgcaggaagctgcagcgggagctggatgaggccacggagagcaacgaggccatgggccgcgaggtgaacgcactcaagagcaagctcaggcgaggaaacgagacctctttcgttccttctagaaggtctggaggacgtagagttattgaaaatgcagatggttctgaggaggaaacggacactcgagacgcagacttcaatggaaccaaggccagtgaataagcaactttctacagttttgcaccacggcaagaaaaccaaaaaccaaaacaaacaaacaaaaaaaacccaacaacaacccagaacaaagcaaaacccagcagactgtacttagcattgtctaaatccattctcaaattccaaatatcacagacacccctcacacaaggaatataaaaaccaccaccctccagcctgggcaacgtagtaaaacctcatctatacaagaatttaaaaataagctgggcgtggtggtacacacctgtggtcccagctactagggaggctgagccaggaagaacgctccagcccaggacttcgaggctgcaatgagctataattgcatcattgcactccagcctgggcaacagagaccctgtctcaaccaccaccaccaccaccacccctactacccctgtattcaaggtaaaaattgaagtttgtatgatgtaagagatgagaaaaacccaacaggaaacacagacacatcctccagttctatcaatggattgtgcagacactgagtttttagaaaaacatatccacggtaaccggtccctggcaattctgtttacatgaaatggggagaaagtcaccgaaatgggtgccgccggcccccactcccaattcattccctaacctgcaaacctttccaacttctcacgtcaggcctttgagaattctttccccctctcctggtttccacacctcagacacgcacagttcaccaagtgccttctgtagtcacatgaattgaaaaggagacgctgctcccacggaggggagcaggaatgctgcactgtttacaccctgactgtgcttaaaaacactttcactaataaatggttataaatcacaa

SEQ ID NO: 367324 - DNA, 4852 bp, Homo sapiens
  misc_feature (42)..(42): n is a, c, g, or t
  misc_feature (45)..(45): n is a, c, g, or t
tcccccccccggccccccccccggctccggccagccactacngcntactactactactaaattcgcggccgcgtcgacccacgcccaacttcgtgcgctgcatcatccccaaccacgagaagaggtccggcaagctggatgcgttcctggtgctggagcagctgcggtgcaatggggtgctggaaggcattcgcatctgccggcagggcttccccaaccggatcgtcttccaggagttccgccaacgctacgagatcctggcggcgaatgccatccccaaaggcttcatggacgggaagcaggcctgcattctcatgatcaaagccctggaacttgaccccaacttatacaggatagggcagagcaaaatcttcttccgaactggcgtcctggcccacctagaggaggagcgagatttgaagatcaccgatgtcatcatggccttccaggcgatgtgtcgtggctacttggccagaaaggcttttgccaagaggcagcagcagctgaccgccatgaaggtgattcagaggaactgcgccgcctacctcaagctgcggaactggcagtggtggaggcttttcaccaaagtgaagccactgctgcaggtgacacggcaggaggaggagatgcaggccaaggaggatgaactgcagaagaccaaggagcggcagcagaaggcagagaatgagcttaaggagctggaacagaagcactcgcagctgaccgaggagaagaacctgctacaggaacagctgcaggcagagacagagctgtatgcagaggctgaggagatgcgggtgcggctggcggccaagaagcaggagctggaggagatactgcatgagatggaggcccgcctggaggaggaggaagacaggggccagcagctacaggctgaaaggaagaagatggcccagcagatgctggaccttgaagaacagctggaggaggaggaagctgccaggcagaagctgcaacttgagaaggtcacggctgaggccaagatcaagaaactggaggatgagatcctggtcatggatgatcagaacaataaactatcaaaagaacgaaaactccttgaggagaggattagtgacttaacgacaaatcttgcagaagaggaagaaaaggccaagaatcttaccaagctgaaaaacaagcatgaatctatgatttcagaactggaagtgcggctaaagaaggaagagaagagccgacaggagctggagaagctgaaacggaagctggagggtgatgccagcgacttccacgagcagatcgctgacctccaggcgcagatcgcagagctcaagatgcagctggccaagaaggaggaggagctgcaggcggccctggccaggcttgacgatgaaatcgctcagaagaacaatgccctgaagaagatccgggagctggagggccacatctcagacctccaggaggacctggactcagagcgggccgccaggaacaaggctgaaaagcagaagcgagacctcggcgaggagctggaggccctaaagacagagctggaagacacactggacagcacagccactcagcaggagctcagggccaagagggagcaggaggtgacggtgctgaagaaggccctggatgaagagacgcggtcccatgaggctcaggtccaggagatgaggcagaaacacgcacaggcggtggaggagctcacagagcagcttgagcagttcaagagggccaaggcgaacctagacaagaataagcagacgctggagaaagagaacgcagacctggccggggagctgcgggtcctgggccaggccaagcaggaggtggaacataagaagaagaagctggaggcgcaggtgcaggagctgcagtccaagtgcagcgatggggagcgggcccgggcggagctcaatgacaaagtccacaagctgcagaatgaagttgagagcgtcacagggatgcttaacgaggccgaggggaaggccattaagctggccaaggacgtggcgtccctcagttcccagctccaggacacccaggagctgcttcaagaagaaacccggcagaagctcaacgtgtctacgaagctgcgccagctggaggaggagcggaacagcctgcaagaccagctggacgaggagatggaggccaagcagaacctggagcgccacatctccactctcaacatccagctctccgactcgaagaagaagctgcaggactttgccagcaccgtggaagctctggaagaggggaagaagaggttccagaaggagatcgagaacctcacccagcagtacgaggagaaggcggccgcttatgataaactggaaaagaccaagaacaggcttcagcaggagctggacgacctggttgttgatttggacaaccagcggcaactcgtgtccaacctggaaaagaagcagaggaaatttgatcagttgttagccgaggagaaaaacatctcttccaaatacgcggatgagagggacagagctgaggcagaagccagggagaaggaaaccaaggccctgtccctggctcgggcccttgaagaggccttggaagccaaagaggaactcgagcggaccaacaaaatgctcaaagccgaaatggaagacctggtcagctccaaggatgacgtgggcaagaacgtccatgagctggagaagtccaagcgggccctggagacccagatggaggagatgaagacgcagctggaagagctggaggacgagctgcaagccacggaggacgccaaactgcggctggaagtcaacatgcaggcgctcaagggccagttcgaaagggatctccaagcccgggacgagcagaatgaggagaagaggaggcaactgcagagacagcttcacgagtatgagacggaactggaagacgagcgaaagcaacgtgccctggcagctgcagcaaagaagaagctggaaggggacctgaaagacctggagcttcaggccgactctgccatcaaggggagggaggaagccatcaagcagctacgcaaactgcaggctcagatgaaggactttcaaagagagctggaagatgcccgtgcctccagagatgagatctttgccacagccaaagagaatgagaagaaagccaagagcttggaagcagacctcatgcagctacaagaggacctcgccgccgctgagagggctcgcaaacaagcggacctcgagaaggaggaactggcagaggagctggccagtagcctgtcgggaaggaacgcactccaggacgagaagcgccgcctggaggcccggatcgcccagctggaggaggagctggaggaggagcagggcaacatggaggccatgagcgaccgggtccgcaaagccacacagcaggccgagcagctcagcaacgagctggccacagagcgcagcacggcccagaagaatgagagtgcccggcagcagctcgagcggcagaacaaggagctccggagcaagctccacgagatggagggggccgtcaagtccaagttcaagtccaccatcgcggcgctggaggccaagattgcacagctggaggagcaggtcgagcaggaggccagagagaaacaggcggccaccaagtcgctgaagcagaaagacaagaagctgaaggaaatcttgctgcaggtggaggacgagcgcaagatggccgagcagtacaaggagcaggcagagaaaggcaatgccagggtcaagcagctcaagaggcagctggaggaggcagaggaggagtcccagcgcatcaacgccaaccgcaggaagctgcagcgggagctggatgaggccacggagagcaacgaggccatgggccgcgaggtgaacgcactcaagagcaagctcaggcgaggaaacgagacctctttcgttccttctagaaggtctggaggacgtagagttattgaaaatgcagatggttctgaggaggaaacggacactcgagacgcagacttcaatggaaccaaggccagtgaataagcaactttctacagttttgcaccacggcaagaaaaccaaaaaccaaaacaaacaaacaaaaaaaacccaacaacaacccagaacaaagcaaaacccagcaaaacccagcagactgtacttagcattgtctaaatccattctcaaattccaaatatcacagacacccctcacacaaggaatataaaaaccaccaccctccagcctgggcaacgtagtaaaacctcatctatacaagaatttaaaaataagctgggcgtggtggtacacacctgtggtcccagctactagggaggctgagccaggaagaacgctccagcccaggacttcgaggctgcaatgagctataattgcatcattgcactccagcctgggcaacagagaccctgtctcaaccaccaccaccaccaccacccctactacccctgtattcaaggtaaaaattgaagtttgtatgatgtaagagatgagaaaaacccaacaggaaacacagacacatcctccagttctatcaatggattgtgcagacactgagtttttagaaaaacatatccacggtaaccggtccctggcaattctgtttacatgaaatggggagaaagtcaccgaaatgggtgccgccggcccccactcccaattcattccctaacctgcaaacctttccaacttctcacgtcaggcctttgagaattctttccccctctcctggtttccacacctcagacacgcacagttcaccaagtgccttctgtagtcacatgaattgaaaaggagacgctgctcccacggaggggagcaggaatgctgcactgtttacaccctgactgtgcttaaaaacactttcactaataaatggttataaatcacaa

SEQ ID NO: 367325 - DNA, 4366 bp, Homo sapiens
  misc_feature (42)..(42): n is a, c, g, or t
  misc_feature (45)..(45): n is a, c, g, or t
tcccccccccggccccccccccggctccggccagccactacngcntactactactactaaattcgcggccgcgtcgacccacgcccaacttcgtgcgctgcatcatccccaaccacgagaagaggtccggcaagctggatgcgttcctggtgctggagcagctgcggtgcaatggggtgctggaaggcattcgcatctgccggcagggcttccccaaccggatcgtcttccaggagttccgccaacgctacgagatcctggcggcgaatgccatccccaaaggcttcatggacgggaagcaggcctgcattctcatgatcaaagccctggaacttgaccccaacttatacaggatagggcagagcaaaatcttcttccgaactggcgtcctggcccacctagaggaggagcgagatttgaagatcaccgatgtcatcatggccttccaggcgatgtgtcgtggctacttggccagaaaggcttttgccaagaggcagcagcagctgaccgccatgaaggtgattcagaggaactgcgccgcctacctcaagctgcggaactggcagtggtggaggcttttcaccaaagtgaagccactgctgcaggtgacacggcaggaggaggagatgcaggccaaggaggatgaactgcagaagaccaaggagcggcagcagaaggcagagaatgagcttaaggagctggaacagaagcactcgcagctgaccgaggagaagaacctgctacaggaacagctgcaggcagagacagagctgtatgcagaggctgaggagatgcgggtgcggctggcggccaagaagcaggagctggaggagatactgcatgagatggaggcccgcctggaggaggaggaagacaggggccagcagctacaggctgaaaggaagaagatggcccagcagatgctggaccttgaagaacagctggaggaggaggaagctgccaggcagaagctgcaacttgagaaggtcacggctgaggccaagatcaagaaactggaggatgagatcctggtcatggatgatcagaacaataaactatcaaaagaacgaaaactccttgaggagaggattagtgacttaacgacaaatcttgcagaagaggaagaaaaggccaagaatcttaccaagctgaaaaacaagcatgaatctatgatttcagaactggaagtgcggctaaagaaggaagagaagagccgacaggagctggagaagctgaaacggaagctggagggtgatgccagcgacttccacgagcagatcgctgacctccaggcgcagatcgcagagctcaagatgcagctggccaagaaggaggaggagctgcaggcggccctggccaggcttgacgatgaaatcgctcagaagaacaatgccctgaagaagatccgggagctggagggccacatctcagacctccaggaggacctggactcagagcgggccgccaggaacaaggctgaaaagcagaagcgagacctcggcgaggagctggaggccctaaagacagagctggaagacacactggacagcacagccactcagcaggagctcagggccaagagggagcaggaggtgacggtgctgaagaaggccctggatgaagagacgcggtcccatgaggctcaggtccaggagatgaggcagaaacacgcacaggcggtggaggagctcacagagcagcttgagcagttcaagagggccaaggcgaacctagacaagaataagcagacgctggagaaagagaacgcagacctggccggggagctgcgggtcctgggccaggccaagcaggaggtggaacataagaagaagaagctggaggcgcaggtgcaggagctgcagtccaagtgcagcgatggggagcgggcccgggcggagctcaatgacaaagtccacaagctgcagaatgaagttgagagcgtcacagggatgcttaacgaggccgaggggaaggccattaagctggccaaggacgtggcgtccctcagttcccagctccaggacacccaggagctgcttcaagaagaaacccggcagaagctcaacgtgtctacgaagctgcgccagctggaggaggagcggaacagcctgcaagaccagctggacgaggagatggaggccaagcagaacctggagcgccacatctccactctcaacatccagctctccgactcgaagaagaagctgcaggactttgccagcaccgtggaagctctggaagaggggaagaagaggttccagaaggagatcgagaacctcacccagcagtacgaggagaaggcggccgcttatgataaactggaaaagaccaagaacaggcttcagcaggagctggacgacctggttgttgatttggacaaccagcggcaactcgtgtccaacctggaaaagaagcagaggaaatttgatcagttgttagccgaggagaaaaacatctcttccaaatacgcggatgagagggacagagctgaggcagaagccagggagaaggaaaccaaggccctgtccctggctcgggcccttgaagaggccttggaagccaaagaggaactcgagcggaccaacaaaatgctcaaagccgaaatggaagacctggtcagctccaaggatgacgtgggcaagaacgtccatgagctggagaagtccaagcgggccctggagacccagatggaggagatgaagacgcagctggaagagctggaggacgagctgcaagccacggaggacgccaaactgcggctggaagtcaacatgcaggcgctcaagggccagttcgaaagggatctccaagcccgggacgagcagaatgaggagaagaggaggcaactgcagagacagcttcacgagtatgagacggaactggaagacgagcgaaagcaacgtgccctggcagctgcagcaaagaagaagctggaaggggacctgaaagacctggagcttcaggccgactctgccatcaaggggagggaggaagccatcaagcagctacgcaaactgcaggctcagatgaaggactttcaaagagagctggaagatgcccgtgcctccagagatgagatctttgccacagccaaagagaatgagaagaaagccaagagcttggaagcagacctcatgcagctacaagaggacctcgccgccgctgagagggctcgcaaacaagcggacctcgagaaggaggaactggcagaggagctggccagtagcctgtcgggaaggaacgcactccaggacgagaagcgccgcctggaggcccggatcgcccagctggaggaggagctggaggaggagcagggcaacatggaggccatgagcgaccgggtccgcaaagccacacagcaggccgagcagctcagcaacgagctggccacagagcgcagcacggcccagaagaatgagagtgcccggcagcagctcgagcggcagaacaaggagctccggagcaagctccacgagatggagggggccgtcaagtccaagttcaagtccaccatcgcggcgctggaggccaagattgcacagctggaggagcaggtcgagcaggaggccagagagaaacaggcggccaccaagtcgctgaagcagaaagacaagaagctgaaggaaatcttgctgcaggtggaggacgagcgcaagatggccgagcagtacaaggagcaggcagagaaaggcaatgccagggtcaagcagctcaagaggcagctggaggaggcagaggaggagtcccagcgcatcaacgccaaccgcaggaagctgcagcgggagctggatgaggccacggagagcaacgaggccatgggccgcgaggtgaacgcactcaagagcaagctcagagggccccccccacaggaaacttcgcagtgatgcaccaggcgaggaaacgagacctctttcgttccttctagaaggtctggaggacgtagagttattgaaaatgcagatggttctgaggaggaaacggacactcgagacgcagacttcaatggaaccaaggccagtgaataagcaactttctacagttttgcaccacggcaagaaaaccaaaaaccaaaacaaacaaacaaaaaaaacccaacaacaacccagaacaaagtcatcatgtcttttttaggagcagtttctgttgatgtattttttccctctgaagggatcataccaccctgtttctttatatgccttgtgattttttttgttgttgttgggtttgtttgtttgtttgttttttctgagatggagtcttgctctgtcacccaggctggagtgcagtggcacgatctcggctcactgcaacctctgcctcccgggttaagcgattctcctgcctcatctaccaaagggatgctcta

SEQ ID NO: 367326 - DNA, 4179 bp, Homo sapiens
  misc_feature (42)..(42): n is a, c, g, or t
  misc_feature (45)..(45): n is a, c, g, or t
tcccccccccggccccccccccggctccggccagccactacngcntactactactactaaattcgcggccgcgtcgacccacgcccaacttcgtgcgctgcatcatccccaaccacgagaagaggtccggcaagctggatgcgttcctggtgctggagcagctgcggtgcaatggggtgctggaaggcattcgcatctgccggcagggcttccccaaccggatcgtcttccaggagttccgccaacgctacgagatcctggcggcgaatgccatccccaaaggcttcatggacgggaagcaggcctgcattctcatgatcaaagccctggaacttgaccccaacttatacaggatagggcagagcaaaatcttcttccgaactggcgtcctggcccacctagaggaggagcgagatttgaagatcaccgatgtcatcatggccttccaggcgatgtgtcgtggctacttggccagaaaggcttttgccaagaggcagcagcagctgaccgccatgaaggtgattcagaggaactgcgccgcctacctcaagctgcggaactggcagtggtggaggcttttcaccaaagtgaagccactgctgcaggtgacacggcaggaggaggagatgcaggccaaggaggatgaactgcagaagaccaaggagcggcagcagaaggcagagaatgagcttaaggagctggaacagaagcactcgcagctgaccgaggagaagaacctgctacaggaacagctgcaggcagagacagagctgtatgcagaggctgaggagatgcgggtgcggctggcggccaagaagcaggagctggaggagatactgcatgagatggaggcccgcctggaggaggaggaagacaggggccagcagctacaggctgaaaggaagaagatggcccagcagatgctggaccttgaagaacagctggaggaggaggaagctgccaggcagaagctgcaacttgagaaggtcacggctgaggccaagatcaagaaactggaggatgagatcctggtcatggatgatcagaacaataaactatcaaaagaacgaaaactccttgaggagaggattagtgacttaacgacaaatcttgcagaagaggaagaaaaggccaagaatcttaccaagctgaaaaacaagcatgaatctatgatttcagaactggaagtgcggctaaagaaggaagagaagagccgacaggagctggagaagctgaaacggaagctggagggtgatgccagcgacttccacgagcagatcgctgacctccaggcgcagatcgcagagctcaagatgcagctggccaagaaggaggaggagctgcaggcggccctggccaggcttgacgatgaaatcgctcagaagaacaatgccctgaagaagatccgggagctggagggccacatctcagacctccaggaggacctggactcagagcgggccgccaggaacaaggctgaaaagcagaagcgagacctcggcgaggagctggaggccctaaagacagagctggaagacacactggacagcacagccactcagcaggagctcagggccaagagggagcaggaggtgacggtgctgaagaaggccctggatgaagagacgcggtcccatgaggctcaggtccaggagatgaggcagaaacacgcacaggcggtggaggagctcacagagcagcttgagcagttcaagagggccaaggcgaacctagacaagaataagcagacgctggagaaagagaacgcagacctggccggggagctgcgggtcctgggccaggccaagcaggaggtggaacataagaagaagaagctggaggcgcaggtgcaggagctgcagtccaagtgcagcgatggggagcgggcccgggcggagctcaatgacaaagtccacaagctgcagaatgaagttgagagcgtcacagggatgcttaacgaggccgaggggaaggccattaagctggccaaggacgtggcgtccctcagttcccagctccaggacacccaggagctgcttcaagaagaaacccggcagaagctcaacgtgtctacgaagctgcgccagctggaggaggagcggaacagcctgcaagaccagctggacgaggagatggaggccaagcagaacctggagcgccacatctccactctcaacatccagctctccgactcgaagaagaagctgcaggactttgccagcaccgtggaagctctggaagaggggaagaagaggttccagaaggagatcgagaacctcacccagcagtacgaggagaaggcggccgcttatgataaactggaaaagaccaagaacaggcttcagcaggagctggacgacctggttgttgatttggacaaccagcggcaactcgtgtccaacctggaaaagaagcagaggaaatttgatcagttgttagccgaggagaaaaacatctcttccaaatacgcggatgagagggacagagctgaggcagaagccagggagaaggaaaccaaggccctgtccctggctcgggcccttgaagaggccttggaagccaaagaggaactcgagcggaccaacaaaatgctcaaagccgaaatggaagacctggtcagctccaaggatgacgtgggcaagaacgtccatgagctggagaagtccaagcgggccctggagacccagatggaggagatgaagacgcagctggaagagctggaggacgagctgcaagccacggaggacgccaaactgcggctggaagtcaacatgcaggcgctcaagggccagttcgaaagggatctccaagcccgggacgagcagaatgaggagaagaggaggcaactgcagagacagcttcacgagtatgagacggaactggaagacgagcgaaagcaacgtgccctggcagctgcagcaaagaagaagctggaaggggacctgaaagacctggagcttcaggccgactctgccatcaaggggagggaggaagccatcaagcagctacgcaaactgcaggctcagatgaaggactttcaaagagagctggaagatgcccgtgcctccagagatgagatctttgccacagccaaagagaatgagaagaaagccaagagcttggaagcagacctcatgcagctacaagaggacctcgccgccgctgagagggctcgcaaacaagcggacctcgagaaggaggaactggcagaggagctggccagtagcctgtcgggaaggaacgcactccaggacgagaagcgccgcctggaggcccggatcgcccagctggaggaggagctggaggaggagcagggcaacatggaggccatgagcgaccgggtccgcaaagccacacagcaggccgagcagctcagcaacgagctggccacagagcgcagcacggcccagaagaatgagagtgcccggcagcagctcgagcggcagaacaaggagctccggagcaagctccacgagatggagggggccgtcaagtccaagttcaagtccaccatcgcggcgctggaggccaagattgcacagctggaggagcaggtcgagcaggaggccagagagaaacaggcggccaccaagtcgctgaagcagaaagacaagaagctgaaggaaatcttgctgcaggtggaggacgagcgcaagatggccgagcagtacaaggagcaggcagagaaaggcaatgccagggtcaagcagctcaagaggcagctggaggaggcagaggaggagtcccagcgcatcaacgccaaccgcaggaagctgcagcgggagctggatgaggccacggagagcaacgaggccatgggccgcgaggtgaacgcactcaagagcaagctcaggcgaggaaacgagacctctttcgttccttctagaaggtctggaggacgtagagttattgaaaatgcagatggttctgaggaggaaacggacactcgagacgcagacttcaatggaaccaaggccagtgaataagcaactttctacagttttgcaccacggcaagaaaaccaaaaaccaaaacaaacaaacaaaaaaaacccaacaacaacccagaacaaagcaaaacccagcagactgtacttagcattgtctaaatccattctcaaattccaaatatcacagacacccctcatcctaccaaaggggagtcctctagagtgacctc

SEQ ID NO: 367327 - DNA, 4227 bp, Homo sapiens
  misc_feature (42)..(42): n is a, c, g, or t
  misc_feature (45)..(45): n is a, c, g, or t
tcccccccccggccccccccccggctccggccagccactacngcntactactactactaaattcgcggccgcgtcgacccacgcccaacttcgtgcgctgcatcatccccaaccacgagaagaggtccggcaagctggatgcgttcctggtgctggagcagctgcggtgcaatggggtgctggaaggcattcgcatctgccggcagggcttccccaaccggatcgtcttccaggagttccgccaacgctacgagatcctggcggcgaatgccatccccaaaggcttcatggacgggaagcaggcctgcattctcatgatcaaagccctggaacttgaccccaacttatacaggatagggcagagcaaaatcttcttccgaactggcgtcctggcccacctagaggaggagcgagatttgaagatcaccgatgtcatcatggccttccaggcgatgtgtcgtggctacttggccagaaaggcttttgccaagaggcagcagcagctgaccgccatgaaggtgattcagaggaactgcgccgcctacctcaagctgcggaactggcagtggtggaggcttttcaccaaagtgaagccactgctgcaggtgacacggcaggaggaggagatgcaggccaaggaggatgaactgcagaagaccaaggagcggcagcagaaggcagagaatgagcttaaggagctggaacagaagcactcgcagctgaccgaggagaagaacctgctacaggaacagctgcaggcagagacagagctgtatgcagaggctgaggagatgcgggtgcggctggcggccaagaagcaggagctggaggagatactgcatgagatggaggcccgcctggaggaggaggaagacaggggccagcagctacaggctgaaaggaagaagatggcccagcagatgctggaccttgaagaacagctggaggaggaggaagctgccaggcagaagctgcaacttgagaaggtcacggctgaggccaagatcaagaaactggaggatgagatcctggtcatggatgatcagaacaataaactatcaaaagaacgaaaactccttgaggagaggattagtgacttaacgacaaatcttgcagaagaggaagaaaaggccaagaatcttaccaagctgaaaaacaagcatgaatctatgatttcagaactggaagtgcggctaaagaaggaagagaagagccgacaggagctggagaagctgaaacggaagctggagggtgatgccagcgacttccacgagcagatcgctgacctccaggcgcagatcgcagagctcaagatgcagctggccaagaaggaggaggagctgcaggcggccctggccaggcttgacgatgaaatcgctcagaagaacaatgccctgaagaagatccgggagctggagggccacatctcagacctccaggaggacctggactcagagcgggccgccaggaacaaggctgaaaagcagaagcgagacctcggcgaggagctggaggccctaaagacagagctggaagacacactggacagcacagccactcagcaggagctcagggccaagagggagcaggaggtgacggtgctgaagaaggccctggatgaagagacgcggtcccatgaggctcaggtccaggagatgaggcagaaacacgcacaggcggtggaggagctcacagagcagcttgagcagttcaagagggccaaggcgaacctagacaagaataagcagacgctggagaaagagaacgcagacctggccggggagctgcgggtcctgggccaggccaagcaggaggtggaacataagaagaagaagctggaggcgcaggtgcaggagctgcagtccaagtgcagcgatggggagcgggcccgggcggagctcaatgacaaagtccacaagctgcagaatgaagttgagagcgtcacagggatgcttaacgaggccgaggggaaggccattaagctggccaaggacgtggcgtccctcagttcccagctccaggacacccaggagctgcttcaagaagaaacccggcagaagctcaacgtgtctacgaagctgcgccagctggaggaggagcggaacagcctgcaagaccagctggacgaggagatggaggccaagcagaacctggagcgccacatctccactctcaacatccagctctccgactcgaagaagaagctgcaggactttgccagcaccgtggaagctctggaagaggggaagaagaggttccagaaggagatcgagaacctcacccagcagtacgaggagaaggcggccgcttatgataaactggaaaagaccaagaacaggcttcagcaggagctggacgacctggttgttgatttggacaaccagcggcaactcgtgtccaacctggaaaagaagcagaggaaatttgatcagttgttagccgaggagaaaaacatctcttccaaatacgcggatgagagggacagagctgaggcagaagccagggagaaggaaaccaaggccctgtccctggctcgggcccttgaagaggccttggaagccaaagaggaactcgagcggaccaacaaaatgctcaaagccgaaatggaagacctggtcagctccaaggatgacgtgggcaagaacgtccatgagctggagaagtccaagcgggccctggagacccagatggaggagatgaagacgcagctggaagagctggaggacgagctgcaagccacggaggacgccaaactgcggctggaagtcaacatgcaggcgctcaagggccagttcgaaagggatctccaagcccgggacgagcagaatgaggagaagaggaggcaactgcagagacagcttcacgagtatgagacggaactggaagacgagcgaaagcaacgtgccctggcagctgcagcaaagaagaagctggaaggggacctgaaagacctggagcttcaggccgactctgccatcaaggggagggaggaagccatcaagcagctacgcaaactgcaggctcagatgaaggactttcaaagagagctggaagatgcccgtgcctccagagatgagatctttgccacagccaaagagaatgagaagaaagccaagagcttggaagcagacctcatgcagctacaagaggacctcgccgccgctgagagggctcgcaaacaagcggacctcgagaaggaggaactggcagaggagctggccagtagcctgtcgggaaggaacgcactccaggacgagaagcgccgcctggaggcccggatcgcccagctggaggaggagctggaggaggagcagggcaacatggaggccatgagcgaccgggtccgcaaagccacacagcaggccgagcagctcagcaacgagctggccacagagcgcagcacggcccagaagaatgagagtgcccggcagcagctcgagcggcagaacaaggagctccggagcaagctccacgagatggagggggccgtcaagtccaagttcaagtccaccatcgcggcgctggaggccaagattgcacagctggaggagcaggtcgagcaggaggccagagagaaacaggcggccaccaagtcgctgaagcagaaagacaagaagctgaaggaaatcttgctgcaggtggaggacgagcgcaagatggccgagcagtacaaggagcaggcagagaaaggcaatgccagggtcaagcagctcaagaggcagctggaggaggcagaggaggagtcccagcgcatcaacgccaaccgcaggaagctgcagcgggagctggatgaggccacggagagcaacgaggccatgggccgcgaggtgaacgcactcaagagcaagctcagagggccccccccacaggaaacttcgcagtgatgcaccaggcgaggaaacgagacctctttcgttccttctagaaggtctggaggacgtagagttattgaaaatgcagatggttctgaggaggaaacggacactcgagacgcagacttcaatggaaccaaggccagtgaataagcaactttctacagttttgcaccacggcaagaaaaccaaaaaccaaaaaccaaaacaaacaaacaaaagcccacagacatcttagggacagaagatattcaaattttatccaatgttctccttaaagtagcagcagatacgctatacacttcctattggtctgatgtaatcttcacacatacacaaaatcacaccagacaag

SEQ ID NO: 367328 - DNA, 4225 bp, Homo sapiens
  misc_feature (42)..(42): n is a, c, g, or t
  misc_feature (45)..(45): n is a, c, g, or t
tcccccccccggccccccccccggctccggccagccactacngcntactactactactaaattcgcggccgcgtcgacccacgcccaacttcgtgcgctgcatcatccccaaccacgagaagaggtccggcaagctggatgcgttcctggtgctggagcagctgcggtgcaatggggtgctggaaggcattcgcatctgccggcagggcttccccaaccggatcgtcttccaggagttccgccaacgctacgagatcctggcggcgaatgccatccccaaaggcttcatggacgggaagcaggcctgcattctcatgatcaaagccctggaacttgaccccaacttatacaggatagggcagagcaaaatcttcttccgaactggcgtcctggcccacctagaggaggagcgagatttgaagatcaccgatgtcatcatggccttccaggcgatgtgtcgtggctacttggccagaaaggcttttgccaagaggcagcagcagctgaccgccatgaaggtgattcagaggaactgcgccgcctacctcaagctgcggaactggcagtggtggaggcttttcaccaaagtgaagccactgctgcaggtgacacggcaggaggaggagatgcaggccaaggaggatgaactgcagaagaccaaggagcggcagcagaaggcagagaatgagcttaaggagctggaacagaagcactcgcagctgaccgaggagaagaacctgctacaggaacagctgcaggcagagacagagctgtatgcagaggctgaggagatgcgggtgcggctggcggccaagaagcaggagctggaggagatactgcatgagatggaggcccgcctggaggaggaggaagacaggggccagcagctacaggctgaaaggaagaagatggcccagcagatgctggaccttgaagaacagctggaggaggaggaagctgccaggcagaagctgcaacttgagaaggtcacggctgaggccaagatcaagaaactggaggatgagatcctggtcatggatgatcagaacaataaactatcaaaagaacgaaaactccttgaggagaggattagtgacttaacgacaaatcttgcagaagaggaagaaaaggccaagaatcttaccaagctgaaaaacaagcatgaatctatgatttcagaactggaagtgcggctaaagaaggaagagaagagccgacaggagctggagaagctgaaacggaagctggagggtgatgccagcgacttccacgagcagatcgctgacctccaggcgcagatcgcagagctcaagatgcagctggccaagaaggaggaggagctgcaggcggccctggccaggcttgacgatgaaatcgctcagaagaacaatgccctgaagaagatccgggagctggagggccacatctcagacctccaggaggacctggactcagagcgggccgccaggaacaaggctgaaaagcagaagcgagacctcggcgaggagctggaggccctaaagacagagctggaagacacactggacagcacagccactcagcaggagctcagggccaagagggagcaggaggtgacggtgctgaagaaggccctggatgaagagacgcggtcccatgaggctcaggtccaggagatgaggcagaaacacgcacaggcggtggaggagctcacagagcagcttgagcagttcaagagggccaaggcgaacctagacaagaataagcagacgctggagaaagagaacgcagacctggccggggagctgcgggtcctgggccaggccaagcaggaggtggaacataagaagaagaagctggaggcgcaggtgcaggagctgcagtccaagtgcagcgatggggagcgggcccgggcggagctcaatgacaaagtccacaagctgcagaatgaagttgagagcgtcacagggatgcttaacgaggccgaggggaaggccattaagctggccaaggacgtggcgtccctcagttcccagctccaggacacccaggagctgcttcaagaagaaacccggcagaagctcaacgtgtctacgaagctgcgccagctggaggaggagcggaacagcctgcaagaccagctggacgaggagatggaggccaagcagaacctggagcgccacatctccactctcaacatccagctctccgactcgaagaagaagctgcaggactttgccagcaccgtggaagctctggaagaggggaagaagaggttccagaaggagatcgagaacctcacccagcagtacgaggagaaggcggccgcttatgataaactggaaaagaccaagaacaggcttcagcaggagctggacgacctggttgttgatttggacaaccagcggcaactcgtgtccaacctggaaaagaagcagaggaaatttgatcagttgttagccgaggagaaaaacatctcttccaaatacgcggatgagagggacagagctgaggcagaagccagggagaaggaaaccaaggccctgtccctggctcgggcccttgaagaggccttggaagccaaagaggaactcgagcggaccaacaaaatgctcaaagccgaaatggaagacctggtcagctccaaggatgacgtgggcaagaacgtccatgagctggagaagtccaagcgggccctggagacccagatggaggagatgaagacgcagctggaagagctggaggacgagctgcaagccacggaggacgccaaactgcggctggaagtcaacatgcaggcgctcaagggccagttcgaaagggatctccaagcccgggacgagcagaatgaggagaagaggaggcaactgcagagacagcttcacgagtatgagacggaactggaagacgagcgaaagcaacgtgccctggcagctgcagcaaagaagaagctggaaggggacctgaaagacctggagcttcaggccgactctgccatcaaggggagggaggaagccatcaagcagctacgcaaactgcaggctcagatgaaggactttcaaagagagctggaagatgcccgtgcctccagagatgagatctttgccacagccaaagagaatgagaagaaagccaagagcttggaagcagacctcatgcagctacaagaggacctcgccgccgctgagagggctcgcaaacaagcggacctcgagaaggaggaactggcagaggagctggccagtagcctgtcgggaaggaacgcactccaggacgagaagcgccgcctggaggcccggatcgcccagctggaggaggagctggaggaggagcagggcaacatggaggccatgagcgaccgggtccgcaaagccacacagcaggccgagcagctcagcaacgagctggccacagagcgcagcacggcccagaagaatgagagtgcccggcagcagctcgagcggcagaacaaggagctccggagcaagctccacgagatggagggggccgtcaagtccaagttcaagtccaccatcgcggcgctggaggccaagattgcacagctggaggagcaggtcgagcaggaggccagagagaaacaggcggccaccaagtcgctgaagcagaaagacaagaagctgaaggaaatcttgctgcaggtggaggacgagcgcaagatggccgagcagtacaaggagcaggcagagaaaggcaatgccagggtcaagcagctcaagaggcagctggaggaggcagaggaggagtcccagcgcatcaacgccaaccgcaggaagctgcagcgggagctggatgaggccacggagagcaacgaggccatgggccgcgaggtgaacgcactcaagagcaagctcagagggccccccccacaggaaacttcgcagtgatgcaccaggcgaggaaacgagacctctttcgttccttctagaaggtctggaggacgtagagttattgaaaatgcagatggttctgaggaggaaacggacactcgagacgcagacttcaatggaaccaaggccagtgaataagcaactttctacagttttgcaccacggcaagaaaaccaaaaaccaaaaaccaaaacaaacaaacaaaaaaaacccaacaacaacccagaacaaagcaaaacccagcagactgtacttagcattgtctaaatccattctcaaattccaaatatcacagacacccctcatcctaccaaaggggagtcctctagagtgacctc

SEQ ID NO: 367329 - DNA, 4074 bp, Homo sapiens
  misc_feature (42)..(42): n is a, c, g, or t
  misc_feature (45)..(45): n is a, c, g, or t
tcccccccccggccccccccccggctccggccagccactacngcntactactactactaaattcgcggccgcgtcgacccacgcccaacttcgtgcgctgcatcatccccaaccacgagaagaggtccggcaagctggatgcgttcctggtgctggagcagctgcggtgcaatggggtgctggaaggcattcgcatctgccggcagggcttccccaaccggatcgtcttccaggagttccgccaacgctacgagatcctggcggcgaatgccatccccaaaggcttcatggacgggaagcaggcctgcattctcatgatcaaagccctggaacttgaccccaacttatacaggatagggcagagcaaaatcttcttccgaactggcgtcctggcccacctagaggaggagcgagatttgaagatcaccgatgtcatcatggccttccaggcgatgtgtcgtggctacttggccagaaaggcttttgccaagaggcagcagcagctgaccgccatgaaggtgattcagaggaactgcgccgcctacctcaagctgcggaactggcagtggtggaggcttttcaccaaagtgaagccactgctgcaggtgacacggcaggaggaggagatgcaggccaaggaggatgaactgcagaagaccaaggagcggcagcagaaggcagagaatgagcttaaggagctggaacagaagcactcgcagctgaccgaggagaagaacctgctacaggaacagctgcaggcagagacagagctgtatgcagaggctgaggagatgcgggtgcggctggcggccaagaagcaggagctggaggagatactgcatgagatggaggcccgcctggaggaggaggaagacaggggccagcagctacaggctgaaaggaagaagatggcccagcagatgctggaccttgaagaacagctggaggaggaggaagctgccaggcagaagctgcaacttgagaaggtcacggctgaggccaagatcaagaaactggaggatgagatcctggtcatggatgatcagaacaataaactatcaaaagaacgaaaactccttgaggagaggattagtgacttaacgacaaatcttgcagaagaggaagaaaaggccaagaatcttaccaagctgaaaaacaagcatgaatctatgatttcagaactggaagtgcggctaaagaaggaagagaagagccgacaggagctggagaagctgaaacggaagctggagggtgatgccagcgacttccacgagcagatcgctgacctccaggcgcagatcgcagagctcaagatgcagctggccaagaaggaggaggagctgcaggcggccctggccaggcttgacgatgaaatcgctcagaagaacaatgccctgaagaagatccgggagctggagggccacatctcagacctccaggaggacctggactcagagcgggccgccaggaacaaggctgaaaagcagaagcgagacctcggcgaggagctggaggccctaaagacagagctggaagacacactggacagcacagccactcagcaggagctcagggccaagagggagcaggaggtgacggtgctgaagaaggccctggatgaagagacgcggtcccatgaggctcaggtccaggagatgaggcagaaacacgcacaggcggtggaggagctcacagagcagcttgagcagttcaagagggccaaggcgaacctagacaagaataagcagacgctggagaaagagaacgcagacctggccggggagctgcgggtcctgggccaggccaagcaggaggtggaacataagaagaagaagctggaggcgcaggtgcaggagctgcagtccaagtgcagcgatggggagcgggcccgggcggagctcaatgacaaagtccacaagctgcagaatgaagttgagagcgtcacagggatgcttaacgaggccgaggggaaggccattaagctggccaaggacgtggcgtccctcagttcccagctccaggacacccaggagctgcttcaagaagaaacccggcagaagctcaacgtgtctacgaagctgcgccagctggaggaggagcggaacagcctgcaagaccagctggacgaggagatggaggccaagcagaacctggagcgccacatctccactctcaacatccagctctccgactcgaagaagaagctgcaggactttgccagcaccgtggaagctctggaagaggggaagaagaggttccagaaggagatcgagaacctcacccagcagtacgaggagaaggcggccgcttatgataaactggaaaagaccaagaacaggcttcagcaggagctggacgacctggttgttgatttggacaaccagcggcaactcgtgtccaacctggaaaagaagcagaggaaatttgatcagttgttagccgaggagaaaaacatctcttccaaatacgcggatgagagggacagagctgaggcagaagccagggagaaggaaaccaaggccctgtccctggctcgggcccttgaagaggccttggaagccaaagaggaactcgagcggaccaacaaaatgctcaaagccgaaatggaagacctggtcagctccaaggatgacgtgggcaagaacgtccatgagctggagaagtccaagcgggccctggagacccagatggaggagatgaagacgcagctggaagagctggaggacgagctgcaagccacggaggacgccaaactgcggctggaagtcaacatgcaggcgctcaagggccagttcgaaagggatctccaagcccgggacgagcagaatgaggagaagaggaggcaactgcagagacagcttcacgagtatgagacggaactggaagacgagcgaaagcaacgtgccctggcagctgcagcaaagaagaagctggaaggggacctgaaagacctggagcttcaggccgactctgccatcaaggggagggaggaagccatcaagcagctacgcaaactgcaggctcagatgaaggactttcaaagagagctggaagatgcccgtgcctccagagatgagatctttgccacagccaaagagaatgagaagaaagccaagagcttggaagcagacctcatgcagctacaagaggacctcgccgccgctgagagggctcgcaaacaagcggacctcgagaaggaggaactggcagaggagctggccagtagcctgtcgggaaggaacgcactccaggacgagaagcgccgcctggaggcccggatcgcccagctggaggaggagctggaggaggagcagggcaacatggaggccatgagcgaccgggtccgcaaagccacacagcaggccgagcagctcagcaacgagctggccacagagcgcagcacggcccagaagaatgagagtgcccggcagcagctcgagcggcagaacaaggagctccggagcaagctccacgagatggagggggccgtcaagtccaagttcaagtccaccatcgcggcgctggaggccaagattgcacagctggaggagcaggtcgagcaggaggccagagagaaacaggcggccaccaagtcgctgaagaaaaaaaaaaaaaaaaaaaaaaaaaaatttttttgggccgccttggcccaaaaaattttaaaaaccatttttttgggccacgagaccccaaggtgggtcaagcttgtaacattgggccaaaagacggatcccataggaaaaacccctgggacattgaacaagtggtgctgtgggtccccacaccaaaataaaaaaaaacgcccgcccggggggagcaaaccaacggacgtgtgcttaaggaacaaaaatcgcagagaatgcagagaccaagggacgcacaaacacgaggatgccaccacacaaggaggtgccaaagacggagagcgacggaattcaaaatttaacgccccgcccccggaggagaacacacaagcaccaagcaagaaacacaccacacacaacgagaaaaacacacgaacacaacagccaccacgacggatctacgacgaaaagacaacatgaggaccaccat

SEQ ID NO: 367330 - DNA, 1237 bp, Homo sapiens
  misc_feature (10)..(10): n is a, c, g, or t
ggtccagctngacaggtggggcagtacaaggagcaggcagagaaaggcaatgccagggtcaagcagctcaagaggcagctggaggaggcagaggaggagtcccagcgcatcaacgccaaccgcaggaagctgcagcgggagctggatgaggccacggagagcaacgaggccatgggccgcgaggtgaacgcactcaagagcaagctcagagggccccccccacaggaaacttcgcagtgatgcaccaggcgaggaaacgagacctctttcgttccttctagaaggtctggaggacgtagagttattgaaaatgcagatggttctgaggaggaaacggacactcgagacgcagacttcaatggaaccaaggccagtgaataagcaactttctacagttttgcaccacggcaagaaaaccaaaaaccaaaacaaacaaacaaaaaaaacccaacaacaacccagaacaaagcaaaacccagcagactgtacttagcattgtctaaatccattctcaaattccaaatatcacagacacccctcacacaaggaatataaaaaccaccaccctccagcctgggcaacgtagtaaaacctcatctatacaagaatttaaaaataagctgggcgtggtggtacacacctgtggtcccagctactagggaggctgagccaggaagaacgctccagcccaggacttcgaggctgcaatgagctataattgcatcattgcactccagcctgggcaacagagaccctgtctcaaccaccaccaccaccaccacccctactacccctgtattcaaggtaaaaattgaagtttgtatgatgtaagagatgagaaaaacccaacaggaaacacagacacatcctccagttctatcaatggattgtgcagacactgagtttttagaaaaacatatccacggtaaccggtccctggcaattctgtttacatgaaatggggagaaagtcaccgaaatgggtgccgccggcccccactcccaattcattccctaacctgcaaacctttccaacttctcacgtcaggcctttgagaattctttccccctctcctggtttccacacctcagacacgcacagttcaccaagtgccttctgtagtcacatgaattgaaaaggagacgctgctcccacggaggggagcaggaatgctgcactgtttacaccctgactgtgcttaaaaacactttcactaataaatggttataaatcacaa

SEQ ID NO: 367331 - DNA, 2865 bp, Homo sapiens
  misc_feature (42)..(42): n is a, c, g, or t
  misc_feature (45)..(45): n is a, c, g, or t
tcccccccccggccccccccccggctccggccagccactacngcntactactactactaaattcgcggccgcgtcgacccacgcccaacttcgtgcgctgcatcatccccaaccacgagaagaggtccggcaagctggatgcgttcctggtgctggagcagctgcggtgcaatggggtgctggaaggcattcgcatctgccggcagggcttccccaaccggatcgtcttccaggagttccgccaacgctacgagatcctggcggcgaatgccatccccaaaggcttcatggacgggaagcaggcctgcattctcatgatcaaagccctggaacttgaccccaacttatacaggatagggcagagcaaaatcttcttccgaactggcgtcctggcccacctagaggaggagcgagatttgaagatcaccgatgtcatcatggccttccaggcgatgtgtcgtggctacttggccagaaaggcttttgccaagaggcagcagcagctgaccgccatgaaggtgattcagaggaactgcgccgcctacctcaagctgcggaactggcagtggtggaggcttttcaccaaagtgaagccactgctgcaggtgacacggcaggaggaggagatgcaggccaaggaggatgaactgcagaagaccaaggagcggcagcagaaggcagagaatgagcttaaggagctggaacagaagcactcgcagctgaccgaggagaagaacctgctacaggaacagctgcaggcagagacagagctgtatgcagaggctgaggagatgcgggtgcggctggcggccaagaagcaggagctggaggagatactgcatgagatggaggcccgcctggaggaggaggaagacaggggccagcagctacaggctgaaaggaagaagatggcccagcagatgctggaccttgaagaacagctggaggaggaggaagctgccaggcagaagctgcaacttgagaaggtcacggctgaggccaagatcaagaaactggaggatgagatcctggtcatggatgatcagaacaataaactatcaaaagaacgaaaactccttgaggagaggattagtgacttaacgacaaatcttgcagaagaggaagaaaaggccaagaatcttaccaagctgaaaaacaagcatgaatctatgatttcagaactggaagtgcggctaaagaaggaagagaagagccgacaggagctggagaagctgaaacggaagctggagggtgatgccagcgacttccacgagcagatcgctgacctccaggcgcagatcgcagagctcaagatgcagctggccaagaaggaggaggagctgcaggcggccctggccaggcttgacgatgaaatcgctcagaagaacaatgccctgaagaagatccgggagctggagggccacatctcagacctccaggaggacctggactcagagcgggccgccaggaacaaggctgaaaagcagaagcgagacctcggcgaggagctggaggccctaaagacagagctggaagacacactggacagcacagccactcagcaggagctcagggccaagagggagcaggaggtgacggtgctgaagaaggccctggatgaagagacgcggtcccatgaggctcaggtccaggagatgaggcagaaacacgcacaggcggtggaggagctcacagagcagcttgagcagttcaagagggccaaggcgaacctagacaagaataagcagacgctggagaaagagaacgcagacctggccggggagctgcgggtcctgggccaggccaagcaggaggtggaacataagaagaagaagctggaggcgcaggtgcaggagctgcagtccaagtgcagcgatggggagcgggcccgggcggagctcaatgacaaagtccacaagctgcagaatgaagttgagagcgtcacagggatgcttaacgaggccgaggggaaggccattaagctggccaaggacgtggcgtccctcagttcccagctccaggacacccaggagctgcttcaagaagaaacccggcagaagctcaacgtgtctacgaagctgcgccagctggaggaggagcggaacagcctgcaagaccagctggacgaggagatggaggccaagcagaacctggagcgccacatctccactctcaacatccagctctccgactcgaagaagaagctgcaggactttgccagcaccgtggaagctctggaagaggggaagaagaggttccagaaggagatcgagaacctcacccagcagtacgaggagaaggcggccgcttatgataaactggaaaagaccaagaacaggcttcagcaggagctggacgacctggttgttgatttggacaaccagcggcaactcgtgtccaacctggaaaagaagcagaggaaatttgatcagttgttagccgaggagaaaaacatctcttccaaatacgcggatgagagggacagagctgaggcagaagccagggagaaggaaaccaaggccctgtccctggctcgggcccttgaagaggccttggaagccaaagaggaactcgagcggaccaacaaaatgctcaaagccgaaatggaagacctggtcagctccaaggatgacgtgggcaagaacgtccatgagctggagaagtccaagcgggccctggagacccagatggaggagcggaacagcctgcaagaccagctggacgaggagatggaggccaagcagaacctggagcgccacatctccactctcaacatccagctctccgactcgaagaagaagctgcaggactttgccagcaccgtggaagctctggaagaggggaagaagaggttccagaaggaga

SEQ ID NO: 367332 - DNA, 3206 bp, Homo sapiens
  misc_feature (42)..(42): n is a, c, g, or t
  misc_feature (45)..(45): n is a, c, g, or t
tcccccccccggccccccccccggctccggccagccactacngcntactactactactaaattcgcggccgcgtcgacccacgcccaacttcgtgcgctgcatcatccccaaccacgagaagaggtccggcaagctggatgcgttcctggtgctggagcagctgcggtgcaatggggtgctggaaggcattcgcatctgccggcagggcttccccaaccggatcgtcttccaggagttccgccaacgctacgagatcctggcggcgaatgccatccccaaaggcttcatggacgggaagcaggcctgcattctcatgatcaaagccctggaacttgaccccaacttatacaggatagggcagagcaaaatcttcttccgaactggcgtcctggcccacctagaggaggagcgagatttgaagatcaccgatgtcatcatggccttccaggcgatgtgtcgtggctacttggccagaaaggcttttgccaagaggcagcagcagctgaccgccatgaaggtgattcagaggaactgcgccgcctacctcaagctgcggaactggcagtggtggaggcttttcaccaaagtgaagccactgctgcaggtgacacggcaggaggaggagatgcaggccaaggaggatgaactgcagaagaccaaggagcggcagcagaaggcagagaatgagcttaaggagctggaacagaagcactcgcagctgaccgaggagaagaacctgctacaggaacagctgcaggcagagacagagctgtatgcagaggctgaggagatgcgggtgcggctggcggccaagaagcaggagctggaggagatactgcatgagatggaggcccgcctggaggaggaggaagacaggggccagcagctacaggctgaaaggaagaagatggcccagcagatgctggaccttgaagaacagctggaggaggaggaagctgccaggcagaagctgcaacttgagaaggtcacggctgaggccaagatcaagaaactggaggatgagatcctggtcatggatgatcagaacaataaactatcaaaagaacgaaaactccttgaggagaggattagtgacttaacgacaaatcttgcagaagaggaagaaaaggccaagaatcttaccaagctgaaaaacaagcatgaatctatgatttcagaactggaagtgcggctaaagaaggaagagaagagccgacaggagctggagaagctgaaacggaagctggagggtgatgccagcgacttccacgagcagatcgctgacctccaggcgcagatcgcagagctcaagatgcagctggccaagaaggaggaggagctgcaggcggccctggccaggcttgacgatgaaatcgctcagaagaacaatgccctgaagaagatccgggagctggagggccacatctcagacctccaggaggacctggactcagagcgggccgccaggaacaaggctgaaaagcagaagcgagacctcggcgaggagctggaggccctaaagacagagctggaagacacactggacagcacagccactcagcaggagctcagggccaagagggagcaggaggtgacggtgctgaagaaggccctggatgaagagacgcggtcccatgaggctcaggtccaggagatgaggcagaaacacgcacaggcggtggaggagctcacagagcagcttgagcagttcaagagggccaaggcgaacctagacaagaataagcagacgctggagaaagagaacgcagacctggccggggagctgcgggtcctgggccaggccaagcaggaggtggaacataagaagaagaagctggaggcgcaggtgcaggagctgcagtccaagtgcagcgatggggagcgggcccgggcggagctcaatgacaaagtccacaagctgcagaatgaagttgagagcgtcacagggatgcttaacgaggccgaggggaaggccattaagctggccaaggacgtggcgtccctcagttcccagctccaggacacccaggagctgcttcaagaagaaacccggcagaagctcaacgtgtctacgaagctgcgccagctggaggaggagcggaacagcctgcaagaccagctggacgaggagatggaggccaagcagaacctggagcgccacatctccactctcaacatccagctctccgactcgaagaagaagctgcaggactttgccagcaccgtggaagctctggaagaggggaagaagaggttccagaaggagatcgagaacctcacccagcagtacgaggagaaggcggccgcttatgataaactggaaaagaccaagaacaggcttcagcaggagctggacgacctggttgttgatttggacaaccagcggcaactcgtgtccaacctggaaaagaagcagaggaaatttgatcaggtagagggcgtggggtgtcccccactctggccatggacgctgggttggggaatcagctctgcagagtatgacgcgtggctctggcctgtgcctgcatcccctctccactctgtggggagccatgggaggctgtcttatcttgtcttgggcgaccatggagcattaacgctaccaggtcacagtaaggatggcaaagaagccttgatgactgtgacttttctgggtaccagcaccatgagggtcacctgcacacatggtgatgccttagtttctagcctgaagaaggaatgaggtgcttatttattcactaaatgtatttactgaatacctattgagtagtattccaagtaattcagtttctatacttttaataccactcttccctaagatttcattctgtaaaattccaagtacacagcaaagttgacagaattgtacggtgaacacctttaaggccaccacctggattcagtcattgacactgtattatatgaactttatcagatacttattttgagacaggatctagctctgtcacccaggctggagtgcagtggtgtgatctcagctccccgcaacctccaccactgggttcaagcgattctcctgcttcagcctttcatgtagccgggattataggagcacaccactatgtctggctaatttttgtatttttagtagagatggggttttgccatgttgtccaggctggtctccaactcctggcctcacatgatctgcctgccttggcctcccaaagtgctgggattatag

SEQ ID NO: 367333 - DNA, 2611 bp, Homo sapiens
  misc_feature (42)..(42): n is a, c, g, or t
  misc_feature (45)..(45): n is a, c, g, or t
  misc_feature (2506)..(2506): n is a, c, g, or t
  misc_feature (2511)..(2511): n is a, c, g, or t
tcccccccccggccccccccccggctccggccagccactacngcntactactactactaaattcgcggccgcgtcgacccacgcccaacttcgtgcgctgcatcatccccaaccacgagaagaggtccggcaagctggatgcgttcctggtgctggagcagctgcggtgcaatggggtgctggaaggcattcgcatctgccggcagggcttccccaaccggatcgtcttccaggagttccgccaacgctacgagatcctggcggcgaatgccatccccaaaggcttcatggacgggaagcaggcctgcattctcatgatcaaagccctggaacttgaccccaacttatacaggatagggcagagcaaaatcttcttccgaactggcgtcctggcccacctagaggaggagcgagatttgaagatcaccgatgtcatcatggccttccaggcgatgtgtcgtggctacttggccagaaaggcttttgccaagaggcagcagcagctgaccgccatgaaggtgattcagaggaactgcgccgcctacctcaagctgcggaactggcagtggtggaggcttttcaccaaagtgaagccactgctgcaggtgacacggcaggaggaggagatgcaggccaaggaggatgaactgcagaagaccaaggagcggcagcagaaggcagagaatgagcttaaggagctggaacagaagcactcgcagctgaccgaggagaagaacctgctacaggaacagctgcaggcagagacagagctgtatgcagaggctgaggagatgcgggtgcggctggcggccaagaagcaggagctggaggagatactgcatgagatggaggcccgcctggaggaggaggaagacaggggccagcagctacaggctgaaaggaagaagatggcccagcagatgctggaccttgaagaacagctggaggaggaggaagctgccaggcagaagctgcaacttgagaaggtcacggctgaggccaagatcaagaaactggaggatgagatcctggtcatggatgatcagaacaataaactatcaaaagaacgaaaactccttgaggagaggattagtgacttaacgacaaatcttgcagaagaggaagaaaaggccaagaatcttaccaagctgaaaaacaagcatgaatctatgatttcagaactggaagtgcggctaaagaaggaagagaagagccgacaggagctggagaagctgaaacggaagctggagggtgatgccagcgacttccacgagcagatcgctgacctccaggcgcagatcgcagagctcaagatgcagctggccaagaaggaggaggagctgcaggcggccctggccaggcttgacgatgaaatcgctcagaagaacaatgccctgaagaagatccgggagctggagggccacatctcagacctccaggaggacctggactcagagcgggccgccaggaacaaggctgaaaagcagaagcgagacctcggcgaggagctggaggccctaaagacagagctggaagacacactggacagcacagccactcagcaggagctcagggccaagagggagcaggaggtgacggtgctgaagaaggccctggatgaagagacgcggtcccatgaggctcaggtccaggagatgaggcagaaacacgcacaggcggtggaggagctcacagagcagcttgagcagttcaagagggccaaggcgaacctagacaagaataagcagacgctggagaaagagaacgcagacctggccggggagctgcgggtcctgggccaggccaagcaggaggtggaacataagaagaagaagctggaggcgcaggtgcaggagctgcagtccaagtgcagcgatggggagcgggcccgggcggagctcaatgacaaagtccacaagctgcagaatgaagttgagagcgtcacagggatgcttaacgaggccgaggggaaggccattaagctggccaaggacgtggcgtccctcagttcccagctccaggacacccaggagctgcttcaagaagaaacccggcagaagctcaacgtgtctacgaagctgcgccagctggaggaggagcggaacagcctgcaagaccagctggacgaggagatggaggccaagcagaacctggagcgccacatctccactctcaacatccagctctccgactcgaagaagaagctgcaggactttgccagcaccgtggaagctctggaagaggggaagaagaggttccagaaggagatcgagaacctcacccagcagtacgaggagaaggcggccgcttatgataaactggaaaagaccaagaacaggcttcagcaggagctggacgacctggttgttgatttggacaaccagcggcaactcgtgtccaacctggaaaagaagcagaggaaatttgatcgaagacctggtcagctccaaggatgacgtgggcaagaacgtccatgagctggagaagtccaagcgggccctggagncccanatggaggagatgaagacgcagctggaagagcatggaggacgagctgcaagccacggagacgcccaactgcggctggaagtcaacagggatcctctagatc

SEQ ID NO: 367334 - DNA, 2728 bp, Homo sapiens
  misc_feature (42)..(42): n is a, c, g, or t
  misc_feature (45)..(45): n is a, c, g, or t
tcccccccccggccccccccccggctccggccagccactacngcntactactactactaaattcgcggccgcgtcgacccacgcccaacttcgtgcgctgcatcatccccaaccacgagaagaggtccggcaagctggatgcgttcctggtgctggagcagctgcggtgcaatggggtgctggaaggcattcgcatctgccggcagggcttccccaaccggatcgtcttccaggagttccgccaacgctacgagatcctggcggcgaatgccatccccaaaggcttcatggacgggaagcaggcctgcattctcatgatcaaagccctggaacttgaccccaacttatacaggatagggcagagcaaaatcttcttccgaactggcgtcctggcccacctagaggaggagcgagatttgaagatcaccgatgtcatcatggccttccaggcgatgtgtcgtggctacttggccagaaaggcttttgccaagaggcagcagcagctgaccgccatgaaggtgattcagaggaactgcgccgcctacctcaagctgcggaactggcagtggtggaggcttttcaccaaagtgaagccactgctgcaggtgacacggcaggaggaggagatgcaggccaaggaggatgaactgcagaagaccaaggagcggcagcagaaggcagagaatgagcttaaggagctggaacagaagcactcgcagctgaccgaggagaagaacctgctacaggaacagctgcaggcagagacagagctgtatgcagaggctgaggagatgcgggtgcggctggcggccaagaagcaggagctggaggagatactgcatgagatggaggcccgcctggaggaggaggaagacaggggccagcagctacaggctgaaaggaagaagatggcccagcagatgctggaccttgaagaacagctggaggaggaggaagctgccaggcagaagctgcaacttgagaaggtcacggctgaggccaagatcaagaaactggaggatgagatcctggtcatggatgatcagaacaataaactatcaaaagaacgaaaactccttgaggagaggattagtgacttaacgacaaatcttgcagaagaggaagaaaaggccaagaatcttaccaagctgaaaaacaagcatgaatctatgatttcagaactggaagtgcggctaaagaaggaagagaagagccgacaggagctggagaagctgaaacggaagctggagggtgatgccagcgacttccacgagcagatcgctgacctccaggcgcagatcgcagagctcaagatgcagctggccaagaaggaggaggagctgcaggcggccctggccaggcttgacgatgaaatcgctcagaagaacaatgccctgaagaagatccgggagctggagggccacatctcagacctccaggaggacctggactcagagcgggccgccaggaacaaggctgaaaagcagaagcgagacctcggcgaggagctggaggccctaaagacagagctggaagacacactggacagcacagccactcagcaggagctcagggccaagagggagcaggaggtgacggtgctgaagaaggccctggatgaagagacgcggtcccatgaggctcaggtccaggagatgaggcagaaacacgcacaggcggtggaggagctcacagagcagcttgagcagttcaagagggccaaggcgaacctagacaagaataagcagacgctggagaaagagaacgcagacctggccggggagctgcgggtcctgggccaggccaagcaggaggtggaacataagaagaagaagctggaggcgcaggtgcaggagctgcagtccaagtgcagcgatggggagcgggcccgggcggagctcaatgacaaagtccacaagctgcagaatgaagttgagagcgtcacagggatgcttaacgaggccgaggggaaggccattaagctggccaaggacgtggcgtccctcagttcccagctccaggacacccaggagctgcttcaagaagaaacccggcagaagctcaacgtgtctacgaagctgcgccagctggaggaggagcggaacagcctgcaagaccagctggacgaggagatggaggccaagcagaacctggagcgccacatctccactctcaacatccagctctccgactcgaagaagaagctgcaggactttgccagcaccgtggaagctctggaagaggggaagaagaggttccagaaggagatcgagaacctcacccagcagtacgaggagaaggcggccgcttatgataaactggaaaagaccaagaacaggcttcagcaggagctggacgacctggttgttgatttggacaaccagcggcaactcgtgtccaacctggaaaagaagcagaggaaatttgatcagttgttagccgcgtagtcagatcgagccgcgtagtcagatcgagccgcgtagtcagatcgagccgcgtagtcagatcgagccgcgtagtcagatcgagccgcgtagtcggatcgagccgcgtagtcggatcgagccgcgtagtcagatcgagccgcgtagtcggatcgagccgcgtagtcagatcgagccgcgtagtccgatcgagccgcgtagtcagatcgagccgagtagtcggatcgagccgactagtcagatcgagacgcgtagacagatcgaaccgcgtagtccgatcgaga

SEQ ID NO: 367335 - DNA, 2472 bp, Homo sapiens
  misc_feature (42)..(42): n is a, c, g, or t
  misc_feature (45)..(45): n is a, c, g, or t
  misc_feature (2437)..(2437): n is a, c, g, or t
  misc_feature (2448)..(2448): n is a, c, g, or t
  misc_feature (2469)..(2469): n is a, c, g, or t
tcccccccccggccccccccccggctccggccagccactacngcntactactactactaaattcgcggccgcgtcgacccacgcccaacttcgtgcgctgcatcatccccaaccacgagaagaggtccggcaagctggatgcgttcctggtgctggagcagctgcggtgcaatggggtgctggaaggcattcgcatctgccggcagggcttccccaaccggatcgtcttccaggagttccgccaacgctacgagatcctggcggcgaatgccatccccaaaggcttcatggacgggaagcaggcctgcattctcatgatcaaagccctggaacttgaccccaacttatacaggatagggcagagcaaaatcttcttccgaactggcgtcctggcccacctagaggaggagcgagatttgaagatcaccgatgtcatcatggccttccaggcgatgtgtcgtggctacttggccagaaaggcttttgccaagaggcagcagcagctgaccgccatgaaggtgattcagaggaactgcgccgcctacctcaagctgcggaactggcagtggtggaggcttttcaccaaagtgaagccactgctgcaggtgacacggcaggaggaggagatgcaggccaaggaggatgaactgcagaagaccaaggagcggcagcagaaggcagagaatgagcttaaggagctggaacagaagcactcgcagctgaccgaggagaagaacctgctacaggaacagctgcaggcagagacagagctgtatgcagaggctgaggagatgcgggtgcggctggcggccaagaagcaggagctggaggagatactgcatgagatggaggcccgcctggaggaggaggaagacaggggccagcagctacaggctgaaaggaagaagatggcccagcagatgctggaccttgaagaacagctggaggaggaggaagctgccaggcagaagctgcaacttgagaaggtcacggctgaggccaagatcaagaaactggaggatgagatcctggtcatggatgatcagaacaataaactatcaaaagaacgaaaactccttgaggagaggattagtgacttaacgacaaatcttgcagaagaggaagaaaaggccaagaatcttaccaagctgaaaaacaagcatgaatctatgatttcagaactggaagtgcggctaaagaaggaagagaagagccgacaggagctggagaagctgaaacggaagctggagggtgatgccagcgacttccacgagcagatcgctgacctccaggcgcagatcgcagagctcaagatgcagctggccaagaaggaggaggagctgcaggcggccctggccaggcttgacgatgaaatcgctcagaagaacaatgccctgaagaagatccgggagctggagggccacatctcagacctccaggaggacctggactcagagcgggccgccaggaacaaggctgaaaagcagaagcgagacctcggcgaggagctggaggccctaaagacagagctggaagacacactggacagcacagccactcagcaggagctcagggccaagagggagcaggaggtgacggtgctgaagaaggccctggatgaagagacgcggtcccatgaggctcaggtccaggagatgaggcagaaacacgcacaggcggtggaggagctcacagagcagcttgagcagttcaagagggccaaggcgaacctagacaagaataagcagacgctggagaaagagaacgcagacctggccggggagctgcgggtcctgggccaggccaagcaggaggtggaacataagaagaagaagctggaggcgcaggtgcaggagctgcagtccaagtgcagcgatggggagcgggcccgggcggagctcaatgacaaagtccacaagctgcagaatgaagttgagagcgtcacagggatgcttaacgaggccgaggggaaggccattaagctggccaaggacgtggcgtccctcagttcccagctccaggacacccaggagctgcttcaagaagaaacccggcagaagctcaacgtgtctacgaagctgcgccagctggaggaggagcggaacagcctgcaagaccagctggacgaggagatggaggccaagcagaacctggagcgccacatctccactctcaacatccagctctccgactcgaagaagaagctgcaggactttgccagcaccgtggaagctctggaagaggggaagaagaggttccagaaggagatcgagaacctcacccagcagtacgaggagaaggcggccgcttatgataaactggaaaagaccaagaacaggcttcagcaggagctggacgacctggttgttgatttggacaaccagcggcaactcgtgtccaacctggaaaagaagcagaggaaatttgatctgagacncgcgaccagcntgaacacgcgacggatcctcncgt

SEQ ID NO: 367336 - DNA, 2656 bp, Homo sapiens
  misc_feature (42)..(42): n is a, c, g, or t
  misc_feature (45)..(45): n is a, c, g, or t
tcccccccccggccccccccccggctccggccagccactacngcntactactactactaaattcgcggccgcgtcgacccacgcccaacttcgtgcgctgcatcatccccaaccacgagaagaggtccggcaagctggatgcgttcctggtgctggagcagctgcggtgcaatggggtgctggaaggcattcgcatctgccggcagggcttccccaaccggatcgtcttccaggagttccgccaacgctacgagatcctggcggcgaatgccatccccaaaggcttcatggacgggaagcaggcctgcattctcatgatcaaagccctggaacttgaccccaacttatacaggatagggcagagcaaaatcttcttccgaactggcgtcctggcccacctagaggaggagcgagatttgaagatcaccgatgtcatcatggccttccaggcgatgtgtcgtggctacttggccagaaaggcttttgccaagaggcagcagcagctgaccgccatgaaggtgattcagaggaactgcgccgcctacctcaagctgcggaactggcagtggtggaggcttttcaccaaagtgaagccactgctgcaggtgacacggcaggaggaggagatgcaggccaaggaggatgaactgcagaagaccaaggagcggcagcagaaggcagagaatgagcttaaggagctggaacagaagcactcgcagctgaccgaggagaagaacctgctacaggaacagctgcaggcagagacagagctgtatgcagaggctgaggagatgcgggtgcggctggcggccaagaagcaggagctggaggagatactgcatgagatggaggcccgcctggaggaggaggaagacaggggccagcagctacaggctgaaaggaagaagatggcccagcagatgctggaccttgaagaacagctggaggaggaggaagctgccaggcagaagctgcaacttgagaaggtcacggctgaggccaagatcaagaaactggaggatgagatcctggtcatggatgatcagaacaataaactatcaaaagaacgaaaactccttgaggagaggattagtgacttaacgacaaatcttgcagaagaggaagaaaaggccaagaatcttaccaagctgaaaaacaagcatgaatctatgatttcagaactggaagtgcggctaaagaaggaagagaagagccgacaggagctggagaagctgaaacggaagctggagggtgatgccagcgacttccacgagcagatcgctgacctccaggcgcagatcgcagagctcaagatgcagctggccaagaaggaggaggagctgcaggcggccctggccaggcttgacgatgaaatcgctcagaagaacaatgccctgaagaagatccgggagctggagggccacatctcagacctccaggaggacctggactcagagcgggccgccaggaacaaggctgaaaagcagaagcgagacctcggcgaggagctggaggccctaaagacagagctggaagacacactggacagcacagccactcagcaggagctcagggccaagagggagcaggaggtgacggtgctgaagaaggccctggatgaagagacgcggtcccatgaggctcaggtccaggagatgaggcagaaacacgcacaggcggtggaggagctcacagagcagcttgagcagttcaagagggccaaggcgaacctagacaagaataagcagacgctggagaaagagaacgcagacctggccggggagctgcgggtcctgggccaggccaagcaggaggtggaacataagaagaagaagctggaggcgcaggtgcaggagctgcagtccaagtgcagcgatggggagcgggcccgggcggagctcaatgacaaagtccacaagctgcagaatgaagttgagagcgtcacagggatgcttaacgaggccgaggggaaggccattaagctggccaaggacgtggcgtccctcagttcccagctccaggacacccaggagctgcttcaagaagaaacccggcagaagctcaacgtgtctacgaagctgcgccagctggaggaggagcggaacagcctgcaagaccagctggacgaggagatggaggccaagcagaacctggagcgccacatctccactctcaacatccagctctccgactcgaagaagaagctgcaggactttgccagcaccgtggaagctctggaagaggggaagaagaggttccagaaggagatcgagaacctcacccagcagtacgaggagaaggcggccgcttatgataaactggaaaagaccaagaacaggcttcagcaggagctggacgacctggttgttgatttggacaaccagcggcaactcgtgtccaaccaccaacaccaagaccttcagcttccgtggttttcctaaagcaacatcttgactaccccctgggctgacggcagcggcgatgaagacatgtgtgaaggcggcttcccaaattccaggcgcttccccaaccttcagacagagcaaaccaaattaagctgacataacagctgtgacaaactggctagcaccggggcccagagagttataagggtgaacatcaagagtcaggagcagggtctcacagggtctcaatt

SEQ ID NO: 367337 - DNA, 2624 bp, Homo sapiens
  misc_feature (42)..(42): n is a, c, g, or t
  misc_feature (45)..(45): n is a, c, g, or t
tcccccccccggccccccccccggctccggccagccactacngcntactactactactaaattcgcggccgcgtcgacccacgcccaacttcgtgcgctgcatcatccccaaccacgagaagaggtccggcaagctggatgcgttcctggtgctggagcagctgcggtgcaatggggtgctggaaggcattcgcatctgccggcagggcttccccaaccggatcgtcttccaggagttccgccaacgctacgagatcctggcggcgaatgccatccccaaaggcttcatggacgggaagcaggcctgcattctcatgatcaaagccctggaacttgaccccaacttatacaggatagggcagagcaaaatcttcttccgaactggcgtcctggcccacctagaggaggagcgagatttgaagatcaccgatgtcatcatggccttccaggcgatgtgtcgtggctacttggccagaaaggcttttgccaagaggcagcagcagctgaccgccatgaaggtgattcagaggaactgcgccgcctacctcaagctgcggaactggcagtggtggaggcttttcaccaaagtgaagccactgctgcaggtgacacggcaggaggaggagatgcaggccaaggaggatgaactgcagaagaccaaggagcggcagcagaaggcagagaatgagcttaaggagctggaacagaagcactcgcagctgaccgaggagaagaacctgctacaggaacagctgcaggcagagacagagctgtatgcagaggctgaggagatgcgggtgcggctggcggccaagaagcaggagctggaggagatactgcatgagatggaggcccgcctggaggaggaggaagacaggggccagcagctacaggctgaaaggaagaagatggcccagcagatgctggaccttgaagaacagctggaggaggaggaagctgccaggcagaagctgcaacttgagaaggtcacggctgaggccaagatcaagaaactggaggatgagatcctggtcatggatgatcagaacaataaactatcaaaagaacgaaaactccttgaggagaggattagtgacttaacgacaaatcttgcagaagaggaagaaaaggccaagaatcttaccaagctgaaaaacaagcatgaatctatgatttcagaactggaagtgcggctaaagaaggaagagaagagccgacaggagctggagaagctgaaacggaagctggagggtgatgccagcgacttccacgagcagatcgctgacctccaggcgcagatcgcagagctcaagatgcagctggccaagaaggaggaggagctgcaggcggccctggccaggcttgacgatgaaatcgctcagaagaacaatgccctgaagaagatccgggagctggagggccacatctcagacctccaggaggacctggactcagagcgggccgccaggaacaaggctgaaaagcagaagcgagacctcggcgaggagctggaggccctaaagacagagctggaagacacactggacagcacagccactcagcaggagctcagggccaagagggagcaggaggtgacggtgctgaagaaggccctggatgaagagacgcggtcccatgaggctcaggtccaggagatgaggcagaaacacgcacaggcggtggaggagctcacagagcagcttgagcagttcaagagggccaaggcgaacctagacaagaataagcagacgctggagaaagagaacgcagacctggccggggagctgcgggtcctgggccaggccaagcaggaggtggaacataagaagaagaagctggaggcgcaggtgcaggagctgcagtccaagtgcagcgatggggagcgggcccgggcggagctcaatgacaaagtccacaagctgcagaatgaagttgagagcgtcacagggatgcttaacgaggccgaggggaaggccattaagctggccaaggacgtggcgtccctcagttcccagctccaggacacccaggagctgcttcaagaagaaacccggcagaagctcaacgtgtctacgaagctgcgccagctggaggaggagcggaacagcctgcaagaccagctggacgaggagatggaggccaagcagaacctggagcgccacatctccactctcaacatccagctctccgactcgaagaagaagctgcaggactttgccagcaccgtggaagctctggaagaggggaagaagaggttccagaaggagatcgagaacctcacccagcagtacgaggagaaggcggccgcttatgataaactggaaaagaccaagaacaggcttcagcaggagctggacgacctggttgttgatttggacaaccagcggcaactcgtgtccaaccaccaacaccaagaccttcagcttccgtggttttcctaaagcaacatcttgactaccccctgggctgacggcagcggcgatgaagacatgtgtgaaggcggcttcccaaattccaggcgcttccccaacctctttatcacccacaaggcacgcttggtccttgcttgagccgttcgtctccccgcctcgatctctgattcttggctgcatccgacgccagta

SEQ ID NO: 367338 - DNA, 1367 bp, Homo sapiens
  misc_feature (42)..(42): n is a, c, g, or t
  misc_feature (45)..(45): n is a, c, g, or t
tcccccccccggccccccccccggctccggccagccactacngcntactactactactaaattcgcggccgcgtcgacccacgcccaacttcgtgcgctgcatcatccccaaccacgagaagaggtccggcaagctggatgcgttcctggtgctggagcagctgcggtgcaatggggtgctggaaggcattcgcatctgccggcagggcttccccaaccggatcgtcttccaggagttccgccaacgctacgagatcctggcggcgaatgccatccccaaaggcttcatggacgggaagcaggcctgcattctcatgatcaaagccctggaacttgaccccaacttatacaggatagggcagagcaaaatcttcttccgaactggcgtcctggcccacctagaggaggagcgagatttgaagatcaccgatgtcatcatggccttccaggcgatgtgtcgtggctacttggccagaaaggcttttgccaagaggcagcagcagctgaccgccatgaaggtgattcagaggaactgcgccgcctacctcaagctgcggaactggcagtggtggaggcttttcaccaaagtgaagccactgctgcaggtgacacggcaggaggaggagatgcaggccaaggaggatgaactgcagaagaccaaggagcggcagcagaaggcagagaatgagcttaaggagctggaacagaagcactcgcagctgaccgaggagaagaacctgctacaggaacagctgcaggcagagacagagctgtatgcagaggctgaggagatgcgggtgcggctggcggccaagaagcaggagctggaggagatactgcatgagatggaggcccgcctggaggaggaggaagacaggggccagcagctacaggctgaaaggaagaagatggcccagcagatgctggaccttgaagaacagctggaggaggaggaagctgccaggcagaagctgcaacttgagaaggtcacggctgaggccaagatcaagaaactggaggatgagatcctggtcatggatgatcagaacaataaactatcaaaagaacgaaaactccttgaggagaggattagtgacttaacgacaaatcttgcagaagaggaagaaaaggccaagaatcttaccaagctgaaaaacaagcatgaatctatgatttcagaactggaagtgcggctaaagaaggaagagaagagccgacaggagctggagaagctgaaacggaagctggagggtgatgccagcgacttccacgagcagatcgctgacctccaggcgcagaatcctggatcttcttcagggccttgttcttctgagcgattacatcgtcaaaccagagccagggccgcc

SEQ ID NO: 367339 - DNA, 317 bp, Homo sapiens
tgttgaaattagaagtatgtcttattgaccctgacctgtcttcctctccttctaggtgacttgcttttggagggcttcaacaactacaccttcctctccaatggctttgtgcccatcccagcagcccaggatgatgagatgttccaggaaaccgtggaggccatggcaatcatgggtttcagcgaggaggagcagctatgtaagcctcacaccttgagtctggagggtagcttgcctggataccagtggaacctgttaagaactcttctctggtcaggacagatttctgctctctgaattccccaccttccattaaa

SEQ ID NO: 367340 - DNA, 382 bp, Homo sapiens
aacccactctcgccctttctcctcttcccacgtacctggaatatcagtgaggcccagggtttccactaagactccaagctccagtttccccatctctaacatgagaatattgagtgcttctgtgcaatctgtctaccctggaggaggtctggaagtaagctgggttctctgtctgcagacgtactctggcctcttctgcgtggtggtcaacccctataaacacctgcccatctactcggagaagatcgtcgacatgtacaagggcaagaagaggcacgagatgccgcctcacatctacgccatcgcagacacggcctaccggagcatgcttcaagatcgggaggaccagggctgcacggggccagctccagggagcccctcc

SEQ ID NO: 367341 - DNA, 909 bp, Homo sapiens
ttgccattttattaggttggtgcaaaagtaattaccattttttttaaaaaaggcaaaaccacaattacttttgcaccaatagcacatttgcccttgtttggtctctaaagatggagaccctttggttagcatcctttttatgagtcaagctaatatacccacagctcaactttttgttcttgagcttgaatcacatcactggcaatcggccgtagggttctgctgcttggaccccaaagacaatgacatggaaaaactccagcttaattatgttcttttttgtttgtatatgtaaatagtttttaggaatgtagattattattttgaaatctgtggtaacaaatgtgaaaaccactacattttatttattttcattgaatagcaaataatgttgaagcctgggatctaaaaagttaaatattattttattttgcttaataaagtattggataatttagaaaaagaatttttttttaatgattggatagttaccttattaatggattggtcagggagaaaaagccctgttggatgaaaactgtcatatatgtgacttttaaagtgaaattaataagccaggcatggtgatgttcccctgtaggcccagctacttgggaggctgaagtgaaaggatcacttgagcccaagagttcaagaacagctcggacaacatagcaagacctgtttctctaaaaacaaaaaacagtaaaaatcttaaaaaccgcttaaagatggttggtttcttttaaaaaggaaaaaaaggctcaggtgcagtggctcacgcctgtaatcccaacactttgggaagctgcaggcagatagcttgagctcaggagttcgagaccagcctgggcaacatggtgaaaccccatctttaccaaaaatgaaaaaaaaaaaaaaaaattagcc

SEQ ID NO: 367342 - DNA, 433 bp, Homo sapiens
tttttttcgaaacagagtctctctctgttacccaggatggagtgcagtggtgcaattgtagctcaaagatcgctgcaaccttgaattcctgggctccagtgattctaatgtgtcagcctcccaagtaaactgggtctacagacaaacaccaccatgcccaactaatttttaaaattttgttggagacagggtcttgctatgttgcccaggctagttttgaactcctggcctcaagtgatccttgagcctcaatccccacagcgctcacctccctgggtcactgggatcacaggcataagccaccgcacccagctgacaatactcaaattttgttagtcatatttgtctaatctaaaataatgtcatgaaatgcataaattttaatttaaatctaatcctcctactgggaggtggaagaaaaaaaattttttaa

SEQ ID NO: 367343 - DNA, 718 bp, Homo sapiens
ggatgccgagcccaggccggttccggcgaagttaaaccctcggagctggcctcggactgctggggcgttaccccttcggccacccccgctgaccatggcagtgtttcatgacgaggtggaaatcgaggacttccaatatgacgaggactcggagacgtatttctatccctgcccatgtggagataacttctccatcaccaaggaagatttggagaatggggaagacgtggcaacgtgtcctagctgctctctcattataaaagtgatttatgacaaagatcagtttgtgtgtggagaaacagtcccagccccttcagccaacaaagaattagttaaatgctgaagaagccttcaggaatccaaatcctgaacatttggaatgagcccagatagaaatatcgaatgcaaagctactggcttcacagagacaaccatttatgatttgctgttctgtaagagtgtggattctttctatcaactgctgatatcatcttcaggaagcaagtccataacatgacatatctggattttgtgcttagaaccttaaattggaagcattcttaattatgcatctaaatttaaaagaagataatttcaaaacagtgctttctttcccttggtttcatcattttcatatcttaaaccaaattacttcggtatctgacaacagcatcatctacctcagtcattaggatttcttaataaaaaagagattgta

SEQ ID NO: 367344 - DNA, 3055 bp, Homo sapiens
ggatgccgagcccaggccggttccggcgaagttaaaccctcggagctggcctcggactgctggggcgttaccccttcggccacccccgctgaccatggcagtgtttcatgacgaggtggaaatcgaggacttccaatatgacgaggactcggagacgtatttctatccctgcccatgtggagataacttctccatcaccaaggatcagtttgtgtgtggagaaacagtcccagccccttcagccaacaaagaattagttaaatgctgaagaagccttcaggaatccaaatcctgaacatttggaatgagcccagatagaaatatcgaatgcaaagctactggcttcacagagacaaccatttatgatttgctgttctgtaagagtgtggattctttctatcaactgctgatatcatcttcaggaagcaagtccataacatgacatatctggattttgtgcttagaaccttaaattggaagcattcttaattatgcatctaaatttaaaagaagataatttcaaaacagtgctttctttcccttggtttcatcattttcatatcttaaaccaaattacttcggtatctgacaacagcatcatctacctcagtcattaggatttcttaataaaaaagagattgtatttttgacttggttattaagattattaaaattagcccttcctttgaaatatgacatcagctttgctgttctaaatttaaaattagttgcttcatcagtaccacacttccagtttctataccaagccagtctcctcagttttcccattagaatggacatgttctgttcagcgtgtcatttctgtaatgcttcatgcagagagtttggtcatagtattaaagagaaaatacagtgaggtcacaatgtctccagagctaaaagttagtgaacaagaaagaaagtccaaaatgaagtgatgaaagaatgaggacttttcttatattctgcatatttcttggaagtcaggacaagatgaaaagaaaaacatccaaaagaagtgaaattggtgacagaatgagaggagcaaagcataccagtgtagtaagtggaatgtttgaatgactttgccaggtcagagcaagtaatatttctgtatctgagtttttgtttgtgttttgataaggctaatgaaattgcattccaggtaggggttaacgtcaaatttccatggctggtagctgtgcttttggcatatcacagtgttgtgtcactactacaaggtaaagcatctacagcggagaatgagcttgaaaatgagagacctattgtgaataaatatgcccatgagagcatatttaataagcctctataacatgcagccaaaccagacattcactcctgcagagaaatgttgccctggagaaaaagagatatataaagataggctatcacccttcttttgctgcagtactaagcatagcaagaaattagaatcatttacattggaaatttgaaaattccctttatatacacaactttactgtgtataaataaaaaatatttattaatgcagtgatgtccgtcaggttgttttaggaatggcttctgcaattagaaaaatagcttgctagaatgtaaatgttctgttactggtaaatgtactgcacacattcattggacgttaaaacaagtgagtagccttttttacctgccagcagcatggctgtgtgcagccactaggctgagacaataaattaccaaaaattataatgtaccgagctgaaaatgctcagtacattatgtggcatattctggatgtgatgagaaatctcattgccatttgggacactgacatcccagaagtaatccacaactgctttgcaaaagcaaagtgactgctcagatgaacagagcagagtactcactcactatggtggcatcagctgcaaagcgaaaatgaactgtcccatgatcatgttgatggttttctagatactgccaacatgttagctctttctgatgctgatgagtttcaaacacgaacagacacccttgatgtgggtttgctaagaacatagaagaacaggaagaaaagttgccaggttcacacatcccaggaaaaaagaagcataaaaagcattagcagtcagtgactgatgataatgctgcaataatgggaatggttttgtttctaaaccaaattatttctaaatcaaatcatttattgctttgtttctaaagcaattgagtcactaagtttgtgaactgtaggagaacacatcaagattgaatcctgtgttaagcagaaggtaaaaccagagccaggcgcagtggctcgtgcctgtaatcccagctactcaggaagctaaggcaggaggatcatgtgaggccaggagttcaagactagcctgggcaacatagaaagaccctgtctctaaaaaatcttcttttaattagcaaggtgtggggccttgagcaaattgcttgggcccaggagtttgaggctgtggtgagctgtgatcacaccactgcgttccagcctgtgtgacagggcaagacctcatgcctaaaaaataaagagaaagcagagtaaaactggactctgagatacgactaaagttctgtgtgatacgtgtgccttatttagctcaagacattcctggagcacctataaaaactgacttgtaatccaggctatgtctctttttagcttcgtaatctttggcaaggccattggattcttcagctgtacaattaggagactcgatcaggtgattgcctttctcagctgtcagttctctaatttcaggcttggtagcttgtaggaactgaaattgcaattaaaacctttataaactcaaactaaatcatgaattacagaaaaagtccattcttccaaaacttgatgttaccacacttacaagtttaaaatatgaagtcgactgtttaaaggattctgcatatattctagtgtgcacattcagaaacatttttcttggaaaaagtacccaacattttttataactgcacatattaatttattgccagaataaattgcattgcatgctaaataaagtcagataattcaaatcca

SEQ ID NO: 367345 - DNA, 643 bp, Homo sapiens
ggatgccgagcccaggccggttccggcgaagttaaaccctcggagctggcctcggactgctggggcgttaccccttcggccacccccgctgaccatggcagtgtttcatgacgaggtggaaatcgaggacttccaatatgacgaggactcggagacgtatttctatccctgcccatgtggagataacttctccatcaccaaggatcagtttgtgtgtggagaaacagtcccagccccttcagccaacaaagaattagttaaatgctgaagaagccttcaggaatccaaatcctgaacatttggaatgagcccagatagaaatatcgaatgcaaagctactggcttcacagagacaaccatttatgatttgctgttctgtaagagtgtggattctttctatcaactgctgatatcatcttcaggaagcaagtccataacatgacatatctggattttgtgcttagaaccttaaattggaagcattcttaattatgcatctaaatttaaaagaagataatttcaaaacagtgctttctttcccttggtttcatcattttcatatcttaaaccaaattacttcggtatctgacaacagcatcatctacctcagtcattaggatttcttaataaaaaagagattgta

SEQ ID NO: 367346 - DNA, 3130 bp, Homo sapiens
ggatgccgagcccaggccggttccggcgaagttaaaccctcggagctggcctcggactgctggggcgttaccccttcggccacccccgctgaccatggcagtgtttcatgacgaggtggaaatcgaggacttccaatatgacgaggactcggagacgtatttctatccctgcccatgtggagataacttctccatcaccaaggaagatttggagaatggggaagacgtggcaacgtgtcctagctgctctctcattataaaagtgatttatgacaaagatcagtttgtgtgtggagaaacagtcccagccccttcagccaacaaagaattagttaaatgctgaagaagccttcaggaatccaaatcctgaacatttggaatgagcccagatagaaatatcgaatgcaaagctactggcttcacagagacaaccatttatgatttgctgttctgtaagagtgtggattctttctatcaactgctgatatcatcttcaggaagcaagtccataacatgacatatctggattttgtgcttagaaccttaaattggaagcattcttaattatgcatctaaatttaaaagaagataatttcaaaacagtgctttctttcccttggtttcatcattttcatatcttaaaccaaattacttcggtatctgacaacagcatcatctacctcagtcattaggatttcttaataaaaaagagattgtatttttgacttggttattaagattattaaaattagcccttcctttgaaatatgacatcagctttgctgttctaaatttaaaattagttgcttcatcagtaccacacttccagtttctataccaagccagtctcctcagttttcccattagaatggacatgttctgttcagcgtgtcatttctgtaatgcttcatgcagagagtttggtcatagtattaaagagaaaatacagtgaggtcacaatgtctccagagctaaaagttagtgaacaagaaagaaagtccaaaatgaagtgatgaaagaatgaggacttttcttatattctgcatatttcttggaagtcaggacaagatgaaaagaaaaacatccaaaagaagtgaaattggtgacagaatgagaggagcaaagcataccagtgtagtaagtggaatgtttgaatgactttgccaggtcagagcaagtaatatttctgtatctgagtttttgtttgtgttttgataaggctaatgaaattgcattccaggtaggggttaacgtcaaatttccatggctggtagctgtgcttttggcatatcacagtgttgtgtcactactacaaggtaaagcatctacagcggagaatgagcttgaaaatgagagacctattgtgaataaatatgcccatgagagcatatttaataagcctctataacatgcagccaaaccagacattcactcctgcagagaaatgttgccctggagaaaaagagatatataaagataggctatcacccttcttttgctgcagtactaagcatagcaagaaattagaatcatttacattggaaatttgaaaattccctttatatacacaactttactgtgtataaataaaaaatatttattaatgcagtgatgtccgtcaggttgttttaggaatggcttctgcaattagaaaaatagcttgctagaatgtaaatgttctgttactggtaaatgtactgcacacattcattggacgttaaaacaagtgagtagccttttttacctgccagcagcatggctgtgtgcagccactaggctgagacaataaattaccaaaaattataatgtaccgagctgaaaatgctcagtacattatgtggcatattctggatgtgatgagaaatctcattgccatttgggacactgacatcccagaagtaatccacaactgctttgcaaaagcaaagtgactgctcagatgaacagagcagagtactcactcactatggtggcatcagctgcaaagcgaaaatgaactgtcccatgatcatgttgatggttttctagatactgccaacatgttagctctttctgatgctgatgagtttcaaacacgaacagacacccttgatgtgggtttgctaagaacatagaagaacaggaagaaaagttgccaggttcacacatcccaggaaaaaagaagcataaaaagcattagcagtcagtgactgatgataatgctgcaataatgggaatggttttgtttctaaaccaaattatttctaaatcaaatcatttattgctttgtttctaaagcaattgagtcactaagtttgtgaactgtaggagaacacatcaagattgaatcctgtgttaagcagaaggtaaaaccagagccaggcgcagtggctcgtgcctgtaatcccagctactcaggaagctaaggcaggaggatcatgtgaggccaggagttcaagactagcctgggcaacatagaaagaccctgtctctaaaaaatcttcttttaattagcaaggtgtggggccttgagcaaattgcttgggcccaggagtttgaggctgtggtgagctgtgatcacaccactgcgttccagcctgtgtgacagggcaagacctcatgcctaaaaaataaagagaaagcagagtaaaactggactctgagatacgactaaagttctgtgtgatacgtgtgccttatttagctcaagacattcctggagcacctataaaaactgacttgtaatccaggctatgtctctttttagcttcgtaatctttggcaaggccattggattcttcagctgtacaattaggagactcgatcaggtgattgcctttctcagctgtcagttctctaatttcaggcttggtagcttgtaggaactgaaattgcaattaaaacctttataaactcaaactaaatcatgaattacagaaaaagtccattcttccaaaacttgatgttaccacacttacaagtttaaaatatgaagtcgactgtttaaaggattctgcatatattctagtgtgcacattcagaaacatttttcttggaaaaagtacccaacattttttataactgcacatattaatttattgccagaataaattgcattgcatgctaaataaagtcagataattcaaatcca

SEQ ID NO: 367347 - DNA, 3568 bp, Homo sapiens
ggatgccgagcccaggccggttccggcgaagttaaaccctcggagctggcctcggactgctggggcgttaccccttcggccacccccgctgaccatggcagtgtttcatgacgaggtggaaatcgaggacttccaatatgacgaggactcggagacgtatttctatccctgcccatgtggagataacttctccatcaccaaggtaacttcagggtcccgcccggcggttcacccaagcaagcgcagtttggttccgcccgttccttccatcattgggtagcctttgctgcgctgtgtcacccacgccctctttcccgttgctgaatcttcctcctcccgcgtccccccaccccaactaatgccctgagctctctcggtaggcacgcagttctggccttagattaggtcagggagagggtggcggagagcctctgtctctctgcccgatccctgccttagagtcccaacctgggatatttctgtcgaggaggggactcgttttttgtttcccagggcttttggggcgaccgaagctcgcctgaccttcctaggtgtttcccctaagtgacgcttctaggggaaaatgatgtcggcatttctcgctgaaggccctggggttctcacccaccttggggggaaggaagatttggagaatggggaagacgtggcaacgtgtcctagctgctctctcattataaaagtgatttatgacaaagatcagtttgtgtgtggagaaacagtcccagccccttcagccaacaaagaattagttaaatgctgaagaagccttcaggaatccaaatcctgaacatttggaatgagcccagatagaaatatcgaatgcaaagctactggcttcacagagacaaccatttatgatttgctgttctgtaagagtgtggattctttctatcaactgctgatatcatcttcaggaagcaagtccataacatgacatatctggattttgtgcttagaaccttaaattggaagcattcttaattatgcatctaaatttaaaagaagataatttcaaaacagtgctttctttcccttggtttcatcattttcatatcttaaaccaaattacttcggtatctgacaacagcatcatctacctcagtcattaggatttcttaataaaaaagagattgtatttttgacttggttattaagattattaaaattagcccttcctttgaaatatgacatcagctttgctgttctaaatttaaaattagttgcttcatcagtaccacacttccagtttctataccaagccagtctcctcagttttcccattagaatggacatgttctgttcagcgtgtcatttctgtaatgcttcatgcagagagtttggtcatagtattaaagagaaaatacagtgaggtcacaatgtctccagagctaaaagttagtgaacaagaaagaaagtccaaaatgaagtgatgaaagaatgaggacttttcttatattctgcatatttcttggaagtcaggacaagatgaaaagaaaaacatccaaaagaagtgaaattggtgacagaatgagaggagcaaagcataccagtgtagtaagtggaatgtttgaatgactttgccaggtcagagcaagtaatatttctgtatctgagtttttgtttgtgttttgataaggctaatgaaattgcattccaggtaggggttaacgtcaaatttccatggctggtagctgtgcttttggcatatcacagtgttgtgtcactactacaaggtaaagcatctacagcggagaatgagcttgaaaatgagagacctattgtgaataaatatgcccatgagagcatatttaataagcctctataacatgcagccaaaccagacattcactcctgcagagaaatgttgccctggagaaaaagagatatataaagataggctatcacccttcttttgctgcagtactaagcatagcaagaaattagaatcatttacattggaaatttgaaaattccctttatatacacaactttactgtgtataaataaaaaatatttattaatgcagtgatgtccgtcaggttgttttaggaatggcttctgcaattagaaaaatagcttgctagaatgtaaatgttctgttactggtaaatgtactgcacacattcattggacgttaaaacaagtgagtagccttttttacctgccagcagcatggctgtgtgcagccactaggctgagacaataaattaccaaaaattataatgtaccgagctgaaaatgctcagtacattatgtggcatattctggatgtgatgagaaatctcattgccatttgggacactgacatcccagaagtaatccacaactgctttgcaaaagcaaagtgactgctcagatgaacagagcagagtactcactcactatggtggcatcagctgcaaagcgaaaatgaactgtcccatgatcatgttgatggttttctagatactgccaacatgttagctctttctgatgctgatgagtttcaaacacgaacagacacccttgatgtgggtttgctaagaacatagaagaacaggaagaaaagttgccaggttcacacatcccaggaaaaaagaagcataaaaagcattagcagtcagtgactgatgataatgctgcaataatgggaatggttttgtttctaaaccaaattatttctaaatcaaatcatttattgctttgtttctaaagcaattgagtcactaagtttgtgaactgtaggagaacacatcaagattgaatcctgtgttaagcagaaggtaaaaccagagccaggcgcagtggctcgtgcctgtaatcccagctactcaggaagctaaggcaggaggatcatgtgaggccaggagttcaagactagcctgggcaacatagaaagaccctgtctctaaaaaatcttcttttaattagcaaggtgtggggccttgagcaaattgcttgggcccaggagtttgaggctgtggtgagctgtgatcacaccactgcgttccagcctgtgtgacagggcaagacctcatgcctaaaaaataaagagaaagcagagtaaaactggactctgagatacgactaaagttctgtgtgatacgtgtgccttatttagctcaagacattcctggagcacctataaaaactgacttgtaatccaggctatgtctctttttagcttcgtaatctttggcaaggccattggattcttcagctgtacaattaggagactcgatcaggtgattgcctttctcagctgtcagttctctaatttcaggcttggtagcttgtaggaactgaaattgcaattaaaacctttataaactcaaactaaatcatgaattacagaaaaagtccattcttccaaaacttgatgttaccacacttacaagtttaaaatatgaagtcgactgtttaaaggattctgcatatattctagtgtgcacattcagaaacatttttcttggaaaaagtacccaacattttttataactgcacatattaatttattgccagaataaattgcattgcatgctaaataaagtcagataattcaaatcca

SEQ ID NO: 367348 - DNA, 4048 bp, Homo sapiens
ggatgccgagcccaggccggttccggcgaagttaaaccctcggagctggcctcggactgctggggcgttaccccttcggccacccccgctgaccatggcagtgtttcatgacgaggtggaaatcgaggacttccaatatgacgaggactcggagacgtatttctatccctgcccatgtggagataacttctccatcaccaaggaagatttggagaatggggaagacgtggcaacgtgtcctagctgctctctcattataaaagtgatttatgacaaagatcagtttgtgtgtggagaaacagtcccagccccttcagccaacaaagaattagttaaatgctgaagaagccttcaggaatccaaatcctgaacatttggaatgagcccagatagaaatatcgaatgcaaagctactggcttcacagagacaaccatttatgatttgctgttctgtaagagtgtggattctttctatcaactgctgatatcatcttcaggaagcaagtccataacatgacatatctggattttgtgcttagaaccttaaattggaagcattcttaattatgcatctaaatttaaaagaagataatttcaaaacagtgctttctttcccttggtttcatcattttcatatcttaaaccaaattacttcggtatctgacaacagcatcatctacctcagtcattaggatttcttaataaaaaagagattgtatttttgacttggttattaagattattaaaattagcccttcctttgaaatatgacatcagctttgctgttctaaatttaaaattagttgcttcatcagtaccacacttccagtttctataccaagccagtctcctcagttttcccattagaatggacatgttctgttcagcgtgtcatttctgtaatgcttcatgcagagagtttggtcatagtattaaagagaaaatacagtgaggtcacaatgtctccagagctaaaagttagtgaacaagaaagaaagtccaaaatgaagtgatgaaagaatgaggacttttcttatattctgcatatttcttggaagtcaggacaagatgaaaagaaaaacatccaaaagaagtgaaattggtgacagaatgagaggagcaaagcataccagtgtagtaagtggaatgtttgaatgactttgccaggtcagagcaagtaatatttctgtatctgagtttttgtttgtgttttgataaggctaatgaaattgcattccaggtaggggttaacgtcaaatttccatggctggtagctgtgcttttggcatatcacagtgttgtgtcactactacaaggtaaagcatctacagcggagaatgagcttgaaaatgagagacctattgtgaataaatatgcccatgagagcatatttaataagcctctataacatgcagccaaaccagacattcactcctgcagagaaatgttgccctggagaaaaagagatatataaagataggctatcacccttcttttgctgcagtactaagcatagcaagaaattagaatcatttacattggaaatttgaaaattccctttatatacacaactttactgtgtataaataaaaaatatttattaatgcagtgatgtccgtcaggttgttttaggaatggcttctgcaattagaaaaatagcttgctagaatgtaaatgttctgttactggtaaatgtactgcacacattcattggacgttaaaacaagtgagtagccttttttacctgccagcagcatggctgtgtgcagccactaggctgagacaataaattaccaaaaattataatgtaccgagctgaaaatgctcagtacattatgtggcatattctggatgtgatgagaaatctcattgccatttgggacactgacatcccagaagtaatccacaactgctttgcaaaagcaaagtgactgctcagatgaacagagcagagtactcactcactatggtggcatcagctgcaaagcgaaaatgaactgtcccatgatcatgttgatggttttctagatactgccaacatgttagctctttctgatgctgatgagtttcaaacacgaacagacacccttgatgtgggtttgctaagaacatagaagaacaggaagaaaagttgccaggttcacacatcccaggaaaaaagaagcataaaaagcattagcagtcagtgactgatgataatgctgcaataatgggaatggttttgtttctaaaccaaattatttctaaatcaaatcatttattgctttgtttctaaagcaattgagtcactaagtttgtgaactgtaggagaacacatcaagattgaatcctgtgttaagcagaaggtaaaaccagagccaggcgcagtggctcgtgcctgtaatcccagctactcaggaagctaaggcaggaggatcatgtgaggccaggagttcaagactagcctgggcaacatagaaagaccctgtctctaaaaaatcttcttttaattagcaaggtgtggggccttgagcaaattgcttgggcccaggagtttgaggctgtggtgagctgtgatcacaccactgcgttccagcctgtgtgacagggcaagacctcatgcctaaaaaataaagagaaagcagagtaaaactggactctgagatacgactaaagttctgtgtgatacgtgtgccttatttagctcaagacattcctggagcacctataaaaactgacttgtaatccaggctatgtctctttttagcttcgtaatctttggcaaggccattggattcttcagctgtacaattaggagactcgatcaggtgattgcctttctcagctgtcagttctctaatttcaggcttggtagcttgtaggaactgaaattgcaattaaaacctttataaactcaaactaaatcatgaattacagaaaaagtccattcttccaaaacttgatgttaccacacttacaagtttaaaatatgaagtcgactgtttaaaggattctgcatatattctagtgtgcacattcagaaacatttttcttggaaaaagtacccaacattttttataactgcacatattaatttattgccagaataaattgcattgcatgctaaataaagtcagataattcaaatccatttgcttttatgtagtttttcttctaaatgtcaacattttgaattaaaatgtttatgattttatatgaggtagaaatcttaactgctttggggtattgttaatagactttttgttatggacagtagtttttaaataaggaaattgccaatttctacagtttgggctctggatttctattgtttgggaaaaaaataactgagtcaagtggtagtaagacaaagttgacattcttagatgagtaactcagtttattacaaggaaagaaaactgattgtttaaggctgatgatcaattcttggagtggtttcagagcccagctctggtcagaagacaatttgaatcttagttcctccactgtgatctccgagaagttacttaataattatattctgctttgtgaaatctggatcatagtacctctttgacagggttgctgtgtgaaccattcattctgcaattagaaaaatagctgtcatgtgctatgcactaggcaaagaagtacctgtcacatgctaggcactaggggaagaagattcggtttctacatttggaaccttagtggaactagaagagacagaagcaagattacagatgagttagagccccccaaggaaacaaacccaggtgatgtgggagagagtaactgggtcaggtgactttttaagggagtctgagctctggcactttttctaagacctgaaggatgagaaggaaacagccttgtgaaaatgattaaatgagctagtatctataaaacatgacagctaatgcctgtcatgtgcaaaaaatggttaactattctaactccgaaaggaattaaacattgttttgcgctttctcctagtccatgttctgctgctgtaacaatacctgagactggataatttatcaagaataaaggttaatttggctcatga

SEQ ID NO: 367349 - DNA, 2617 bp, Homo sapiens
gaagccaagatgagccattgcacccagcctgggtgacagagcaagaccctgtctctaaaaatgaatgaaaagaagataatttcaaaacagtgctttctttcccttggtttcatcattttcatatcttaaaccaaattacttcggtatctgacaacagcatcatctacctcagtcattaggatttcttaataaaaaagagattgtatttttgacttggttattaagattattaaaattagcccttcctttgaaatatgacatcagctttgctgttctaaatttaaaattagttgcttcatcagtaccacacttccagtttctataccaagccagtctcctcagttttcccattagaatggacatgttctgttcagcgtgtcatttctgtaatgcttcatgcagagagtttggtcatagtattaaagagaaaatacagtgaggtcacaatgtctccagagctaaaagttagtgaacaagaaagaaagtccaaaatgaagtgatgaaagaatgaggacttttcttatattctgcatatttcttggaagtcaggacaagatgaaaagaaaaacatccaaaagaagtgaaattggtgacagaatgagaggagcaaagcataccagtgtagtaagtggaatgtttgaatgactttgccaggtcagagcaagtaatatttctgtatctgagtttttgtttgtgttttgataaggctaatgaaattgcattccaggtaggggttaacgtcaaatttccatggctggtagctgtgcttttggcatatcacagtgttgtgtcactactacaaggtaaagcatctacagcggagaatgagcttgaaaatgagagacctattgtgaataaatatgcccatgagagcatatttaataagcctctataacatgcagccaaaccagacattcactcctgcagagaaatgttgccctggagaaaaagagatatataaagataggctatcacccttcttttgctgcagtactaagcatagcaagaaattagaatcatttacattggaaatttgaaaattccctttatatacacaactttactgtgtataaataaaaaatatttattaatgcagtgatgtccgtcaggttgttttaggaatggcttctgcaattagaaaaatagcttgctagaatgtaaatgttctgttactggtaaatgtactgcacacattcattggacgttaaaacaagtgagtagccttttttacctgccagcagcatggctgtgtgcagccactaggctgagacaataaattaccaaaaattataatgtaccgagctgaaaatgctcagtacattatgtggcatattctggatgtgatgagaaatctcattgccatttgggacactgacatcccagaagtaatccacaactgctttgcaaaagcaaagtgactgctcagatgaacagagcagagtactcactcactatggtggcatcagctgcaaagcgaaaatgaactgtcccatgatcatgttgatggttttctagatactgccaacatgttagctctttctgatgctgatgagtttcaaacacgaacagacacccttgatgtgggtttgctaagaacatagaagaacaggaagaaaagttgccaggttcacacatcccaggaaaaaagaagcataaaaagcattagcagtcagtgactgatgataatgctgcaataatgggaatggttttgtttctaaaccaaattatttctaaatcaaatcatttattgctttgtttctaaagcaattgagtcactaagtttgtgaactgtaggagaacacatcaagattgaatcctgtgttaagcagaaggtaaaaccagagccaggcgcagtggctcgtgcctgtaatcccagctactcaggaagctaaggcaggaggatcatgtgaggccaggagttcaagactagcctgggcaacatagaaagaccctgtctctaaaaaatcttcttttaattagcaaggtgtggggccttgagcaaattgcttgggcccaggagtttgaggctgtggtgagctgtgatcacaccactgcgttccagcctgtgtgacagggcaagacctcatgcctaaaaaataaagagaaagcagagtaaaactggactctgagatacgactaaagttctgtgtgatacgtgtgccttatttagctcaagacattcctggagcacctataaaaactgacttgtaatccaggctatgtctctttttagcttcgtaatctttggcaaggccattggattcttcagctgtacaattaggagactcgatcaggtgattgcctttctcagctgtcagttctctaatttcaggcttggtagcttgtaggaactgaaattgcaattaaaacctttataaactcaaactaaatcatgaattacagaaaaagtccattcttccaaaacttgatgttaccacacttacaagtttaaaatatgaagtcgactgtttaaaggattctgcatatattctagtgtgcacattcagaaacatttttcttggaaaaagtacccaacattttttataactgcacatattaatttattgccagaataaattgcattgcatgctaaataaagtcagataattcaaatcca

SEQ ID NO: 367350 - DNA, 667 bp, Homo sapiens
ggatgccgagcccaggccggttccggcgaagttaaaccctcggagctggcctcggactgctggggcgttaccccttcggccacccccgctgaccatggcagtgtttcatgacgaggtggaaatcgaggacttccaatatgacgaggactcggagacgtatttctatccctgcccatgtggagataacttctccatcaccaaggaagatttggagaatggggaagacgtggcaacgtgtcctagctgctctctcattataaaagtgatttatgacaaagatcagtttgtgtgtggagaaacagtcccagccccttcagccaacaaagaattagttaaatgctgaagaagccttcaggaatccaaatcctgaacatttggaatgagcccagatagaaatatcgaatgcaaagctactggcttcacagagacaaccatttatgatttgctgttctgtaagagtgtggattctttctatcaactgctgatatcatcttcaggaagcaagtccataacatgacatatctggattttgtgaagataatttcaaaacagtgctttctttcccttggtttcatcattttcatatcttaaaccaaattacttcggtatctgacaacagcatcatctacctcagtcattaggatttcttaataaaaaagagattgta

SEQ ID NO: 367351 - DNA, 1767 bp, Homo sapiens
ggatgccgagcccaggccggttccggcgaagttaaaccctcggagctggcctcggactgctggggcgttaccccttcggccacccccgctgaccatggcagtgtttcatgacgaggtggaaatcgaggacttccaatatgacgaggactcggagacgtatttctatccctgcccatgtggagataacttctccatcaccaaggaagatttggagaatggggaagacgtggcaacgtgtcctagctgctctctcattataaaagtgatttatgacaaagatcagtttgtgtgtggagaaacagtcccagccccttcagccaacaaagaattagttaaatgctgaagaagccttcaggaatccaaatcctgaacatttggaatgagcccagatagaaatatcgaatgcaaagctactggcttcacagagacaaccatttatgatttgctgttctgtaagagtgtggattctttctatcaactgctgatatcatcttcaggaagcaagtccataacatgacatatctggattttgtgcttagaaccttaaattggaagcattcttaattatgcatctaaatttaaaagaagataatttcaaaacagtgctttctttcccttggtttcatcattttcatatcttaaaccaaattacttcggtatctgacaacagcatcatctacctcagtcattaggatttcttaataaaaaagagattgtatttttgacttggttattaagattattaaaattagcccttcctttgaaatatgacatcagctttgctgttctaaatttaaaattagttgcttcatcagtaccacacttccagtttctataccaagccagtctcctcagttttcccattagaatggacatgttctgttcagcgtgtcatttctgtaatgcttcatgcagagagtttggtcatagtattaaagagaaaatacagtgaggtcacaatgtctccagagctaaaagttagtgaacaagaaagaaagtccaaaatgaagtgatgaaagaatgaggacttttcttatattctgcatatttcttggaagtcaggacaagatgaaaagaaaaacatccaaaagaagtgaaattggtgacagaatgagaggagcaaagcataccagtgtagtaagtggaatgtttgaatgactttgccaggtcagagcaagtaatatttctgtatctgagtttttgtttgtgttttgataaggctaatgaaattgcattccaggtaggggttaacgtcaaatttccatggctggtagctgtgcttttggcatatcacagtgttgtgtcactactacaaggtaaagcatctacagcggagaatgagcttgaaaatgagagacctattgtgaataaatatgcccatgagagcatatttaataagcctctataacatgcagccaaaccagacattcactcctgcagagaaatgttgccctggagaaaaagagatatataaagataggctatcacccttcttttgctgcagtactaagcatagcaagaaattagaatcatttacattggaaatttgaaaattccctttatatacaccttcggggttacttagcaattctaggcggagtcccaggtgtcgaaagtctcgataaaaatgtgaagagagcaccgtggatataaccaacgggagaagaaagacaatcccacagcgttacccaggaaaactacgagcaacatacagaagagcgcgccacatgggaccgtttttttattaatttgacttaccgatagcgg

SEQ ID NO: 367352 - DNA, 430 bp, Homo sapiens
gagccaggctcaagtattggcaccaagttaggtctcagaggaaagaatggaaaccaatcactttacatttttatttttattttcggtggaaaaatcatccttttttgggacatacttgccccctacttcctcttctctctggaacggctcacaatgagtgtgacattagaaaactccttgcagaggagagtttctccagggcctcctcccaagtgtggctttaaggagtaagcttgaggatgatgttttttaattattgtaaatcattacctcatttccagcctcccaggctccatccatcccagcatcttttattctgccattttcctcaccttgtgctatgacaatggggcgttgtgtttccacagagacttataggagtgttcagtgtatagtttcttaataaacactttattttctaatgaaatga

SEQ ID NO: 367353 - DNA, 1445 bp, Homo sapiens
gagccaggctcaagtattggcaccaagttaggtctcagaggaaagaatggaaaccaatcactttacatttttatttttattttcggtggaaaaatcatccttttttgggacatacttgccccctacttcctcttctctctggaacggctcacaatgagtgtgacattagaaaactccttgcagaggagagtttctccaggctcttcctgggcccttagatctgcagttccgacaagctttggctgcaggaggttttacccatgaactggccatcctactaggaccacaagggaccaagggaatcagggacaaaggcccttcctgccagcccatgatcccgggattggctctcttcccctacttccacttattcttgactctgagaacttttggaacccaatggaatcagcatttcaaggtcaagatgaactgaaggggaagagaagtaaaacttggcctcctccagcccctctcatggcaccaatggaagtgtcctcctgttctctggtcaatatgtgtgtttactttgcttgctttgactcatgccatttactccatggccaccctctcccaaagagggggctcgcttcccccattttcaacttgatccactgaggagagggaagggggtgactttcccttcttcagtaggaaaggcacatttgtagggcctgaaactctcccgtatttgctgactcattggtggagtagacttctggctcccagctccactggcccatggggcctccattgtatcaagtcagcataggctgcccacctaatggtggagagcatgaaactgggagcatcctgtggggggcttgtgggggaaaaaggtggttgttttaacccaccgttgttttggggtggtgttgcacactagtagagaatagagtctatgcctttggcaaatttaactgggagtttggattcccacttaagggttttacttcttgggtcctgtggatggtggttcttcgtgtcaggatcccagcccgattctgcaaatgcctccatggggtttaaaaacatgaggctttccaagttcttgcccagtatctggggcagcctccagagtatcacctgggagttcaggttctctccagggctccaggtgtgtgtttatctcgccccctccagctctcctcatcctgctccccattgctccatgtcaggctgttccccattgtgccctgctgatgctttgggtccagggcctcctcccaagtgtggctttaaggagtaagcttgaggatgatgttttttaattattgtaaatcattacctcatttccagcctcccaggctccatccatcccagcatcttttattctgccattttcctcaccttgtgctatgacaatggggcgttgtgtttccacagagacttataggagtgttcagtgtatagtttcttaataaacactttattttctaatgaaatga

SEQ ID NO: 367354 - DNA, 1323 bp, Homo sapiens
cacactcattgtgagccgttccagagagaagaggaagtagggggcaagtatgtcccaaaaaaggatgatttttccaggctcttcctgggcccttagatctgcagttccgacaagctttggctgcaggaggttttacccatgaactggccatcctactaggaccacaagggaccaagggaatcagggacaaaggcccttcctgccagcccatgatcccgggattggctctcttcccctacttccacttattcttgactctgagaacttttggaacccaatggaatcagcatttcaaggtcaagatgaactgaaggggaagagaagtaaaacttggcctcctccagcccctctcatggcaccaatggaagtgtcctcctgttctctggtcaatatgtgtgtttactttgcttgctttgactcatgccatttactccatggccaccctctcccaaagagggggctcgcttcccccattttcaacttgatccactgaggagagggaagggggtgactttcccttcttcagtaggaaaggcacatttgtagggcctgaaactctcccgtatttgctgactcattggtggagtagacttctggctcccagctccactggcccatggggcctccattgtatcaagtcagcataggctgcccacctaatggtggagagcatgaaactgggagcatcctgtggggggcttgtgggggaaaaaggtggttgttttaacccaccgttgttttggggtggtgttgcacactagtagagaatagagtctatgcctttggcaaatttaactgggagtttggattcccacttaagggttttacttcttgggtcctgtggatggtggttcttcgtgtcaggatcccagcccgattctgcaaatgcctccatggggtttaaaaacatgaggctttccaagttcttgcccagtatctggggcagcctccagagtatcacctgggagttcaggttctctccagggctccaggtgtgtgtttatctcgccccctccagctctcctcatcctgctccccattgctccatgtcaggctgttccccattgtgccctgctgatgctttgggtccagggcctcctcccaagtgtggctttaaggagtaagcttgaggatgatgttttttaattattgtaaatcattacctcatttccagcctcccaggctccatccatcccagcatcttttattctgccattttcctcaccttgtgctatgacaatggggcgttgtgtttccacagagacttataggagtgttcagtgtatagtttcttaataaacactttattttctaatgaaatga

SEQ ID NO: 367355 - DNA, 1196 bp, Homo sapiens
gagccaggctcaagtattggcaccaagttaggtctcagaggaaagaatggaaaccaatcactttacatttttatttttattttcggtggaaaaatcatccttttttgggacatacttgccccctacttcctcttctctctggaacggctcacaatgagtgtgacattagaaaactccttgcagaggagagtttctccaggctcttcctgggcccttagatctgcagttccgacaagctttggctgcaggaggttttacccatgaactggccatcctactaggaccacaagggaccaagggaatcagggacaaaggcccttcctgccagcccatgatcccgggattggctctcttcccctacttccacttattcttgactctgagaacttttggaacccaatggaatcagcatttcaaggtcaagatgaactgaaggggaagagaagtaaaacttggcctcctccagcccctctcatggcaccaatggaagtgtcctcctgttctctggtcaatatgtgtgtttactttgcttgctttgactcatgccatttactccatggccaccctctcccaaagagggggctcgcttcccccattttcaacttgatccactgaggagagggaagggggtgactttcccttcttcagtaggaaaggcacatttgtagggcctgaaactctcccgtatttgctgactcattggtggagtagacttctggctcccagctccactggcccatggggcctccattgtatcaagtcagcataggctgcccacctaatggtggagagcatgaaactgggagcatcctgtggggggcttgtgggggaaaaaggtggttgttttaacccaccgttgttttggggtggtgttgcacactagtagagaatagagtctatgcctttggcaaatttaactgggagtttggattcccacttaagggttttacttcttgggtcctgtggatggtggttcttcgtgcaaatagtgcttatagtttaaaagtcctagaaaagattcacagtcacattttctgtatgtaactacatttactgtaagtgaaacttggtagtttgttggcttgttcatttttatttttcaagtcttgtgtaaacgtaaagcaccttgatctgccagcatggtcaaagagattggccatagaagattcaccatagtagacaaccatatctacatg

SEQ ID NO: 367356 - DNA, 4345 bp, Homo sapiens
gcggcggggctccggctgcgctcgtggccgggccgggcggggaggccggtcccgcgggcgggggcaggggcggctccgcggcttctcccgccgccgccgccaaggggagtttccaggaagtggccatattggatccattcagccgcagccgcccgggcggagcgcgtcccgcagccggctggtccctgtcgctgcccctgcgctcgtcccagcccacccgcccggtgcggagctcgccatggcggccaccgacctggagcgcttctcgaatgcagagccagagccccggagcctctccctgggcggccatgtgggtttcgacagcctccccgaccagctggtcagcaagtcggtcactcagggcttcagcttcaacatcctctgtgtgggggagaccggcattggcaaatccacactgatgaacacactcttcaacacgaccttcgagactgaggaagccagtcaccatgaggcatgcgtgcgcctgcggccccagacctatgacctccaggagagcaacgtgcagctcaagctgaccattgtggatgccgtgggctttggggatcagatcaataaggatgagagttacaggcccatagttgactacatcgatgcgcagtttgaaaattatctgcaggaggagctgaagatccgccgctcgctcttcgactaccatgacacaaggatccacgtttgcctctacttcatcacgcccacagggcactccctgaagtctctagatctagtgaccatgaagaaactagacagcaaggtgaacattattcccatcatcgccaaggctgacaccatctccaagagcgagctccacaagttcaagatcaagatcatgggcgagttggtcagcaacggggtccagatctaccagttccccacggatgatgaggctgttgcagagattaacgcagtcatgaatgcacatctgccctttgccgtggtgggcagcaccgaggaggtgaaggtggggaacaagctggtccgagcacggcagtacccctggggagtggtgcaggtggagaatgagaatcactgcgacttcgtgaagctgcgggagatgttgatccgggtgaacatggaagacctccgcgagcagacccacagccggcactacgagctctaccggcgctgcaagttggaggagatgggctttcaggacagcgatggtgacagccagcccttcagcctacaagagacatacgaggccaagaggaaggagttcctaagtgagctgcagaggaaggaggaagagatgaggcagatgtttgtcaacaaagtgaaggagacagagctggagctgaaggagaaggaaagggagctccatgagaagtttgagcacctgaagcgggtccaccaggaggagaagcgcaaggtggaggaaaagcgccgggaactggaggaggagaccaacgccttcaatcgccggaaggctgcggtggaggccctgcagtcgcaggccttgcacgccacctcgcagcagcccctgaggaaggacaaggacaagaagaattaacgcacgcacagacttacatgtcaagagtggactttagactttcatgtgttaagttgcttgagttacaccttgtgacccttctcccataacatggtgtgaggacggactgggagccggtacagactccagtgtttacagccttgctttcctcccaccgaccctggccccaggctgccccgggcctggcgggccacccctctctatgcaaacacgtaaaagccatgaatgctggaatccaaaactgacgaggtttatttttttcagagccagtggctggtcttccatttacagtgtcactattccctgacggagctgttatgtgccgctctagcgaaggccccagccgggatgctaggcctaattgttcagcgtggagatggcaactcacgtggtgccctaggtgcagctgcgtggtctggtatacatgctgcaaaattcacccagttcccctcattttaatttttctaacctacagcttaattttaataactttaaaacacttctaaatatttattttggcaccagcgtcaagacaaataatatcctctcccattattttcataagtaacacagattccctgatttttaaaaactaaaaatacagctaaacctttcttatgtataaagtatgcctatcatatacagggagaggtgggtaataaacttcctgtaatgacagtgtttggcatttctttatggatggaattggaacatgaacaagaccatgtccagcgtttttactgtgaatgtaaatggaacagcagcccaaagctgttgtctgtgccccagaggtgctacctgtagacagggaccaactccatgtgtgtgtgttaagtgtttgactccaattaagactcccaagcgaatcctgcatattccaaatgtaaagagtactcagtgggaaaaaggttgttacctcaaagtcattgcttctttcctggctgggtcacagggtgaagagatgaaggtgtctgatgtatatagacaattagggaaaaatgagcggcaaaggagctttccccttcagctgcactctaaaggggaacattttaaggaagtactagcagctttgactcttctatgctcctgttggtttacaagccaccaagaatgtcagtgttgagaatacggcctggtaaaatgggagatgtaaaatgactaaatgaaaggaagggtagttttaatgttgaagcaccgtgctgggcactggagctacccagaggaatgcacaacgctcccctcaaggagctcacagtctagcctactccctggctggaagcctcaggaagacgtgctaatttattgtggaattggtagtttgcttttcatgcccctgtcttccttctcatgaccatttccccctttctgtctggcttgcattattgatttccaggaccaagtcctggcttcctcctgccttcctgagatgatgttctgctcagggagaagtggaggggtgagctgtgtgtgtccaccgaggcacggccaggaagaggcagcctttacctgtgaggggctccatgctccagcagcagagcaggttctagtgacaattcaactttttatgctatgaccaggggtggatctaaattttatggggctgaaagcttgaattatttagaaagacttctttaagaaaaacaatgttaatataaaattaggtacagggtcttggaaggggccctgaagattaagcttccttagcgtcacaataagtccgtatctggttgcaattgaaaactgatgcttcagtgagggtatctaaaaaggtaaactggcatatccagggcaaatgtgggctgccaatggctcatctctagggtaattttatgtctgaaagtgtatgcagttgggtcagagcatgacctttaagatagcctctctcagctaacatatttatgaagatgaggcctggtgacccagcaggttcattggatacataagaaatgagaattcctggttcatgggccaacctaggactctggagtatgcagacttggccattcgtccattgtggcctgcgggtcgcaccccaggcatactgaaaggccatactcgtggctggctgcctgcgggcctaagccttcccaggatcttcaggacacttgacagacttgtgttttctggtctgagctgcctccacaggtccctccagcaagcctcactgcacctctcccctgctgtttgtgtttggaattttgtcttctttagctgagaccaaattaaaccttggtgcataaagtgagcttaaaacttgccactgtttagtaagttagcccccatagaatgtgaccctgtctgcagagtctcatttacccctctttttctcattgtcatttgttggctttattagggctgtcttacaggatcatgttggcatttactatcatgtctttatcataaaccatgtttgtttgaggtagaagaatcaccatataattcgttgcccaaattgggactattgagagagaaaggggatgctattaattacaccagatcaaaaggcataaaccagacctgtcccaggccgatgtggaaatatgttctttctagttgtgggtaccctgatctaggtggtttgtaattgtgcattactgactgcatatgtttgtgtatgtgtaaatgtgggctccctgttaagtggggctcatggatacgaggcctgaggaagtgtggcttgctagtctgttacgttaacatgcttttctaaaattgcttcacgtgttaattcatttactcctgcattcattgactgtttttgttcttttccattcactttgtacttatttttttcattaaattttgcatttattttga

SEQ ID NO: 367357 - DNA, 1493 bp, Homo sapiens
gctggcaggtggtgatggagaactgcgggcactcgcgccagccaacactggcctcctggagactggtcaccacacagctgttctgaagggcccgcagggcttaagggaggaaagcggcttcccacaggggctctgtgggttcttttggggagaagagctgcccctcaagtagaggctggagttgttcctgcagagtggagagaggagagaaagactggatggcagggaggcctttcccagcaccaggagtgcagtcaacggagtagtcaggtggggacaactatgagtcacttctccctggcgatcttcatagcctgtttccacacccttagctggagtccagatgtcctggcttctggggctcaccctcgcccacccacctcattcacagccatgctatgtcacactgtggggatcccatccatccctgcttctccctgccccggcctatcttgggtaccatccttctcttgccaacctaggaactaagcaggtgaacccaacctggcgtcattctcgggatccatttcctcctgggatatttggggatgtgtatgcccaggcccttccttccttggtggcaatggagcctagccattagggccagcgggagtctgtgacccaggtactggcacccaaagtgactttgccctgcttcctgccatcttgttaaagaaaaggtagccaggattccctaggaaataagctgtggagaaaccactcagcaactgcagacaggggtctgtggccagttcagggtctgagggccagtgaaggtgggtgcaggcaggctgaaaggacaccagcacagccctcggggtgggggcttgtcactggtgtctggtctccctgcttttcccatgtggcctgggctccatgatacgttctccaggcctgggcctggaaaacaggtctttcctgttttctggacctgctagaaagcttcagtcagtttggtccctgggagagaaaacgctcttcccatgacggctctgtggaggccaggaatggggtaggtgggttgactgggagtactccttcctgccgccctggtcaagggactagtgtgagtcgggagtgcatttttggaatgggggcaggggtgtttttcatgaccatttatttgagtggttttgattggttatgcatactctttaaatttgaatccaaattttttgcaaaattacttcccaatcagatcttgacccttagcctgggacaccacaaactgaggtgaattctctgctttgctcgtcacaaatgccaaactgactgccctttcacggtgtccatcttgctgtcttttgcttctgtttgatttggtctgcatatcttttaatgtgtctgtttttgttttgtttttatttttttcttgaaacagggtctcactctgtcgaccaggctggagtgcagtggtgtgatcatggctcacttagcgtctacctcccgggctcaagcgatcctcccacttcagccccctgagtaggtgggac

SEQ ID NO: 367358 - DNA, 4291 bp, Homo sapiens
gcggcggggctccggctgcgctcgtggccgggccgggcggggaggccggtcccgcgggcgggggcaggggcggctccgcggcttctcccgccgccgccgccaaggggagtttccaggaagtggccatattggatccattcagccgcagccgcccgggcggagcgcgtcccgcagccggctggtccctgtcgctgcccctgcgctcgtcccagcccacccgcccggtgcggagctcgccatggcggccaccgacctggagcgcttctcgaatgcagagccagagccccggagcctctccctgggcggccatgtgggtttcgacagcctccccgaccagctggtcagcaagtcggtcactcagggcttcagcttcaacatcctctgtgtgggggagaccggcattggcaaatccacactgatgaacacactcttcaacacgaccttcgagactgaggaagccagtcaccatgaggcatgcgtgcgcctgcggccccagacctatgacctccaggagagcaacgtgcagctcaagctgaccattgtggatgccgtgggctttggggatcagatcaataaggatgagagttacaggcccatagttgactacatcgatgcgcagtttgaaaattatctgcaggaggagctgaagatccgccgctcgctcttcgactaccatgacacaaggatccacgtttgcctctacttcatcacgcccacagggcactccctgaagtctctagatctagtgaccatgaagaaactagacagcaaggtgaacattattcccatcatcgccaaggctgacaccatctccaagagcgagctccacaagttcaagatcaagatcatgggcgagttggtcagcaacggggtccagatctaccagttccccacggatgatgaggctgttgcagagattaacgcagtcatgaatgcacatctgccctttgccgtggtgggcagcaccgaggaggtgaaggtggggaacaagctggtccgagcacggcagtacccctggggagtggtgcaggtggagaatgagaatcactgcgacttcgtgaagctgcgggagatgttgatccgggtgaacatggaagacctccgcgagcagacccacagccggcactacgagctctaccggcgctgcaagttggaggagatgggctttcaggacagcgatggtgacagccagcccttcagcctacaagagacatacgaggccaagaggaaggagttcctaagtgagctgcagaggaaggaggaagagatgaggcagatgtttgtcaacaaagtgaaggagacagagctggagctgaaggagaaggaaagggagctccatgagaagtttgagcacctgaagcgggtccaccaggaggagaagcgcaaggtggaggaaaagcgccgggaactggaggaggagaccaacgccttcaatcgccggaaggctgcggtggaggccctgcagtcgcaggccttgcacgccacctcgcagcagcccctgaggaaggacaaggacaagaagaattaacgcacgcacagacttacatgtcaagagtggactttagactttcatgtgttaagttgcttgagttacaccttgtgacccttctcccataacatggtgtgaggacggactgggagccggtacagactccagtgtttacagccttgctttcctcccaccgaccctggccccaggctgccccgggcctggcgggccacccctctctatgcaaacacgtaaaagccatgaatgctggaatccaaaactgacgaggtttatttttttcagagccagtggctggtcttccatttacagtgtcactattccctgacggagctgttatgtgccgctctagcgaaggccccagccgggatgctaggcctaattgttcagcgtggagatggcaactcacgtggtgccctaggtgcagctgcgtggtctggtatacatgctgcaaaattcacccagttcccctcattttaatttttctaacctacagcttaattttaataactttaaaacacttctaaatatttattttggcaccagcgtcaagacaaataatatcctctcccattattttcataagtaacacagattccctgatttttaaaaactaaaaatacagctaaacctttcttatgtataaagtatgcctatcatatacagggagaggtgggtaataaacttcctgtaatgacagtgtttggcatttctttatggatggaattggaacatgaacaagaccatgtccagcgtttttactgtgaatgtaaatggaacagcagcccaaagctgttgtctgtgccccagaggtgctacctgtagacagggaccaactccatgtgtgtgtgttaagtgtttgactccaattaagactcccaagcgaatcctgcatattccaaatgtaaagagtactcagtgggaaaaaggttgttacctcaaagtcattgcttctttcctggctgggtcacagggtgaagagatgaaggtgtctgatgtatatagacaattagggaaaaatgagcggcaaaggagctttccccttcagctgcactctaaaggggaacattttaaggaagtactagcagctttgactcttctatgctcctgttggtttacaagccaccaagaatgtcagtgttgagaatacggcctggtaaaatgggagatgtaaaatgactaaatgaaaggaagggtagttttaatgttgaagcaccgtgctgggcactggagctacccagaggaatgcacaacgctcccctcaaggagctcacagtctagcctactccctggctggaagcctcaggaagacgtgctaatttattgtggaattggtagtttgcttttcatgcccctgtcttccttctcatgaccatttccccctttctgtctggcttgcattattgatttccaggaccaagtcctggcttcctcctgccttcctgagatgatgttctgctcagggagaagtggaggggtgagctgtgtgtgtccaccgaggcacggccaggaagaggcagcctttacctgtgaggggctccatgctccagcagcagagcaggttctagtgacaattcaactttttatgctatgaccaggggtggatctaaattttatggggctgaaagcttgaattatttagaaagacttctttaagaaaaacaatgttaatataaaattaggtacagggtcttggaaggggccctgaagattaagcttccttagcgtcacaataagtccgtatctggttgcaattgaaaactgatgcttcagtgagggtatctaaaggtaattttatgtctgaaagtgtatgcagttgggtcagagcatgacctttaagatagcctctctcagctaacatatttatgaagatgaggcctggtgacccagcaggttcattggatacataagaaatgagaattcctggttcatgggccaacctaggactctggagtatgcagacttggccattcgtccattgtggcctgcgggtcgcaccccaggcatactgaaaggccatactcgtggctggctgcctgcgggcctaagccttcccaggatcttcaggacacttgacagacttgtgttttctggtctgagctgcctccacaggtccctccagcaagcctcactgcacctctcccctgctgtttgtgtttggaattttgtcttctttagctgagaccaaattaaaccttggtgcataaagtgagcttaaaacttgccactgtttagtaagttagcccccatagaatgtgaccctgtctgcagagtctcatttacccctctttttctcattgtcatttgttggctttattagggctgtcttacaggatcatgttggcatttactatcatgtctttatcataaaccatgtttgtttgaggtagaagaatcaccatataattcgttgcccaaattgggactattgagagagaaaggggatgctattaattacaccagatcaaaaggcataaaccagacctgtcccaggccgatgtggaaatatgttctttctagttgtgggtaccctgatctaggtggtttgtaattgtgcattactgactgcatatgtttgtgtatgtgtaaatgtgggctccctgttaagtggggctcatggatacgaggcctgaggaagtgtggcttgctagtctgttacgttaacatgcttttctaaaattgcttcacgtgttaattcatttactcctgcattcattgactgtttttgttcttttccattcactttgtacttatttttttcattaaattttgcatttattttga

SEQ ID NO: 367359 - DNA, 4202 bp, Homo sapiens
gctggcaggtggtgatggagaactgcgggcactcgcgccagccaacactggcctcctggagactggtcaccacacagctgttctgaagggcccgcagggcttaagggaggaaagcggcttcccacaggggctctgtgggttcttttggggagaagagctgcccctcaagtagaggctggagttgttcctgcagagtggagagaggagagaaagactggatggcagggaggcctttcccagcaccaggagtgcagtcaacggagtagtcaggtggggacaactatgagtcacttctccctggcgatcttcatagcctgtttccacacccttagctggagtccagatgtcctggcttctggggctcaccctcgcccacccacctcattcacagccatgctatgtcacactgtggggatcccatccatccctgcttctccctgccccggcctatcttgggtaccatccttctcttgccaacctaggaactaagcaggtgaacccaacctggcgtcattctcgggatccatttcctcctgggatatttggggatgtgtatgcccaggcccttccttccttggtggcaatggagcctagccattagggccagcgggagtctgtgacccaggtactggcacccaaagtgactttgccctgcttcctgccatcttgttaaagaaaaggtagccaggattccctaggaaataagctgtggagaaaccactcagcaactgcagacaggggtctgtggccagttcagggtctgagggccagtgaaggtgggtgcaggcaggctgaaaggacaccagcacagccctcggggtgggggcttgtcactggtgtctggtctccctgcttttcccatgtggcctgggctccatgatacgttctccaggcctgggcctggaaaacaggtctttcctgttttctggacctgctagaaagcttcagtcagtttggtccctgggagagaaaacgctcttcccatgacggctctgtggaggccaggaatggggtaggtgggttgactgggagtactccttcctgccgccctggtcaagggactagtgtgagtcgggagtgcatttttggaatgggggcaggggtgtttttcatgaccatttatttgagtggttttgattggttatgcatactctttaaatttgaatccaaattttttgcaaaattacttcccaatcagatcttgacccttagcctgggacaccacaaactgaggtgaattctctgctttgctcgtcacaaatgccaaactgactgccctttcacggtgtccatcttgctgtcttttgcttctgtttgatttggtctgcatatcttttaatgtgtctgtttttgttttgtttgttttatttttatttttcagttaacgcacgcacagacttacatgtcaagagtggactttagactttcatgtgttaagttgcttgagttacaccttgtgacccttctcccataacatggtgtgaggacggactgggagccggtacagactccagtgtttacagccttgctttcctcccaccgaccctggccccaggctgccccgggcctggcgggccacccctctctatgcaaacacgtaaaagccatgaatgctggaatccaaaactgacgaggtttatttttttcagagccagtggctggtcttccatttacagtgtcactattccctgacggagctgttatgtgccgctctagcgaaggccccagccgggatgctaggcctaattgttcagcgtggagatggcaactcacgtggtgccctaggtgcagctgcgtggtctggtatacatgctgcaaaattcacccagttcccctcattttaatttttctaacctacagcttaattttaataactttaaaacacttctaaatatttattttggcaccagcgtcaagacaaataatatcctctcccattattttcataagtaacacagattccctgatttttaaaaactaaaaatacagctaaacctttcttatgtataaagtatgcctatcatatacagggagaggtgggtaataaacttcctgtaatgacagtgtttggcatttctttatggatggaattggaacatgaacaagaccatgtccagcgtttttactgtgaatgtaaatggaacagcagcccaaagctgttgtctgtgccccagaggtgctacctgtagacagggaccaactccatgtgtgtgtgttaagtgtttgactccaattaagactcccaagcgaatcctgcatattccaaatgtaaagagtactcagtgggaaaaaggttgttacctcaaagtcattgcttctttcctggctgggtcacagggtgaagagatgaaggtgtctgatgtatatagacaattagggaaaaatgagcggcaaaggagctttccccttcagctgcactctaaaggggaacattttaaggaagtactagcagctttgactcttctatgctcctgttggtttacaagccaccaagaatgtcagtgttgagaatacggcctggtaaaatgggagatgtaaaatgactaaatgaaaggaagggtagttttaatgttgaagcaccgtgctgggcactggagctacccagaggaatgcacaacgctcccctcaaggagctcacagtctagcctactccctggctggaagcctcaggaagacgtgctaatttattgtggaattggtagtttgcttttcatgcccctgtcttccttctcatgaccatttccccctttctgtctggcttgcattattgatttccaggaccaagtcctggcttcctcctgccttcctgagatgatgttctgctcagggagaagtggaggggtgagctgtgtgtgtccaccgaggcacggccaggaagaggcagcctttacctgtgaggggctccatgctccagcagcagagcaggttctagtgacaattcaactttttatgctatgaccaggggtggatctaaattttatggggctgaaagcttgaattatttagaaagacttctttaagaaaaacaatgttaatataaaattaggtacagggtcttggaaggggccctgaagattaagcttccttagcgtcacaataagtccgtatctggttgcaattgaaaactgatgcttcagtgagggtatctaaaaaggtaaactggcatatccagggcaaatgtgggctgccaatggctcatctctagggtaattttatgtctgaaagtgtatgcagttgggtcagagcatgacctttaagatagcctctctcagctaacatatttatgaagatgaggcctggtgacccagcaggttcattggatacataagaaatgagaattcctggttcatgggccaacctaggactctggagtatgcagacttggccattcgtccattgtggcctgcgggtcgcaccccaggcatactgaaaggccatactcgtggctggctgcctgcgggcctaagccttcccaggatcttcaggacacttgacagacttgtgttttctggtctgagctgcctccacaggtccctccagcaagcctcactgcacctctcccctgctgtttgtgtttggaattttgtcttctttagctgagaccaaattaaaccttggtgcataaagtgagcttaaaacttgccactgtttagtaagttagcccccatagaatgtgaccctgtctgcagagtctcatttacccctctttttctcattgtcatttgttggctttattagggctgtcttacaggatcatgttggcatttactatcatgtctttatcataaaccatgtttgtttgaggtagaagaatcaccatataattcgttgcccaaattgggactattgagagagaaaggggatgctattaattacaccagatcaaaaggcataaaccagacctgtcccaggccgatgtggaaatatgttctttctagttgtgggtaccctgatctaggtggtttgtaattgtgcattactgactgcatatgtttgtgtatgtgtaaatgtgggctccctgttaagtggggctcatggatacgaggcctgaggaagtgtggcttgctagtctgttacgttaacatgcttttctaaaattgcttcacgtgttaattcatttactcctgcattcattgactgtttttgttcttttccattcactttgtacttatttttttcattaaattttgcatttattttga

SEQ ID NO: 367360 - DNA, 4369 bp, Homo sapiens
gcggcggggctccggctgcgctcgtggccgggccgggcggggaggccggtcccgcgggcgggggcaggggcggctccgcggcttctcccgccgccgccgccaaggggagtttccaggaagtggccatattggatccattcagccgcagccgcccgggcggagcgcgtcccgcagccggctggtccctgtcgctgcccctgcgctcgtcccagcccacccgcccggtgcggagctcgccatggcggccaccgacctggagcgcttctcgaatgcagagccagagccccggagcctctccctgggcggccatgtgggtttcgacagcctccccgaccagctggtcagcaagtcggtcactcagggcttcagcttcaacatcctctgtgtgggggagaccggcattggcaaatccacactgatgaacacactcttcaacacgaccttcgagactgaggaagccagtcaccatgaggcatgcgtgcgcctgcggccccagacctatgacctccaggagagcaacgtgcagctcaagctgaccattgtggatgccgtgggctttggggatcagatcaataaggatgagagttacaggcccatagttgactacatcgatgcgcagtttgaaaattatctgcaggaggagctgaagatccgccgctcgctcttcgactaccatgacacaaggatccacgtttgcctctacttcatcacgcccacagggcactccctgaagtctctagatctagtgaccatgaagaaactagacagcaaggtgaacattattcccatcatcgccaaggctgacaccatctccaagagcgagctccacaagttcaagatcaagatcatgggcgagttggtcagcaacggggtccagatctaccagttccccacggatgatgaggctgttgcagagattaacgcagtcatgaatgcacatctgccctttgccgtggtgggcagcaccgaggaggtgaaggtggggaacaagctggtccgagcacggcagtacccctggggagtggtgcaggtggagaatgagaatcactgcgacttcgtgaagctgcgggagatgttgatccgggtgaacatggaagacctccgcgagcagacccacagccggcactacgagctctaccggcgctgcaagttggaggagatgggctttcaggacagcgatggtgacagccagcccttcagcctacaagagacatacgaggccaagaggaaggagttcctaagtgagctgcagaggaaggaggaagagatgaggcagatgtttgtcaacaaagtgaaggagacagagctggagctgaaggagaaggaaagggagctccatgagaagtttgagcacctgaagcgggtccaccaggaggagaagcgcaaggtggaggaaaagcgccgggaactggaggaggagaccaacgccttcaatcgccggaaggctgcggtggaggccctgcagtcgcaggccttgcacgccacctcgcagcagcccctgaggaaggacaaggacaagaagaattaacgcacgcacagacttacatgtcaagagtggactttagactttcatgtgttaagttgcttgagttacaccttgtgacccttctcccataacatggtgtgaggacggactgggagccggtacagactccagtgtttacagccttgctttcctcccaccgaccctggccccaggctgccccgggcctggcgggccacccctctctatgcaaacacgtaaaagccatgaatgctggaatccaaaactgacgaggtttatttttttcagagccagtggctggtcttccatttacagtgtcactattccctgacggagctgttatgtgccgctctagcgaaggccccagccgggatgctaggcctaattgttcagcgtggagatggcaactcacgtggtgccctaggtgcagctgcgtggtctggtatacatgctgcaaaattcacccagttcccctcattttaatttttctaacctacagcttaattttaataactttaaaacacttctaaatatttattttggcaccagcgtcaagacaaataatatcctctcccattattttcataagtaacacagattccctgatttttaaaaactaaaaatacagctaaacctttcttatgtataaagtatgcctatcatatacagggagaggtgggtaataaacttcctgtaatgacagtgtttggcatttctttatggatggaattggaacatgaacaagaccatgtccagcgtttttactgtgaatgtaaatggaacagcagcccaaagctgttgtctgtgccccagaggtgctacctgtagacagggaccaactccatgtgtgtgtgttaagtgtttgactccaattaagactcccaagcgaatcctgcatattccaaatgtaaagagtactcagtgggaaaaaggttgttacctcaaagtcattgcttctttcctggctgggtcacagggtgaagagatgaaggtgtctgatgtatatagacaattagggaaaaatgagcggcaaaggagctttccccttcagctgcactctaaaggggaacattttaaggaagtactagcagctttgactcttctatgctcctgttggtttacaagccaccaagaatgtcagtgttgagaatacggcctggtaaaatgggagatgtaaaatgactaaatgaaaggaagggtagttttaatgttgaagcaccgtgctgggcactggagctacccagaggaatgcacaacgctcccctcaaggagctcacagtctagcctactccctggctggaagcctcaggaagacgtgctaatttattgtggaattggtagtttgcttttcatgcccctgtcttccttctcatgaccatttccccctttctgtctggcttgcattattgatttccaggaccaagtcctggcttcctcctgccttcctgagatgatgttctgctcagggagaagtggaggggtgagctgtgtgtgtccaccgaggcacggccaggaagaggcagcctttacctgtgaggggctccatgctccagcagcagagcaggttctagtgacaattcaactttttatgctatgaccaggggtggatctaaattttatggggctgaaagcttgaattatttagaaagacttctttaagaaaaacaatgttaatataaaattaggtacagggtcttggaaggggccctgaagattaagcttccttagcgtcacaataagtccgtatctggttgcaattgaaaactgatgcttcagtgagggtatctaaaaaggtaaactggcatatccagggcaaatgtgggctgccaatggctcatctctagggtaattttatgtctgaaagtgtatgcagttgggtcagagcatgacctttaagatagcctctctcagctaacatatttatgaagatgaggcctggtgacccagcaggttcattggatacataagaaatgagaattcctggttcatgggccaacctaggactctggagtatgcagacttggccattcgtccattgtggcctgcgggtcgcaccccaggcatactgaaaggccatactcgtggctggctgcctgcgggcctaagccttcccaggatcttcaggacacttgacagacttgtgttttctggtctgagctgcctccacaggtccctccagcaagcctcactgcacctctcccctgctgtttgtgtttggaattttgtcttctttagctgagaccaaattaaaccttggtgcataaagtgagcttaaaacttgccactgtttagtaagttagcccccatagaatgtgaccctgtctgcagagtctcatttacccctctttttctcattgtcatttgttggctttattagggctgtcttacaggatcatgttggcatttactatcatgtctttatcataaaccatgtttgtttgaggtagaagaatcaccatataattcgttgcccaaattgggactattgagagagaaaggggatgctattaattacaccagatcaaaaggcataaaccagacctgtcccaggccgatgtggaaatatgttctttctagttgtgggtaccctgatctaggtggtttgtaattgtgcattactgactgcatatgtttgtgtatgtgtaaatgtgggctccctgttaagtggggctcatggatacgaggcctgaggaagtgtggcttgctagtctgttacgttaacatgcttttctaaaattgcttcacgtgttaattcatttactcctgcattcattgactgtttttgttcttttccattcactttgtacttatttttttcattaaattttgcatttattttgaaaaaaataagtacaaagtgaatgg

SEQ ID NO: 367361 - DNA, 2993 bp, Homo sapiens
aaactgtcaacctaccaaaaaacgataatgtggcttatgggtattgctgtctcattcttggtatattcttgtgttaactgcccatcggcctgaaaatactcattgtaagcctaaaaaaaaaatctttcacactgttttttctgcttgttgtaagaactaaaatgagcctcagttaacgcacgcacagacttacatgtcaagagtggactttagactttcatgtgttaagttgcttgagttacaccttgtgacccttctcccataacatggtgtgaggacggactgggagccggtacagactccagtgtttacagccttgctttcctcccaccgaccctggccccaggctgccccgggcctggcgggccacccctctctatgcaaacacgtaaaagccatgaatgctggaatccaaaactgacgaggtttatttttttcagagccagtggctggtcttccatttacagtgtcactattccctgacggagctgttatgtgccgctctagcgaaggccccagccgggatgctaggcctaattgttcagcgtggagatggcaactcacgtggtgccctaggtgcagctgcgtggtctggtatacatgctgcaaaattcacccagttcccctcattttaatttttctaacctacagcttaattttaataactttaaaacacttctaaatatttattttggcaccagcgtcaagacaaataatatcctctcccattattttcataagtaacacagattccctgatttttaaaaactaaaaatacagctaaacctttcttatgtataaagtatgcctatcatatacagggagaggtgggtaataaacttcctgtaatgacagtgtttggcatttctttatggatggaattggaacatgaacaagaccatgtccagcgtttttactgtgaatgtaaatggaacagcagcccaaagctgttgtctgtgccccagaggtgctacctgtagacagggaccaactccatgtgtgtgtgttaagtgtttgactccaattaagactcccaagcgaatcctgcatattccaaatgtaaagagtactcagtgggaaaaaggttgttacctcaaagtcattgcttctttcctggctgggtcacagggtgaagagatgaaggtgtctgatgtatatagacaattagggaaaaatgagcggcaaaggagctttccccttcagctgcactctaaaggggaacattttaaggaagtactagcagctttgactcttctatgctcctgttggtttacaagccaccaagaatgtcagtgttgagaatacggcctggtaaaatgggagatgtaaaatgactaaatgaaaggaagggtagttttaatgttgaagcaccgtgctgggcactggagctacccagaggaatgcacaacgctcccctcaaggagctcacagtctagcctactccctggctggaagcctcaggaagacgtgctaatttattgtggaattggtagtttgcttttcatgcccctgtcttccttctcatgaccatttccccctttctgtctggcttgcattattgatttccaggaccaagtcctggcttcctcctgccttcctgagatgatgttctgctcagggagaagtggaggggtgagctgtgtgtgtccaccgaggcacggccaggaagaggcagcctttacctgtgaggggctccatgctccagcagcagagcaggttctagtgacaattcaactttttatgctatgaccaggggtggatctaaattttatggggctgaaagcttgaattatttagaaagacttctttaagaaaaacaatgttaatataaaattaggtacagggtcttggaaggggccctgaagattaagcttccttagcgtcacaataagtccgtatctggttgcaattgaaaactgatgcttcagtgagggtatctaaaaaggtaaactggcatatccagggcaaatgtgggctgccaatggctcatctctagggtaattttatgtctgaaagtgtatgcagttgggtcagagcatgacctttaagatagcctctctcagctaacatatttatgaagatgaggcctggtgacccagcaggttcattggatacataagaaatgagaattcctggttcatgggccaacctaggactctggagtatgcagacttggccattcgtccattgtggcctgcgggtcgcaccccaggcatactgaaaggccatactcgtggctggctgcctgcgggcctaagccttcccaggatcttcaggacacttgacagacttgtgttttctggtctgagctgcctccacaggtccctccagcaagcctcactgcacctctcccctgctgtttgtgtttggaattttgtcttctttagctgagaccaaattaaaccttggtgcataaagtgagcttaaaacttgccactgtttagtaagttagcccccatagaatgtgaccctgtctgcagagtctcatttacccctctttttctcattgtcatttgttggctttattagggctgtcttacaggatcatgttggcatttactatcatgtctttatcataaaccatgtttgtttgaggtagaagaatcaccatataattcgttgcccaaattgggactattgagagagaaaggggatgctattaattacaccagatcaaaaggcataaaccagacctgtcccaggccgatgtggaaatatgttctttctagttgtgggtaccctgatctaggtggtttgtaattgtgcattactgactgcatatgtttgtgtatgtgtaaatgtgggctccctgttaagtggggctcatggatacgaggcctgaggaagtgtggcttgctagtctgttacgttaacatgcttttctaaaattgcttcacgtgttaattcatttactcctgcattcattgactgtttttgttcttttccattcactttgtacttatttttttcattaaattttgcatttattttga

SEQ ID NO: 367362 - DNA, 4641 bp, Homo sapiens
gcggcggggctccggctgcgctcgtggccgggccgggcggggaggccggtcccgcgggcgggggcaggggcggctccgcggcttctcccgccgccgccgccaaggggagtttccaggaagtggccatattggatccattcagccgcagccgcccgggcggagcgcgtcccgcagccggctggtccctgtcgctgcccctgcgctcgtcccagcccacccgcccggtgcggagctcgccatggcggccaccgacctggagcgcttctcgaatgcagagccagagccccggagcctctccctgggcggccatgtgggtttcgacagcctccccgaccagctggtcagcaagtcggtcactcagggcttcagcttcaacatcctctgtgtgggggagaccggcattggcaaatccacactgatgaacacactcttcaacacgaccttcgagactgaggaagccagtcaccatgaggcatgcgtgcgcctgcggccccagacctatgacctccaggagagcaacgtgcagctcaagctgaccattgtggatgccgtgggctttggggatcagatcaataaggatgagagttacaggcccatagttgactacatcgatgcgcagtttgaaaattatctgcaggaggagctgaagatccgccgctcgctcttcgactaccatgacacaaggatccacgtttgcctctacttcatcacgcccacagggcactccctgaagtctctagatctagtgaccatgaagaaactagacagcaaggtgaacattattcccatcatcgccaaggctgacaccatctccaagagcgagctccacaagttcaagatcaagatcatgggcgagttggtcagcaacggggtccagatctaccagttccccacggatgatgaggctgttgcagagattaacgcagtcatgaatgcacatctgccctttgccgtggtgggcagcaccgaggaggtgaaggtggggaacaagctggtccgagcacggcagtacccctggggagtggtgcaggtggagaatgagaatcactgcgacttcgtgaagctgcgggagatgttgatccgggtgaacatggaagacctccgcgagcagacccacagccggcactacgagctctaccggcgctgcaagttggaggagatgggctttcaggacagcgatggtgacagccagcccttcagcctacaagagacatacgaggccaagaggaaggagttcctaagtgagctgcagaggaaggaggaagagatgaggcagatgtttgtcaacaaagtgaaggagacagagctggagctgaaggagaaggaaagggagctccatgagaagtttgagcacctgaagcgggtccaccaggaggagaagcgcaaggtggaggaaaagcgccgggaactggaggaggagaccaacgccttcaatcgccggaaggctgcggtggaggccctgcagtcgcaggccttgcacgccacctcgcagcagcccctgaggaaggacaaggacaagaagaattaacgcacgcacagacttacatgtcaagagtggactttagactttcatgtgttaagttgcttgagttacaccttgtgacccttctcccataacatggtgtgaggacggactgggagccggtacagactccagtgtttacagccttgctttcctcccaccgaccctggccccaggctgccccgggcctggcgggccacccctctctatgcaaacacgtaaaagccatgaatgctggaatccaaaactgacgaggtttatttttttcagagccagtggctggtcttccatttacagtgtcactattccctgacggagctgttatgtgccgctctagcgaaggccccagccgggatgctaggcctaattgttcagcgtggagatggcaactcacgtggtgccctaggtgcagctgcgtggtctggtatacatgctgcaaaattcacccagttcccctcattttaatttttctaacctacagcttaattttaataactttaaaacacttctaaatatttattttggcaccagcgtcaagacaaataatatcctctcccattattttcataagtaacacagattccctgatttttaaaaactaaaaatacagctaaacctttcttatgtataaagtatgcctatcatatacagggagaggtgggtaataaacttcctgtaatgacagtgtttggcatttctttatggatggaattggaacatgaacaagaccatgtccagcgtttttactgtgaatgtaaatggaacagcagcccaaagctgttgtctgtgccccagaggtgctacctgtagacagggaccaactccatgtgtgtgtgttaagtgtttgactccaattaagactcccaagcgaatcctgcatattccaaatgtaaagagtactcagtgggaaaaaggttgttacctcaaagtcattgcttctttcctggctgggtcacagggtgaagagatgaaggtgtctgatgtatatagacaattagggaaaaatgagcggcaaaggagctttccccttcagctgcactctaaaggggaacattttaaggaagtactagcagctttgactcttctatgctcctgttggtttacaagccaccaagaatgtcagtgttgagaatacggcctggtaaaatgggagatgtaaaatgactaaatgaaaggaagggtagttttaatgttgaagcaccgtgctgggcactggagctacccagaggaatgcacaacgctcccctcaaggagctcacagtctagcctactccctggctggaagcctcaggaagacgtgctaatttattgtggaattggtagtttgcttttcatgcccctgtcttccttctcatgaccatttccccctttctgtctggcttgcattattgatttccaggaccaagtcctggcttcctcctgccttcctgagatgatgttctgctcagggagaagtggaggggtgagctgtgtgtgtccaccgaggcacggccaggaagaggcagcctttacctgtgaggggctccatgctccagcagcagagcaggttctagtgacaattcaactttttatgctatgaccaggggtggatctaaattttatggggctgaaagcttgaattatttagaaagacttctttaagaaaaacaatgttaatataaaattaggtacagggtcttggaaggggccctgaagattaagcttccttagcgtcacaataagtccgtatctggttgcaattgaaaactgatgcttcagtgagggtatctaaaaaggtaaactggcatatccagggcaaatgtgggctgccaatggctcatctctagggtaattttatgtctgaaagtgtatgcagttgggtcagagcatgacctttaagatagcctctctcagctaacatatttatgaagatgaggcctggtgacccagcaggttcattggatacataagaaatgagaattcctggttcatgggccaacctaggactctggagtatgcagacttggccattcgtccattgtggcctgcgggtcgcaccccaggcatactgaaaggccatactcgtggctggctgcctgcgggcctaagccttcccaggatcttcaggacacttgacagacttgtgttttctggtctgagctgcctccacaggtccctccagcaagcctcactgcacctctcccctgctgtttgtgtttggaattttgtcttctttagctgagaccaaattaaaccttggtgcataaagtgagcttaaaacttgccactgtttagtaagttagcccccatagaatgtgaccctgtctgcagagtctcatttacccctctttttctcattgtcatttgttggctttattagggctgtcttacaggatcatgttggcatttactatcatgtctttatcataaaccatgtttgtttgaggtagaagaatcaccatataattcgttgcccaaattgggactattgagagagaaaggggatgctattaattacaccagatcaaaaggcataaaccagacctgtcccaggccgatgtggaaatatgttctttctagttgtgggtaccctgatctaggtggtttgtaattgtgcattactgactgcatatgtttgtgtatgtgtaaatgtgggctccctgttaagtggggctcatggatacgaggcctgaggaagtgtggcttgctagtctgttacgttaacatgcttttctaaaattgcttcacgtgttaattcatttactcctgcattcattgactgtttttgttcttttccattcactttgtacttatttttttcattaaattttgcatttattttgacgatgacagctgtgtctttccttctgagcctgccttttctcccccccaccgagggggtgtccctcgttgaacaatactcccgcgggaggtcgccccttgtggcttgtacgccccttagtgactcttgacaggtggtgccgccgctttaagggcggcgcatatccatcaccttagactttggctccctgtttgccataattcccggttcgtggtaccactccgcgcactgttgcctcctctggggagaggacccccccctttgggggggggcgcctactcgggccactccccccaga

SEQ ID NO: 367363 - DNA, 2897 bp, Homo sapiens
gcggcggggctccggctgcgctcgtggccgggccgggcggggaggccggtcccgcgggcgggggcaggggcggctccgcggcttctcccgccgccgccgccaaggggagtttccaggaagtggccatattggatccattcagccgcagccgcccgggcggagcgcgtcccgcagccggctggtccctgtcgctgcccctgcgctcgtcccagcccacccgcccggtgcggagctcgccatggcggccaccgacctggagcgcttctcgaatgcagagccagagccccggagcctctccctgggcggccatgtgggtttcgacagcctccccgaccagctggtcagcaagtcggtcactcagggcttcagcttcaacatcctctgtgtgggggagaccggcattggcaaatccacactgatgaacacactcttcaacacgaccttcgagactgaggaagccagtcaccatgaggcatgcgtgcgcctgcggccccagacctatgacctccaggagagcaacgtgcagctcaagctgaccattgtggatgccgtgggctttggggatcagatcaataaggatgagagttacaggcccatagttgactacatcgatgcgcagtttgaaaattatctgcaggaggagctgaagatccgccgctcgctcttcgactaccatgacacaaggatccacgtttgcctctacttcatcacgcccacagggcactccctgaagtctctagatctagtgaccatgaagaaactagacagcaaggtgaacattattcccatcatcgccaaggctgacaccatctccaagagcgagctccacaagttcaagatcaagatcatgggcgagttggtcagcaacggggtccagatctaccagttccccacggatgatgaggctgttgcagagattaacgcagtcatgaatgcacatctgccctttgccgtggtgggcagcaccgaggaggtgaaggtggggaacaagctggtccgagcacggcagtacccctggggagtggtgcaggtggagaatgagaatcactgcgacttcgtgaagctgcgggagatgttgatccgggtgaacatggaagacctccgcgagcagacccacagccggcactacgagctctaccggcgctgcaagttggaggagatgggctttcaggacagcgatggtgacagccagcccttcagcctacaagagacatacgaggccaagaggaaggagttcctaagtgagctgcagaggaaggaggaagagatgaggcagatgtttgtcaacaaagtgaaggagacagagctggagctgaaggagaaggaaagggagctccatgagaagtttgagcacctgaagcgggtccaccaggaggagaagcgcaaggtggaggaaaagcgccgggaactggaggaggagaccaacgccttcaatcgccggaaggctgcggtggaggccctgcagtcgcaggccttgcacgccacctcgcagcagcccctgaggaaggacaaggacaagaagaacagatcagatataggagcacaccagccgggcatgagcctctccagctctaaggtgatgatgaccaaggccagtgtggagcccttgaactgcagcagctggtggcccgccatacagtgctgcagctgcctggtcagggatgcgacgtggagggaaggattcctctgaggcagcagctccaacacatggggccagctcaggaccaccagggcatggaactggagaccatggtttttaatgttagaacagaaaacgccatacttttcctatatcaatgatcaaaagtgcaaacaatttaaatttccatcagggaacatcaaatgttgcccaacccttttcattcctatccatggctccgtaaggggcttgaggcttaatgcccatcctgtggccaagctgagcttccactccgggaccaaaaaaaaaaaaaaggtctgctttgtgacatcatcgttatgagcggaaagtacctagatgacaatgtttccattctgaaaaatagaaacatactattcaagaccaaggtagcagaaaagttacttgtatctgcttatcataagacgaaactctgcaacttggcaacggtggccagttttcgtaatgaaacagtctttagtaatttaatcttcatgcttcataacaaaccaaaaccccatgagatttccacatggcataattttgccttactaacagaatcatatccttaaggatgaccatcattcccccaactaaaacaaatacaaactaatgtatgatatttttttaagtgccagatcaatatggtctaaagcttcaataaggattgtgtgtaggtgaataaagacagctaagtgaatgtgtgtaaagtgtagcaaaagcagacagatatttatgtacagtattcatagaatggaaagttaaatatttttgcagtgtgtatttaaaagagaaactcaccataatagtgccgtctaaaaatctttgtaaagttaatttaatgtcctttagaagtgggagtctggtggaactgtgttggatttaagataccttttcactcttccgtatgtcatgagccttgtgcgtcacctcactgtggtgcatgtgcaagggcgtgtgcacgcctgtgctttgccatcccatgttgtaaacagctgttccaaaggcacaaacgagtttagggtagactctgtaaacacctccttactcactatagtcaagaagtccagcggcgtcccaatatagaggtcccagtgcagtctgtccagaatagccagctccatcctcagcagctcattcggggaatagtcagagccatagtgctttgtgaagtcttttacttgtggaataaactgtaaaaagaaaataaagaggccaaagccctacatcaaaaaaaata

SEQ ID NO: 367364 - DNA, 1938 bp, Homo sapiens
gcggcggggctccggctgcgctcgtggccgggccgggcggggaggccggtcccgcgggcgggggcaggggcggctccgcggcttctcccgccgccgccgccaaggggagtttccaggaagtggccatattggatccattcagccgcagccgcccgggcggagcgcgtcccgcagccggctggtccctgtcgctgcccctgcgctcgtcccagcccacccgcccggtgcggagctcgccatggcggccaccgacctggagcgcttctcgaatgcagagccagagccccggagcctctccctgggcggccatgtgggtttcgacagcctccccgaccagctggtcagcaagtcggtcactcagggcttcagcttcaacatcctctgtgtgggggagaccggcattggcaaatccacactgatgaacacactcttcaacacgaccttcgagactgaggaagccagtcaccatgaggcatgcgtgcgcctgcggccccagacctatgacctccaggagagcaacgtgcagctcaagctgaccattgtggatgccgtgggctttggggatcagatcaataaggatgagagttacaggcccatagttgactacatcgatgcgcagtttgaaaattatctgcaggaggagctgaagatccgccgctcgctcttcgactaccatgacacaaggatccacgtttgcctctacttcatcacgcccacagggcactccctgaagtctctagatctagtgaccatgaagaaactagacagcaaggtgaacattattcccatcatcgccaaggctgacaccatctccaagagcgagctccacaagttcaagatcaagatcatgggcgagttggtcagcaacggggtccagatctaccagttccccacggatgatgaggctgttgcagagattaacgcagtcatgaatgcacatctgccctttgccgtggtgggcagcaccgaggaggtgaaggtggggaacaagctggtccgagcacggcagtacccctggggagtggtgcaggtggagaatgagaatcactgcgacttcgtgaagctgcgggagatgttgatccgggtgaacatggaagacctccgcgagcagacccacagccggcactacgagctctaccggcgctgcaagttggaggagatgggctttcaggacagcgatggtgacagccagcccttcagcctacaagagacatacgaggccaagaggaaggagttcctaagtgagctgcagaggaaggaggaagagatgaggcagatgtttgtcaacaaagtgaaggagacagagctggagctgaaggagaaggaaagggagctccatgagaagtttgagcacctgaagcgggtccaccaggaggagaagcgcaaggtggaggaaaagcgccgggaactggaggaggagaccaacgccttcaatcgccggaaggctgcggtggaggccctgcagtcgcaggccttgcacgccacctcgcagcagcccctgaggaaggacaaggacaagaagaaagccagtggctggtcttccatttacagtgtcactattccctgacggagctgttatgtgccgctctagcgaaggccccagccgggatgctaggcctaattgttcagcgtggagatggcaactcacgtggtgccctaggtgcagctgcgtggtctggtatacatgctgcaaaattcacccagttcccctcattttaatttttctaacctacagcttaattttaataactttaaaacacttctaaatatttattttggcaccagcgtcaagacaaataatatcctctcccattattttcataagtaacacagattccctgatttttaaaaactaaaaatacagctaaacctttcttatgtataaagtatgcctatcatatacagggagaggtgggtaataaacttcctgtaatgaca

SEQ ID NO: 367365 - DNA, 2789 bp, Homo sapiens
gcggcggggctccggctgcgctcgtggccgggccgggcggggaggccggtcccgcgggcgggggcaggggcggctccgcggcttctcccgccgccgccgccaaggggagtttccaggaagtggccatattggatccattcagccgcagccgcccgggcggagcgcgtcccgcagccggctggtccctgtcgctgcccctgcgctcgtcccagcccacccgcccggtgcggagctcgccatggcggccaccgacctggagcgcttctcgaatgcagagccagagccccggagcctctccctgggcggccatgtgggtttcgacagcctccccgaccagctggtcagcaagtcggtcactcagggcttcagcttcaacatcctctgtgtgggggagaccggcattggcaaatccacactgatgaacacactcttcaacacgaccttcgagactgaggaagccagtcaccatgaggcatgcgtgcgcctgcggccccagacctatgacctccaggagagcaacgtgcagctcaagctgaccattgtggatgccgtgggctttggggatcagatcaataaggatgagagttacaggcccatagttgactacatcgatgcgcagtttgaaaattatctgcaggaggagctgaagatccgccgctcgctcttcgactaccatgacacaaggatccacgtttgcctctacttcatcacgcccacagggcactccctgaagtctctagatctagtgaccatgaagaaactagacagcaaggtgaacattattcccatcatcgccaaggctgacaccatctccaagagcgagctccacaagttcaagatcaagatcatgggcgagttggtcagcaacggggtccagatctaccagttccccacggatgatgaggctgttgcagagattaacgcagtcatgaatgcacatctgccctttgccgtggtgggcagcaccgaggaggtgaaggtggggaacaagctggtccgagcacggcagtacccctggggagtggtgcaggtggagaatgagaatcactgcgacttcgtgaagctgcgggagatgttgatccgggtgaacatggaagacctccgcgagcagacccacagccggcactacgagctctaccggcgctgcaagttggaggagatgggctttcaggacagcgatggtgacagccagcccttcagcctacaagagacatacgaggccaagaggaaggagttcctaagtgagctgcagaggaaggaggaagagatgaggcagatgtttgtcaacaaagtgaaggagacagagctggagctgaaggagaaggaaagggagctccatgagaagtttgagcacctgaagcgggtccaccaggaggagaagcgcaaggtggaggaaaagcgccgggaactggaggaggagaccaacgccttcaatcgccggaaggctgcggtggaggccctgcagtcgcaggccttgcacgccacctcgcagcagcccctgaggaaggacaaggacaagaagaattaacgcacgcacagacttacatgtcaagagtggactttagactttcatgtgttaagttgcttgagttacaccttgtgacccttctcccataacatggtgtgaggacggactgggagccggtacagactccagtgtttacagccttgctttcctcccaccgaccctggccccaggctgccccgggcctggcgggccacccctctctatgcaaacacgtaaaagccatgaatgctggaatccaaaactgacgaggtttatttttttcagagccagtggctggtcttccatttacagtgtcactattccctgacggagctgttatgtgccgctctagcgaaggccccagccgggatgctaggcctaattgttcagcgtggagatggcaactcacgtggtgccctaggtgcagctgcgtggtctggtatacatgctgcaaaattcacccagttcccctcattttaatttttctaacctacagcttaattttaataactttaaaacacttctaaatatttattttggcaccagcgtcaagacaaataatatcctctcccattattttcataagtaacacagattccctgatttttaaaaactaaaaatacagctaaacctttcttatgtataaagtatgcctatcatatacagggagaggtgggtaataaacttcctgtaatgacaaaaaaaaaaaaaaaaaaaaaaaaaaaaaaaaaaaaaaaaaaaaaaaaaaaaaaaaaaaaaaaaaaaaaaaaaaaaaaaaaaaaaaaaaaaaaaaaagagaacagagaggagcggacaacagcagcacccggagacagcagcagcgacgaacaacagccaccacacgccaccgacgacaagcgagggcacacaaaggaaagagcgaaacaagaccgacacgggcagaccacgaaagagagagacagagcacaaaacgggggcacacacacaaaacaacagagacaaaagaaacacgggacagacacgtgggacaaaatgacgagcgcacgcaacgacaacacgcaagccaagcagacacacactcgcaggagaaccaacaaacgaaaacacacggtagagacagagcaacatagacgacgaaaacaagacacacgaacgaccgagaggcaaacgaggaacaaacgacggacgagcactcgcagcgagaagagaccacgagagcaacagagacacctagacgcgaaggaggcagcaagaagaaaggaaagaagccgagcggagagaaagaggaagaaaccaacga

SEQ ID NO: 367366 - DNA, 186 bp, Homo sapiens
catgcgtgcgcctgcggccccagacctatgacctccaggagagcaacgtgcagctcaagctgaccattgtggatgccgtgggctttggggatcagatcaataaggatgagaggcaagaggcgggaagggcggccccacccagcctcctcccaccccacctacattggcccctataacagtagccca

SEQ ID NO: 367367 - DNA, 4077 bp, Homo sapiens
gcggcggggctccggctgcgctcgtggccgggccgggcggggaggccggtcccgcgggcgggggcaggggcggctccgcggcttctcccgccgccgccgccaaggggagtttccaggaagtggccatattggatccattcagccgcagccgcccgggcggagcgcgtcccgcagccggctggtccctgtcgctgcccctgcgctcgtcccagcccacccgcccggtgcggagctcgccatggcggccaccgacctggagcgcttctcgaatgcagagccagagccccggagcctctccctgggcggccatgtgggtttcgacagcctccccgaccagctggtcagcaagtcggtcactcagggcttcagcttcaacatcctctgtgtgggggagaccggcattggcaaatccacactgatgaacacactcttcaacacgaccttcgagactgaggaagccagtcaccatgaggcatgcgtgcgcctgcggccccagacctatgacctccaggagagcaacgtgcagctcaagctgaccattgtggatgccgtgggctttggggatcagatcaataaggatgagagttacaggcccatagttgactacatcgatgcgcagtttgaaaattatctgcaggaggagctgaagatccgccgctcgctcttcgactaccatgacacaaggatccacgtttgcctctacttcatcacgcccacagggcactccctgaagtctctagatctagtgaccatgaagaaactagacagcaaggtgaacattattcccatcatcgccaaggctgacaccatctccaagagcgagctccacaagttcaagatcaagatcatgggcgagttggtcagcaacggggtccagatctaccagttccccacggatgatgaggctgttgcagagattaacgcagtcatgaatgcacatctgccctttgccgtggtgggcagcaccgaggaggtgaaggtggggaacaagctggtccgagcacggcagtacccctggggagtggtgcaggtggagaatgagaatcactgcgacttcgtgaagctgcgggagatgttgatccgggtgaacatggaagacctccgcgagcagacccacagccggcactacgagctctaccggcgctgcaagttggaggagatgggctttcaggacagcgatggtgacagccagcccttcagcctacaagagacatacgaggccaagaggaaggagttcctaagtgagctgcagaggaaggaggaagagatgaggcagatgtttgtcaacaaagtgaaggagacagagctggagctgaaggagaaggaaagggagctccatgagaagtttgagcacctgaagcgggtccaccaggaggagaagcgcaaggtggaggaaaagcgccgggaactggaggaggagaccaacgccttcaatcgccggaaggctgcggtggaggccctgcagtcgcaggccttgcacgccacctcgcagcagcccctgaggaaggacaaggacaagaagaaagccagtggctggtcttccatttacagtgtcactattccctgacggagctgttatgtgccgctctagcgaaggccccagccgggatgctaggcctaattgttcagcgtggagatggcaactcacgtggtgccctaggtgcagctgcgtggtctggtatacatgctgcaaaattcacccagttcccctcattttaatttttctaacctacagcttaattttaataactttaaaacacttctaaatatttattttggcaccagcgtcaagacaaataatatcctctcccattattttcataagtaacacagattccctgatttttaaaaactaaaaatacagctaaacctttcttatgtataaagtatgcctatcatatacagggagaggtgggtaataaacttcctgtaatgacagtgtttggcatttctttatggatggaattggaacatgaacaagaccatgtccagcgtttttactgtgaatgtaaatggaacagcagcccaaagctgttgtctgtgccccagaggtgctacctgtagacagggaccaactccatgtgtgtgtgttaagtgtttgactccaattaagactcccaagcgaatcctgcatattccaaatgtaaagagtactcagtgggaaaaaggttgttacctcaaagtcattgcttctttcctggctgggtcacagggtgaagagatgaaggtgtctgatgtatatagacaattagggaaaaatgagcggcaaaggagctttccccttcagctgcactctaaaggggaacattttaaggaagtactagcagctttgactcttctatgctcctgttggtttacaagccaccaagaatgtcagtgttgagaatacggcctggtaaaatgggagatgtaaaatgactaaatgaaaggaagggtagttttaatgttgaagcaccgtgctgggcactggagctacccagaggaatgcacaacgctcccctcaaggagctcacagtctagcctactccctggctggaagcctcaggaagacgtgctaatttattgtggaattggtagtttgcttttcatgcccctgtcttccttctcatgaccatttccccctttctgtctggcttgcattattgatttccaggaccaagtcctggcttcctcctgccttcctgagatgatgttctgctcagggagaagtggaggggtgagctgtgtgtgtccaccgaggcacggccaggaagaggcagcctttacctgtgaggggctccatgctccagcagcagagcaggttctagtgacaattcaactttttatgctatgaccaggggtggatctaaattttatggggctgaaagcttgaattatttagaaagacttctttaagaaaaacaatgttaatataaaattaggtacagggtcttggaaggggccctgaagattaagcttccttagcgtcacaataagtccgtatctggttgcaattgaaaactgatgcttcagtgagggtatctaaaaaggtaaactggcatatccagggcaaatgtgggctgccaatggctcatctctagggtaattttatgtctgaaagtgtatgcagttgggtcagagcatgacctttaagatagcctctctcagctaacatatttatgaagatgaggcctggtgacccagcaggttcattggatacataagaaatgagaattcctggttcatgggccaacctaggactctggagtatgcagacttggccattcgtccattgtggcctgcgggtcgcaccccaggcatactgaaaggccatactcgtggctggctgcctgcgggcctaagccttcccaggatcttcaggacacttgacagacttgtgttttctggtctgagctgcctccacaggtccctccagcaagcctcactgcacctctcccctgctgtttgtgtttggaattttgtcttctttagctgagaccaaattaaaccttggtgcataaagtgagcttaaaacttgccactgtttagtaagttagcccccatagaatgtgaccctgtctgcagagtctcatttacccctctttttctcattgtcatttgttggctttattagggctgtcttacaggatcatgttggcatttactatcatgtctttatcataaaccatgtttgtttgaggtagaagaatcaccatataattcgttgcccaaattgggactattgagagagaaaggggatgctattaattacaccagatcaaaaggcataaaccagacctgtcccaggccgatgtggaaatatgttctttctagttgtgggtaccctgatctaggtggtttgtaattgtgcattactgactgcatatgtttgtgtatgtgtaaatgtgggctccctgttaagtggggctcatggatacgaggcctgaggaagtgtggcttgctagtctgttacgttaacatgcttttctaaaattgcttcacgtgttaattcatttactcctgcattcattgactgtttttgttcttttccattcactttgtacttatttttttcattaaattttgcatttattttga

SEQ ID NO: 367368 - DNA, 3064 bp, Homo sapiens
ccggccctctgctttcagtggagaatgagaatcactgcgacttcgtgaagctgcgggagatgttgatccgggtgaacatggaagacctccgcgagcagacccacagccggcactacgagctctaccggcgctgcaagttggaggagatgggctttcaggacagcgatggtgacagccagcccttcagcctacaagagacatacgaggccaagaggaaggagttcctaagtgagctgcagaggaaggaggaagagatgaggcagatgtttgtcaacaaagtgaaggagacagagctggagctgaaggagaaggaaagggagctccatgagaagtttgagcacctgaagcgggtccaccaggaggagaagcgcaaggtggaggaaaagcgccgggaactggaggaggagaccaacgccttcaatcgccggaaggctgcggtggaggccctgcagtcgcaggccttgcacgccacctcgcagcagcccctgaggaaggacaaggacaagaagaaagccagtggctggtcttccatttacagtgtcactattccctgacggagctgttatgtgccgctctagcgaaggccccagccgggatgctaggcctaattgttcagcgtggagatggcaactcacgtggtgccctaggtgcagctgcgtggtctggtatacatgctgcaaaattcacccagttcccctcattttaatttttctaacctacagcttaattttaataactttaaaacacttctaaatatttattttggcaccagcgtcaagacaaataatatcctctcccattattttcataagtaacacagattccctgatttttaaaaactaaaaatacagctaaacctttcttatgtataaagtatgcctatcatatacagggagaggtgggtaataaacttcctgtaatgacagtgtttggcatttctttatggatggaattggaacatgaacaagaccatgtccagcgtttttactgtgaatgtaaatggaacagcagcccaaagctgttgtctgtgccccagaggtgctacctgtagacagggaccaactccatgtgtgtgtgttaagtgtttgactccaattaagactcccaagcgaatcctgcatattccaaatgtaaagagtactcagtgggaaaaaggttgttacctcaaagtcattgcttctttcctggctgggtcacagggtgaagagatgaaggtgtctgatgtatatagacaattagggaaaaatgagcggcaaaggagctttccccttcagctgcactctaaaggggaacattttaaggaagtactagcagctttgactcttctatgctcctgttggtttacaagccaccaagaatgtcagtgttgagaatacggcctggtaaaatgggagatgtaaaatgactaaatgaaaggaagggtagttttaatgttgaagcaccgtgctgggcactggagctacccagaggaatgcacaacgctcccctcaaggagctcacagtctagcctactccctggctggaagcctcaggaagacgtgctaatttattgtggaattggtagtttgcttttcatgcccctgtcttccttctcatgaccatttccccctttctgtctggcttgcattattgatttccaggaccaagtcctggcttcctcctgccttcctgagatgatgttctgctcagggagaagtggaggggtgagctgtgtgtgtccaccgaggcacggccaggaagaggcagcctttacctgtgaggggctccatgctccagcagcagagcaggttctagtgacaattcaactttttatgctatgaccaggggtggatctaaattttatggggctgaaagcttgaattatttagaaagacttctttaagaaaaacaatgttaatataaaattaggtacagggtcttggaaggggccctgaagattaagcttccttagcgtcacaataagtccgtatctggttgcaattgaaaactgatgcttcagtgagggtatctaaaaaggtaaactggcatatccagggcaaatgtgggctgccaatggctcatctctagggtaattttatgtctgaaagtgtatgcagttgggtcagagcatgacctttaagatagcctctctcagctaacatatttatgaagatgaggcctggtgacccagcaggttcattggatacataagaaatgagaattcctggttcatgggccaacctaggactctggagtatgcagacttggccattcgtccattgtggcctgcgggtcgcaccccaggcatactgaaaggccatactcgtggctggctgcctgcgggcctaagccttcccaggatcttcaggacacttgacagacttgtgttttctggtctgagctgcctccacaggtccctccagcaagcctcactgcacctctcccctgctgtttgtgtttggaattttgtcttctttagctgagaccaaattaaaccttggtgcataaagtgagcttaaaacttgccactgtttagtaagttagcccccatagaatgtgaccctgtctgcagagtctcatttacccctctttttctcattgtcatttgttggctttattagggctgtcttacaggatcatgttggcatttactatcatgtctttatcataaaccatgtttgtttgaggtagaagaatcaccatataattcgttgcccaaattgggactattgagagagaaaggggatgctattaattacaccagatcaaaaggcataaaccagacctgtcccaggccgatgtggaaatatgttctttctagttgtgggtaccctgatctaggtggtttgtaattgtgcattactgactgcatatgtttgtgtatgtgtaaatgtgggctccctgttaagtggggctcatggatacgaggcctgaggaagtgtggcttgctagtctgttacgttaacatgcttttctaaaattgcttcacgtgttaattcatttactcctgcattcattgactgtttttgttcttttccattcactttgtacttatttttttcattaaattttgcatttattttga

SEQ ID NO: 367369 - DNA, 1261 bp, Homo sapiens
gatgcttcagtgagggtatctaaaaaggtaaactggcatatccagggcaaatgtgggctgccaatggctcatctctagggtaattttatgttgatccgggtgaacatggaagacctccgcgagcagacccacagccggcactacgagctctaccggcgctgcaagttggaggagatgggctttcaggacagcgatggtgacagccagcccttcagcctacaagagacatacgaggccaagaggaaggagttcctaagtgagctgcagaggaaggaggaagagatgaggcagatgtttgtcaacaaagtgaaggagacagagctggagctgaaggagaaggaaagggagatgaggcctggtgacccagcaggttcattggatacataagaaatgagaattcctggttcatgggccaacctaggactctggagtatgcagacttggccattcgtccattgtggcctgcgggtcgcaccccaggcatactgaaaggccatactcgtggctggctgcctgcgggcctaagccttcccaggatcttcaggacacttgacagacttgtgttttctggtctgagctgcctccacaggtccctccagcaagcctcactgcacctctcccctgctgtttgtgtttggaattttgtcttctttagctgagaccaaattaaaccttggtgcataaagtgagcttaaaacttgccactgtttagtaagttagcccccatagaatgtgaccctgtctgcagagtctcatttacccctctttttctcattgtcatttgttggctttattagggctgtcttacaggatcatgttggcatttactatcatgtctttatcataaaccatgtttgtttgaggtagaagaatcaccatataattcgttgcccaaattgggactattgagagagaaaggggatgctattaattacaccagatcaaaaggcataaaccagacctgtcccaggccgatgtggaaatatgttctttctagttgtgggtaccctgatctaggtggtttgtaattgtgcattactgactgcatatgtttgtgtatgtgtaaatgtgggctccctgttaagtggggctcatggatacgaggcctgaggaagtgtggcttgctagtctgttacgttaacatgcttttctaaaattgcttcacgtgttaattcatttactcctgcattcattgactgtttttgttcttttccattcactttgtacttatttttttcattaaattttgcatttattttga

SEQ ID NO: 367370 - DNA, 2206 bp, Homo sapiens
gcggcggggctccggctgcgctcgtggccgggccgggcggggaggccggtcccgcgggcgggggcaggggcggctccgcggcttctcccgccgccgccgccaaggggagtttccaggaagtggccatattggatccattcagccgcagccgcccgggcggagcgcgtcccgcagccggctggtccctgtcgctgcccctgcgctcgtcccagcccacccgcccggtgcggagctcgccatggcggccaccgacctggagcgcttctcgaatgcagagccagagccccggagcctctccctgggcggccatgtgggtttcgacagcctccccgaccagctggtcagcaagtcggtcactcagggcttcagcttcaacatcctctgtgtgggggagaccggcattggcaaatccacactgatgaacacactcttcaacacgaccttcgagactgaggaagccagtcaccatgaggcatgcgtgcgcctgcggccccagacctatgacctccaggagagcaacgtgcagctcaagctgaccattgtggatgccgtgggctttggggatcagatcaataaggatgagagttacaggcccatagttgactacatcgatgcgcagtttgaaaattatctgcaggaggagctgaagatccgccgctcgctcttcgactaccatgacacaaggatccacgtttgcctctacttcatcacgcccacagggcactccctgaagtctctagatctagtgaccatgaagaaactagacagcaaggtgaacattattcccatcatcgccaaggctgacaccatctccaagagcgagctccacaagttcaagatcaagatcatgggcgagttggtcagcaacggggtccagatctaccagttccccacggatgatgaggctgttgcagagattaacgcagtcatgaatgcacatctgccctttgccgtggtgggcagcaccgaggaggtgaaggtggggaacaagctggtccgagcacggcagtacccctggggagtggtgcaggtggagaatgagaatcactgcgacttcgtgaagctgcgggagatgttgatccgggtgaacatggaagacctccgcgagcagacccacagccggcactacgagctctaccggcgctgcaagttggaggagatgggctttcaggacagcgatggtgacagccagcccttcagcctacaagagacatacgaggccaagaggaaggagttcctaagtgagctgcagaggaaggaggaagagatgaggcagatgtttgtcaacaaagtgaaggagacagagctggagctgaaggagaaggaaagggagctccatgagaagtttgagcacctgaagcgggtccaccaggaggagaagcgcaaggtggaggaaaagcgccgggaactggaggaggagaccaacgccttcaatcgccggaaggctgcggtggaggccctgcagtcgcaggccttgcacgccacctcgcagcagcccctgaggaaggacaaggacaagaagaattaacgcacgcacagacttacatgtcaagagtggactttagactttcatgtgttaagttgcttgagttacaccttgtgacccttctcccataacatggtgtgaggacggactgggagccggtacagactccagtgtttacagccttgctttcctcccaccgaccctggccccaggctgccccgggcctggcgggccacccctctctatgcaaacacgtaaaagccatgaatgctggaatccaaaactgacgaggtttatttttttcagagccagtggctggtcttccatttacagtgtcactattccctgacggagctgttatgtgccgctctagcgaaggccccagccgggatgctaggcctaattgttcagcgtggagatggcaactcacgtggtgccctaggtgcagctgcgtggtctggtatacatgctgcaaaattcacccagttcccctcattttaatttttctaacctacagcttaattttaataactttaaaacacttctaaatatttattttggcaccagcgtcaagacaaataatatcctctcccattattttcataagtaacacagattccctgatttttaaaaactaaaaatacagctaaacctttcttatgtataaagtatgcctatcatatacagggagaggtgggtaataaacttcctgtaatgaca

SEQ ID NO: 367371 - DNA, 1575 bp, Homo sapiens
gcggcggggctccggctgcgctcgtggccgggccgggcggggaggccggtcccgcgggcgggggcaggggcggctccgcggcttctcccgccgccgccgccaaggggagtttccaggaagtggccatattggatccattcagccgcagccgcccgggcggagcgcgtcccgcagccggctggtccctgtcgctgcccctgcgctcgtcccagcccacccgcccggtgcggagctcgccatggcggccaccgacctggagcgcttctcgaatgcagagccagagccccggagcctctccctgggcggccatgtgggtttcgacagcctccccgaccagctggtcagcaagtcggtcactcagggcttcagcttcaacatcctctgtgtgggggagaccggcattggcaaatccacactgatgaacacactcttcaacacgaccttcgagactgaggaagccagtcaccatgaggcatgcgtgcgcctgcggccccagacctatgacctccaggagagcaacgtgcagctcaagctgaccattgtggatgccgtgggctttggggatcagatcaataaggatgagagttacaggcccatagttgactacatcgatgcgcagtttgaaaattatctgcaggaggagctgaagatccgccgctcgctcttcgactaccatgacacaaggatccacgtttgcctctacttcatcacgcccacagggcactccctgaagtctctagatctagtgaccatgaagaaactagacagcaaggtgaacattattcccatcatcgccaaggctgacaccatctccaagagcgagctccacaagttcaagatcaagatcatgggcgagttggtcagcaacggggtccagatctaccagttccccacggatgatgaggctgttgcagagattaacgcagtcatgaatgcacatctgccctttgccgtggtgggcagcaccgaggaggtgaaggtggggaacaagctggtccgagcacggcagtacccctggggagtggtgcaggtggagaatgagaatcactgcgacttcgtgaagctgcgggagatgttgatccgggtgaacatggaagacctccgcgagcagacccacagccggcactacgagctctaccggcgctgcaagttggaggagatgggctttcaggacagcgatggtgacagccagcccttcagcctacaagagacatacgaggccaagaggaaggagttcctaagtgagctgcagaggaaggaggaagagatgaggcagatgtttgtcaacaaagtgaaggagacagagctggagctgaaggagaaggaaagggagctccatgagaagtttgagcacctgaagcgggtccaccaggaggagaagcgcaaggtggaggaaaagcgccgggaactggaggaggagaccaacgccttcaatcgccggaaggctgcggtggaggccctgcagtcgcaggccttgcacgccacctcgcagcagcccctgaggaaggacaaggacaagaagaagtaggtggcagctgcgcctgcgctggctcctcttgctcctgtgggctcttg

SEQ ID NO: 367372 - DNA, 434 bp, Homo sapiens
tatcatgaaccagaccctagcagtcacttacaaatacagttgatcctcattatttgtggatcctatatttgcaaatttgcttacttgctaaaatgtgtttgtaatctccaaattaatacttgtggagctttcaaggtgattcatggacatacacacagtagtgaaaaatctgtcactccttatgcacgttccaagctaaggtcaaataaggtgaccctgggcctccttgtttcagctctcatacaaagatgacccaaggacagaggcaacagagggcagtgcagggtagtgcaagaagctctggctctaggactaattggacgaggtctgaatcttaactctggcacctgttagtgaagcagcctcaagcaaatcacttaatgcttctgtacttcctttattgttttgtaaataaagaaaattcaatctacaaa

SEQ ID NO: 367373 - DNA, 2063 bp, Homo sapiens
ggagggttttgctctttgtgtgggtgtgtgagtggctatgatcctagttgtccagctgctgcgtggagaataagtaaagcaggtctgaatgacaccaggtcgctgctgtcttgcggctgacattcaggtagagacgttcatcttcactgacggggaagatgaggccctggccaggcacacgggcaacgtggtcatcacaaactgctcggccgcccacagccgccaggcgctgtcctgcaagatggccgtggagtatgaccgcttcatcgagtccggcaggaagtggttctgccacgtggacgatgacaactacgtcaacctgcgggccctgctgcggctgctggccagctacccgcacacgcgggacgtctacgtcggcaagcccagcctggacaggcccatccaggccatggagcgggtcagcgagaacaaggtgcgtcctgtccacttctggtttgccacgggcggcgctggcttctgcatcagccgtgggctggctctgaagatgagcccgtgggccagcgggggtcacttcatgaatacggctgagcggatccggctgcctgatgactgcaccatcggctacatcgtggaggccctgctgggtgtgcccctcatccgcagcggcctcttccactcccacctggagaacctgcagcaggtgcccacctcggagctccacgagcaggtgacgctgagctacggtatgtttgaaaacaagcggaacgccgtccacgtgaaggggcccttctcggtggaggccgacccatccaggttccgctccatccactgccacctgtacccggacacaccctggtgtccccgcactgccatcttctagtggccatggctgagacccaatccctgggcgcccctggtatccaaagggcccagggaccctgttgcgctgccctggcctcggcattcgaggctcccctagggccgtgcctgtgcgtgtgcgtgtgcatgtgcgtgtgtgtgtgtgtgtactgcatgcccacccgggtagcaggctgctgggcagttctgctctgtggaggggcgggcaccagcgccacttatgtgcctctgctccgagggccagtgggctgcagggcctgcttggaggaaggatttgtgtgtcggaggccactccgagggcaattctgttaggatttttggatctttctacagctacggggctccgggctactttgcagggatgcgatgcgtaggtgcctttctcttcctgctgaccacaagctctgtgctgggggtacctgtgccctgaagtcctggcccctgtgtcatagccccaagtacgactcactgagccatgctcattgcaggggaggctgggtctgggggtgcgtgacccaatccccttcctcctggcctggacgctgtggcttaagagtaacagcagccaccgcccagttccagtggccccacgaagcccccagtggctggctgtccagctgggcaaacagtggcacccctcccagctcttctgagtggggagtcttccaggcctcctcagaggtcttccctttgcctccccaggacagggtgagtcagagctcagcatttaatctcctctccaaagtagagagcaagtcgcccacagtgggcgtgtctgtaaatattgtgacagtatttttttactgtgctgttttttttgaaaggggatgggtaaaaagtagggtgttcttgttttttgcttgggagggtgggggtgggggagggtcttattttatcttatcttttctgtggatcagaaaaaacagaagccaaactcggggtcatctttgtttttaaagctgaagtgggactgtctggcactctgtgtatttatgcgttccagcatctggaacctcccatccctgccctcctcctgtgtagctgccacctccccgctgggcccagcatggctcacctgtcccgtgggctgtgtttcttgttgtttttctctttgcaaagacatagctaggaaagcgaatgataagggaaaagttctcagggaattgaagtgttgttgctatggtgacgtccttttgctgtgaataaaggtgctctttgcagca

SEQ ID NO: 367374 - DNA, 1078 bp, Homo sapiens
  misc_feature (1076)..(1078): n is a, c, g, or t
cgcgcccctggccgagccgctcgcgccccgagacgtcttcatcgctgtcaagaccaccaaaaagttccaccgcgcgcgcctcgacctgctgctggagacctggatctcgcgccacaaggagatgacgttcatcttcactgacggggaagatgaggccctggccaggcacacgggcaacgtggtcatcacaaactgctcggccgcccacagccgccaggcgctgtcctgcaagatggccgtggagtatgaccgcttcatcgagtccggcaggaagtggttctgccacgtggacgatgacaactacgtcaacctgcgggccctgctgcggctgctggccagctacccgcacacgcgggacgtctacgtcggcaagcccagcctggacaggcccatccaggccatggagcgggtcagcgagaacaaggtgcgtcctgtccacttctggtttgccacgggcggcgctggcttctgcatcagccgtgggctggctctgaagatgagcccgtgggccagcgggggtcacttcatgaatacggctgagcggatccggctgcctgatgactgcaccatcggctacatcgtggaggccctgctgggtgtgcccctcatccgcagcggcctcttccactcccacctggagaacctgcagcaggtgcccacctcggagctccacgagcaggtgacgctgagctacggtatgtttgaaaacaagcggaacgccgtccacgtgaaggggcccttctcggtggaggccgacccatccaggtggggaaactgaggcacggagcagctgatgcccaaggtccagcagccatgctggtgggctggggaggcgctcagactccaagccaggcaggccgtgggtccggccgccccacagctggtaatgctgcacctccctctcctgtgatgtggccccaggccccgaccccgctcaggggtggtgggaagagtcctggagagcaggagcagtgccggagcccccactgcagctggtcccagcccctgcagagatccagacgcttgttttttaaatacagcagctctgcggtgcttttccttcctcaaaaaaaaannn

SEQ ID NO: 367375 - DNA, 1729 bp, Homo sapiens
  misc_feature (1)..(1): n is a, c, g, or t
nctaaagccaattatggacaacctccctttattctctgacaacataattcctcctggattaacacacagaaaaatggcagagccattagcgagaacaaggtgcgtcctgtccacttctggtttgccacgggcggcgctggcttctgcatcagccgtgggctggctctgaagatgagcccgtgggccagcgggggtcacttcatgaatacggctgagcggatccggctgcctgatgactgcaccatcggctacatcgtggaggccctgctgggtgtgcccctcatccgcagcggcctcttccactcccacctggagaacctgcagcaggtgcccacctcggagctccacgagcaggtgacgctgagctacggtatgtttgaaaacaagcggaacgccgtccacgtgaaggggcccttctcggtggaggccgacccatccaggttccgctccatccactgccacctgtacccggacacaccctggtgtccccgcactgccatcttctagtggccatggctgagacccaatccctgggcgcccctggtatccaaagggcccagggaccctgttgcgctgccctggcctcggcattcgaggctcccctagggccgtgcctgtgcgtgtgcgtgtgcatgtgcgtgtgtgtgtgtgtgtactgcatgcccacccgggtagcaggctgctgggcagttctgctctgtggaggggcgggcaccagcgccacttatgtgcctctgctccgagggccagtgggctgcagggcctgcttggaggaaggatttgtgtgtcggaggccactccgagggcaattctgttaggatttttggatctttctacagctacggggctccgggctactttgcagggatgcgatgcgtaggtgcctttctcttcctgctgaccacaagctctgtgctgggggtacctgtgccctgaagtcctggcccctgtgtcatagccccaagtacgactcactgagccatgctcattgcaggggaggctgggtctgggggtgcgtgacccaatccccttcctcctggcctggacgctgtggcttaagagtaacagcagccaccgcccagttccagtggccccacgaagcccccagtggctggctgtccagctgggcaaacagtggcacccctcccagctcttctgagtggggagtcttccaggcctcctcagaggtcttccctttgcctccccaggacagggtgagtcagagctcagcatttaatctcctctccaaagtagagagcaagtcgcccacagtgggcgtgtctgtaaatattgtgacagtatttttttactgtgctgttttttttgaaaggggatgggtaaaaagtagggtgttcttgttttttgcttgggagggtgggggtgggggagggtcttattttatcttatcttttctgtggatcagaaaaaacagaagccaaactcggggtcatctttgtttttaaagctgaagtgggactgtctggcactctgtgtatttatgcgttccagcatctggaacctcccatccctgccctcctcctgtgtagctgccacctccccgctgggcccagcatggctcacctgtcccgtgggctgtgtttcttgttgtttttctctttgcaaagacatagctaggaaagcgaatgataagggaaaagttctcagggaattgaagtgttgttgctatggtgacgtccttttgctgtgaataaaggtgctctttgcagca

SEQ ID NO: 367376 - DNA, 2152 bp, Homo sapiens
cgcgcccctggccgagccgctcgcgccccgagacgtcttcatcgctgtcaagaccaccaaaaagttccaccgcgcgcgcctcgacctgctgctggagacctggatctcgcgccacaaggagatgacgttcatcttcactgacggggaagatgaggccctggccaggcacacgggcaacgtggtcatcacaaactgctcggccgcccacagccgccaggcgctgtcctgcaagatggccgtggagtatgaccgcttcatcgagtccggcaggaagtggttctgccacgtggacgatgacaactacgtcaacctgcgggccctgctgcggctgctggccagctacccgcacacgcgggacgtctacgtcggcaagcccagcctggacaggcccatccaggccatggagcgggtcagcgagaacaaggtgcgtcctgtccacttctggtttgccacgggcggcgctggcttctgcatcagccgtgggctggctctgaagatgagcccgtgggccagcgggggtcacttcatgaatacggctgagcggatccggctgcctgatgactgcaccatcggctacatcgtggaggccctgctgggtgtgcccctcatccgcagcggcctcttccactcccacctggagaacctgcagcaggtgcccacctcggagctccacgagcaggtgacgctgagctacggtatgtttgaaaacaagcggaacgccgtccacgtgaaggggcccttctcggtggaggccgacccatccaggttccgctccatccactgccacctgtacccggacacaccctggtgtccccgcactgccatcttctagtggccatggctgagacccaatccctgggcgcccctggtatccaaagggcccagggaccctgttgcgctgccctggcctcggcattcgaggctcccctagggccgtgcctgtgcgtgtgcgtgtgcatgtgcgtgtgtgtgtgtgtgtactgcatgcccacccgggtagcaggctgctgggcagttctgctctgtggaggggcgggcaccagcgccacttatgtgcctctgctccgagggccagtgggctgcagggcctgcttggaggaaggatttgtgtgtcggaggccactccgagggcaattctgttaggatttttggatctttctacagctacggggctccgggctactttgcagggatgcgatgcgtaggtgcctttctcttcctgctgaccacaagctctgtgctgggggtacctgtgccctgaagtcctggcccctgtgtcatagccccaagtacgactcactgagccatgctcattgcaggggaggctgggtctgggggtgcgtgacccaatccccttcctcctggcctggacgctgtggcttaagagtaacagcagccaccgcccagttccagtggccccacgaagcccccagtggctggctgtccagctgggcaaacagtggcacccctcccagctcttctgagtggggagtcttccaggcctcctcagaggtcttccctttgcctccccaggacagggtgagtcagagctcagcatttaatctcctctccaaagtagagagcaagtcgcccacagtgggcgtgtctgtaaatattgtgacagtatttttttactgtgctgttttttttgaaaggggatgggtaaaaagtagggtgttcttgttttttgcttgggagggtgggggtgggggagggtcttattttatcttatcttttctgtggatcagaaaaaacagaagccaaactcggggtcatctttgtttttaaagctgaagtgggactgtctggcactctgtgtatttatgcgttccagcatctggaacctcccatccctgccctcctcctgtgtagctgccacctccccgctgggcccagcatggctcacctgtcccgtgggctgtgtttcttgttgtttttctctttgcaaagacatagctaggaaagcgaatgataagggaaaagttctcagggaattgaagtgttgttgctatggtgacgtccttttgctgtgaataaaggtgctctttgcagcaatcctgggggtcctggtcttggctggaggtggggcctaagccccagggcagccagggtcaggagaggcacacaggtgaaggggaggcttggccttggg

SEQ ID NO: 367377 - DNA, 267 bp, Homo sapiens
aggggagcgcgggaatcaccaggctgaagaatgactggaaatgggaccctctccaaccaaagcacccagacattccggcgccggacatttcaaagagcgcggaagccacgccttcccccagaaccggaagctttgcaactagcgcctcttgtagactggctgtttataagggggcggggggccacagcagaggctactgcccttgggaggcactcatgaaggtgcctccatctctcccttccccaatatacctgatggtcaactctc

SEQ ID NO: 367378 - DNA, 1416 bp, Homo sapiens
tacagcggctggtacggcccggagtgtttgggatgcggccgggttccttccgcgggacgggtgagggcgctggggccctgggcagcgcgggctcgatgtgtgtcagccaagtagctggtcccactggagcgggagaaagagagagcgcgaaagagagaggatgtctctctcagactggcacctggcggtgaagctggctgaccagccacttactccaaagtctattcttcggttgccagagacagaactgggagaatactcgctagggggctatagtatttcatttctgaagcagcttattgctggcaaactccaggagtctgttccagaccctgagctgattgatctgatctactgtggtcggaagctaaaagatgaccagacacttgacttctatggcattcaacctgggtccactgtccatgttctgcgaaagtcctggcctgaacctgatcagaaaccggaacctgtggacaaagtggctgccatgagagagttccgggtgttgcacactgccctgcacagcagctcctcttacagggaggcggtctttaagatgctcagcaataaggagtctctggatcagatcattgtggccaccccaggcctcagcagtgaccctattgctcttggggttctccaggacaaggacctcttctctgtcttcgctgatcccaatatgcttgatacgttggtgcctgctcacccagccctcgtcaatgccattgtcctggttctgcactccgtagcaggcagtgccccaatgcctgggactgactcctcttcccggagcatgccctccagctcataccgggatatgccaggtggcttcctgtttgaagggctctcagatgatgaggatgactttcacccaaacaccaggtccacaccctctagcagtactcccagctcccgcccagcctccctggggtacagtggagctgctgggccccggcccatcacccagagtgagctggccaccgccttggccctggccagcactccggagagcagctctcacacaccgactcctggcacccagggtcattcctcagggacctcaccaatgtcctctggtgtccagtcagggacgcccatcaccaatgatctcttcagccaagccctacagcatgcccttcaggcctctgggcagcccagccttcagagccagtggcagccccagctgcagcagctacgtgacatgggcatccaggacgatgagctgagcctgcgggccctgcaggccaccggtggggacatccaagcagccctggagctcatctttgctggaggagccccatgaactccctgcttcccctgaacccccagcaagttgcagaggctactgcccttgggaggcactcatgaaggtgcctccatctctcccttccccaatatacctgatggtcaactctc

SEQ ID NO: 367379 - DNA, 1785 bp, Homo sapiens
tacagcggctggtacggcccggagtgtttgggatgcggccgggttccttccgcgggacgggtgagggcgctggggccctgggcagcgcgggctcgatgtgtgtcagccaagtagctggtcccactggagcggtgaggtcgccaccggatagtgttcctgccccattactagcgatctgtgaccttgggccagtgattttactgagtcttgcttccctcatctttaaaatgtggctaatgcctgccttagggaaccgttgtgaggattaagtgagacatggtatataaaacgacctccttctggcataaacttgaggtggaagataccttgaggatgcttgaaggtctgctaggcagcttcacagccttttctttcctcttctctatcagaggtctctttggaagcaataatgatgactataacaagaacttatcttgctttgcaagattcttccgccgtcagagtttctgatttattttctggggttccatgtatgccagggagaaagagagagcgcgaaagagagaggatgtctctctcagactggcacctggcggtgaagctggctgaccagccacttactccaaagtctattcttcggttgccagagacagaactgggagaatactcgctagggggctatagtatttcatttctgaagcagcttattgctggcaaactccaggagtctgttccagaccctgagctgattgatctgatctactgtggtcggaagctaaaagatgaccagacacttgacttctatggcattcaacctgggtccactgtccatgttctgcgaaagtcctggcctgaacctgatcagaaaccggaacctgtggacaaagtggctgccatgagagagttccgggtgttgcacactgccctgcacagcagctcctcttacagggaggcggtctttaagatgctcagcaataaggagtctctggatcagatcattgtggccaccccaggcctcagcagtgaccctattgctcttggggttctccaggacaaggacctcttctctgtcttcgctgatcccaatatgcttgatacgttggtgcctgctcacccagccctcgtcaatgccattgtcctggttctgcactccgtagcaggcagtgccccaatgcctgggactgactcctcttcccggagcatgccctccagctcataccgggatatgccaggtggcttcctgtttgaagggctctcagatgatgaggatgactttcacccaaacaccaggtccacaccctctagcagtactcccagctcccgcccagcctccctggggtacagtggagctgctgggccccggcccatcacccagagtgagctggccaccgccttggccctggccagcactccggagagcagctctcacacaccgactcctggcacccagggtcattcctcagggacctcaccaatgtcctctggtgtccagtcagggacgcccatcaccaatgatctcttcagccaagccctacagcatgcccttcaggcctctgggcagcccagccttcagagccagtggcagccccagctgcagcagctacgtgacatgggcatccaggacgatgagctgagcctgcgggccctgcaggccaccggtggggacatccaagcagccctggagctcatctttgctggaggagccccatgaactccctgcttcccctgaacccccagcaagttgcagaggctactgcccttgggaggcactcatgaaggtgcctccatctctcccttccccaatatacctgatggtcaactctc

SEQ ID NO: 367380 - DNA, 2021 bp, Homo sapiens
agcgcggaatttccggtttccggcgagagggccagagtgagtgtttacaccggcggcagtgcggccgggttccttccgcgggacgggtgagggcgctggggccctgggcagcgcgggctcgatgtgtgtcagccaagtagctggtcccactggagcgggagaaagagagagcgcgaaagagagaggatgtctctctcagactggcacctggcggtgaagctggctgaccagccacttactccaaagtctattcttcggttgccagagacagaactgggagaatactcgctagggggctatagtatttcatttctgaagcagcttattgctggcaaactccaggagtctgttccagaccctgagctgattgatctgatctactgtggtcggaagctaaaagatgaccagacacttgacttctatggcattcaacctgggtccactgtccatgttctgcgaaagtcctggcctgaacctgatcagaaaccggaacctgtggacaaagtggctgccatgagagagttccgggtgttgcacactgccctgcacagcagctcctcttacagggaggcggtctttaagatgctcagcaataaggagtctctggatcagatcattgtggccaccccaggcctcagcagtgaccctattgctcttggggttctccaggacaaggacctcttctctgtcttcgctgatcccaatatgcttgatacgttggtgcctgctcacccagccctcgtcaatgccattgtcctggttctgcactccgtagcaggcagtgccccaatgcctgggactgactcctcttcccggagcatgccctccagctcataccgggatatgccaggtggcttcctgtttgaagggctctcagatgatgaggatgactttcacccaaacaccaggtccacaccctctagcagtactcccagctcccgcccagcctccctggggtacagtggagctgctgggccccggcccatcacccagagtgagctggccaccgccttggccctggccagcactccggagagcagctctcacacaccgactcctggcacccagggtcattcctcagggacctcaccaatgtcctctggtgtccagtcagggacgcccatcaccaatgatctcttcagccaagccctacagcatgcccttcaggcctctgggcagcccagccttcagagccagtggcagccccagctgcagcagctacgtgacatgggcatccaggacgatgagctgagcctgcgggccctgcaggccaccggtggggacatccaagcagccctggagctcatctttgctggaggagccccatgaactccctgcttcccctgaacccccagcaagttgcagaggctactgcccttgggaggcactcatgaaggtgcctccatctctcccttccccaatatacctgatggtcaactctcaaaaaaaaaaaaaaaaaaaaaaaaaaaaaaaaaaaaaaaaaaaaaaaaaaaaaaaaaaaaaaaaaaggggggggggggcagcaataagaattccccccggaggggcgcgccacatttatacggcgcctccccacagttttttgtggaccaaagggggccccaaattaggggacagcggcttttattaaaaccttagtcgacaggcggcggcggcgtcttttaaaaagctgtgtagagcggggagaaaaaccgctggtacctgctggggccgcaccttctgcggggagacgacgacccctattattctctcgcggggggggcagcgagacaccaaattgtgggcggacacacacactctcacccccccaagaagaattttaaagacgccgccccacgggaggcggacataatataaaacagagttttacaacgacggccgactaatcagcggggtggtacaaccacaacccggccggctagatattagtattcgctcctggtgaggaacaaacactttcgcgcgcccactacgagcgagatatcgttatcttaggacagcacgcaatttttcccccgggg

SEQ ID NO: 367381 - DNA, 1430 bp, Homo sapiens
tacagcggctggtacggcccggagtgtttgggatgcggccgggttccttccgcgggacggggatgaagaaactgaggcctagagagctgtccatcacagtatgagtagagagagaaccccagattctagttctggcctcctgatgggagaaagagagagcgcgaaagagagaggatgtctctctcagactggcacctggcggtgaagctggctgaccagccacttactccaaagtctattcttcggttgccagagacagaactgggagaatactcgctagggggctatagtatttcatttctgaagcagcttattgctggcaaactccaggagtctgttccagaccctgagctgattgatctgatctactgtggtcggaagctaaaagatgaccagacacttgacttctatggcattcaacctgggtccactgtccatgttctgcgaaagtcctggcctgaacctgatcagaaaccggaacctgtggacaaagtggctgccatgagagagttccgggtgttgcacactgccctgcacagcagctcctcttacagggaggcggtctttaagatgctcagcaataaggagtctctggatcagatcattgtggccaccccaggcctcagcagtgaccctattgctcttggggttctccaggacaaggacctcttctctgtcttcgctgatcccaatatgcttgatacgttggtgcctgctcacccagccctcgtcaatgccattgtcctggttctgcactccgtagcaggcagtgccccaatgcctgggactgactcctcttcccggagcatgccctccagctcataccgggatatgccaggtggcttcctgtttgaagggctctcagatgatgaggatgactttcacccaaacaccaggtccacaccctctagcagtactcccagctcccgcccagcctccctggggtacagtggagctgctgggccccggcccatcacccagagtgagctggccaccgccttggccctggccagcactccggagagcagctctcacacaccgactcctggcacccagggtcattcctcagggacctcaccaatgtcctctggtgtccagtcagggacgcccatcaccaatgatctcttcagccaagccctacagcatgcccttcaggcctctgggcagcccagccttcagagccagtggcagccccagctgcagcagctacgtgacatgggcatccaggacgatgagctgagcctgcgggccctgcaggccaccggtggggacatccaagcagccctggagctcatctttgctggaggagccccatgaactccctgcttcccctgaacccccagcaagttgcagaggctactgcccttgggaggcactcatgaaggtgcctccatctctcccttccccaatatacctgatggtcaactctc

SEQ ID NO: 367382 - DNA, 1329 bp, Homo sapiens
agcgcggaatttccggtttccggcgagagggccagagtgagtgtttacaccggcggcagtgcggccgggttccttccgcgggacggggagaaagagagagcgcgaaagagagaggatgtctctctcagactggcacctggcggtgaagctggctgaccagccacttactccaaagtctattcttcggttgccagagacagaactgggagaatactcgctagggggctatagtatttcatttctgaagcagcttattgctggcaaactccaggagtctgttccagaccctgagctgattgatctgatctactgtggtcggaagctaaaagatgaccagacacttgacttctatggcattcaacctgggtccactgtccatgttctgcgaaagtcctggcctgaacctgatcagaaaccggaacctgtggacaaagtggctgccatgagagagttccgggtgttgcacactgccctgcacagcagctcctcttacagggaggcggtctttaagatgctcagcaataaggagtctctggatcagatcattgtggccaccccaggcctcagcagtgaccctattgctcttggggttctccaggacaaggacctcttctctgtcttcgctgatcccaatatgcttgatacgttggtgcctgctcacccagccctcgtcaatgccattgtcctggttctgcactccgtagcaggcagtgccccaatgcctgggactgactcctcttcccggagcatgccctccagctcataccgggatatgccaggtggcttcctgtttgaagggctctcagatgatgaggatgactttcacccaaacaccaggtccacaccctctagcagtactcccagctcccgcccagcctccctggggtacagtggagctgctgggccccggcccatcacccagagtgagctggccaccgccttggccctggccagcactccggagagcagctctcacacaccgactcctggcacccagtcagggacgcccatcaccaatgatctcttcagccaagccctacagcatgcccttcaggcctctgggcagcccagccttcagagccagtggcagccccagctgcagcagctacgtgacatgggcatccaggacgatgagctgagcctgcgggccctgcaggccaccggtggggacatccaagcagccctggagctcatctttgctggaggagccccatgaactccctgcttcccctgaacccccagcaagttgcagaggctactgcccttgggaggcactcatgaaggtgcctccatctctcccttccccaatatacctgatggtcaactctc

SEQ ID NO: 367383 - DNA, 1151 bp, Homo sapiens
agcgcggaatttccggtttccggcgagagggccagagtgagtgtttacaccggcggcagtgcggccgggttccttccgcgggacgggtgagggcgctggggccctgggcagcgcgggctcgatgtgtgtcagccaagtagctggtcccactggagcgggagaaagagagagcgcgaaagagagaggatgtctctctcagactggcacctggcggtgaagctggctgaccagccacttactccaaagtctattcttcggttgccagagacagaactgggagaatactcgctagggggctatagtatttcatttctgaagcagcttattgctggcaaactccaggagtctgttccagaccctgagctgattgatctgatctactgtggtcggaagctaaaagatgaccagacacttgacttctatggcattcaacctgggtccactgtccatgttctgcgaaagtcctggcctgaacctgatcagaaaccggaacctgtggacaaagtggctgccatgagagagttccgggtgttgcacactgccctgcacagcagctcctcttacagggaggcggtctttaagatgctcagcaataaggagtctctggatcagatcattgtggccaccccaggcctcagcagtgaccctattgctcttggggttctccaggacaaggacctcttctctgtcttcgctgatcccaatatgcttgatacgttggtgcctgctcacccagccctcgtcaatgccattgtcctggttctgcactccgtagcaggcagtgccccaatgcctgggactgactcctcttcccggagcatgccctccagctcataccgggatatgccaggtggcttcctgtttgaagggctctcagatgatgaggatgactttcacccaagccagtggcagccccagctgcagcagctacgtgacatgggcatccaggacgatgagctgagcctgcgggccctgcaggccaccggtggggacatccaagcagccctggagctcatctttgctggaggagccccatgaactccctgcttcccctgaacccccagcaagttgcagaggctactgcccttgggaggcactcatgaaggtgcctccatctctcccttccccaatatacctgatggtcaactctc

SEQ ID NO: 367384 - DNA, 951 bp, Homo sapiens
  misc_feature (910)..(910): n is a, c, g, or t
agcgcggaatttccggtttccggcgagagggccagagtgagtgtttacaccggcggcagtgcggccgggttccttccgcgggacgggtgagggcgctggggccctgggcagcgcgggctcgatgtgtgtcagccaagtagctggtcccactggagcgggagaaagagagagcgcgaaagagagaggatgtctctctcagactggcacctggcggtgaagctggctgaccagccacttactccaaagtctattcttcggttgccagagacagaactgggagaatactcgctagggggctatagtatttcatttctgaagcagcttattgctggcaaactccaggagtctgttccagaccctgagctgattgatctgatctactgtggtcggaagctaaaagatgaccagacacttgacttctatggcattcaacctgggtccactgtccatgttctgcgaaagtcctggcctgaacctgatcagaaaccggaacctgtggacaaagtggctgccatgagagagttccgggtgttgcacactgccctgcacagcagctcctcttacagggaggcggtctttaagatgctcagcaataaggagtctctggatcagatcattgtggccaccccaggcctcagcagtgaccctattgctcttggggttctccaggacaaggacctcttctctgtcttcgctgatcccaatatgcttgatacgttggtgcctgctcacccagccctcgtcaatgccattgtcctggttctgcactccgtagcaggcagtgccccaatgcctgggactgactcctcttcccggagcatgccctccagctcataccgggatatgccaggtggcttcctgtttgaagggctctcagatgatgaggatgactttcacccaaacaccagtncacaccctctagcagttctctctcctgcagggatcctctag

SEQ ID NO: 367385 - DNA, 1360 bp, Homo sapiens
tacagcggctggtacggcccggagtgtttgggatgcggccgggttccttccgcgggacgggtgagggcgctggggccctgggcagcgcgggctcgatgtgtgtcagccaagtagctggtcccactggagcggtgaggtcgccaccggatagtgttcctgccccattactagcgatctgtgaccttgggccagtgattttactgagtcttgcttccctcatctttaaaatgtggctaatgcctgccttagggaaccgttgtgaggattaagtgagacatggtatataaaacgacctccttctggcataaacttgaggtggaagataccttgaggatgcttgaaggtctgctaggcagcttcacagccttttctttcctcttctctatcagaggtctctttggaagcaataatgatgactataacaagaacttatcttgctttgcaagattcttccgccgtcagagtttctgatttattttctggggttccatgtatgccagggagaaagagagagcgcgaaagagagaggatgtctctctcagactggcacctggcggtgaagctggctgaccagccacttactccaaagtctattcttcggttgccagagacagaactgggagaatactcgctagggggctatagtatttcatttctgaagcagcttattgctggcaaactccaggagtctgttccagaccctgagctgattgatctgatctactgtggtcggaagctaaaagatgaccagacacttgacttctatggcattcaacctgggtccactgtccatgttctgcgaaagtcctggcctgaacctgatcagaaaccggaacctgtggacaaagtggctgccatgagagagttccgggtgttgcacactgcctgctgggccccggcccatcacccagagtgagctggccaccgccttggccctggccagcactccggagagcagctctcacacaccgactcctggcacccagggtcattcctcagggacctcaccaatgtcctctggtgtccagtcagggacgcccatcaccaatgatctcttcagccaagccctacagcatgcccttcaggcctctgggcagcccagccttcagagccagtggcagccccagctgcagcagctacgtgacatgggcatccaggacgatgagctgagcctgcgggccctgcaggccaccggtggggacatccaagcagccctggagctcatctttgctggaggagccccatgaactccctgcttcccctgaacccccagcaagttgcagaggctactgcccttgggaggcactcatgaaggtgcctccatctctcccttccccaatatacctgatggtcaactctc

SEQ ID NO: 367386 - DNA, 1237 bp, Homo sapiens
tacagcggctggtacggcccggagtgtttgggatgcggccgggttccttccgcgggacgggtgagggcgctggggccctgggcagcgcgggctcgatgtgtgtcagccaagtagctggtcccactggagcggtgaggtcgccaccggatagtgttcctgccccattactagcgatctgtgaccttgggccagtgattttactgagtcttgcttccctcatctttaaaatgtggctaatgcctgccttagggaaccgttgtgaggattaagtgagacatggtatataaaacgacctccttctggcataaacttgaggtggaagataccttgaggatgcttgaaggtctgctaggcagcttcacagccttttctttcctcttctctatcagaggtctctttggaagcaataatgatgactataacaagaacttatcttgctttgcaagattcttccgccgtcagagtttctgatttattttctggggttccatgtatgccagggagaaagagagagcgcgaaagagagaggatgtctctctcagactggcacctggcggtgaagctggctgaccagccacttactccaaagtctattcttcggttgccagagacagaactgggagaatactcgctagggggctatagtatttcatttctgaagcagcttattgctggcaaactccaggagtctgttccagaccctgagctgattgatctgatctactgtggtcggaagctaaaagatgaccagacacttgacttctatggcattcaacctgggtccactgtccatgttctgcgaaagtcctggcctgaacctgatcagaaaccggaacctgtggacaaagtggctgccatgagagagttccgggtgttgcacactgcctgctgggccccggcccatcacccagagtgagctggccaccgccttggccctggccagcactccggagagcagctctcacacaccgactcctggcacccagagccagtggcagccccagctgcagcagctacgtgacatgggcatccaggacgatgagctgagcctgcgggccctgcaggccaccggtggggacatccaagcagccctggagctcatctttgctggaggagccccatgaactccctgcttcccctgaacccccagcaagttgcagaggctactgcccttgggaggcactcatgaaggtgcctccatctctcccttccccaatatacctgatggtcaactctc

SEQ ID NO: 367387 - DNA, 321 bp, Homo sapiens
agctttgctgaggactcccccatcttcctttccttccccggaaagcacagacctaagtgagtcttcactggatcccagctaacagcttctgcccattcctatctttccacagagccagtggcagccccagctgcagcagctacgtgacatgggcatccaggacgatgagctgagcctgcgggccctgcaggccaccggtggggacatccaagcagccctggagctcatctttgctggaggagccccatgaactccctgcttcccctgaacccccagcaagttgcagaggctactgcccttgggaggcactcatgaaggtgc

SEQ ID NO: 367388 - DNA, 1442 bp, Homo sapiens
agcgcggaatttccggtttccggcgagagggccagagtgagtgtttacaccggcggcagtgcggccgggttccttccgcgggacgggtgagggcgctggggccctgggcagcgcgggctcgatgtgtgtcagccaagtagctggtcccactggagcgggagaaagagagagcgcgaaagagagaggatgtctctctcagactggcacctggcggtgaagctggctgaccagccacttactccaaagtctattcttcggttgccagagacagaactgggagaatactcgctagggggctatagtatttcatttctgaagcagcttattgctggcaaactccaggagtctgttccagaccctgagctgattgatctgatctactgtggtcggaagctaaaagatgaccagacacttgacttctatggcattcaacctgggtccactgtccatgttctgcgaaagtcctggcctgaacctgatcagaaaccggaacctgtggacaaagtggctgccatgagagagttccgggtgttgcacactgccctgcacagcagctcctcttacagggaggcggtctttaagatgctcagcaataaggagtctctggatcagatcattgtggccaccccaggcctcagcagtgaccctattgctcttggggttctccaggacaaggacctcttctctgtcttcgctgatcccaatatgcttgatacgttggtgcctgctcacccagccctcgtcaatgccattgtcctggttctgcactccgtagcaggcagtgccccaatgcctgggactgactcctcttcccggagcatgccctccagctcataccgggatatgccaggtggcttcctgtttgaagggctctcagatgatgaggatgactttcacccaaacaccaggtccacaccctctagcagtactcccagctcccgcccagcctccctggggtacagtggagctgctgggccccggcccatcacccagagtgagctggccaccgccttggccctggccagcactccggagagcagctctcacacaccgactcctggcacccagggtcattcctcagggacctcaccaatgtcctctggtgtccagtcagggacgcccatcaccaatgatctcttcagccaagccctacagcatgcccttcaggcctctgggcagcccagccttcagagccagtggcagccccagctgcagcagctacgtgacatgggcatccaggacgatgagctgagcctgcgggccctgcaggccaccggtggggacatccaagcagccctggagctcatctttgctggaggagccccatgaactccctgcttcccctgaacccccagcaagttgcagaggctactgcccttgggaggcactcatgaaggtgcctccatctctcccttccccaatatacctgatggtcaactctc

SEQ ID NO: 367389 - DNA, 1371 bp, Homo sapiens
agcgcggaatttccggtttccggcgagagggccagagtgagtgtttacaccggcggcagtgcggccgggttccttccgcgggacggggagaaagagagagcgcgaaagagagaggatgtctctctcagactggcacctggcggtgaagctggctgaccagccacttactccaaagtctattcttcggttgccagagacagaactgggagaatactcgctagggggctatagtatttcatttctgaagcagcttattgctggcaaactccaggagtctgttccagaccctgagctgattgatctgatctactgtggtcggaagctaaaagatgaccagacacttgacttctatggcattcaacctgggtccactgtccatgttctgcgaaagtcctggcctgaacctgatcagaaaccggaacctgtggacaaagtggctgccatgagagagttccgggtgttgcacactgccctgcacagcagctcctcttacagggaggcggtctttaagatgctcagcaataaggagtctctggatcagatcattgtggccaccccaggcctcagcagtgaccctattgctcttggggttctccaggacaaggacctcttctctgtcttcgctgatcccaatatgcttgatacgttggtgcctgctcacccagccctcgtcaatgccattgtcctggttctgcactccgtagcaggcagtgccccaatgcctgggactgactcctcttcccggagcatgccctccagctcataccgggatatgccaggtggcttcctgtttgaagggctctcagatgatgaggatgactttcacccaaacaccaggtccacaccctctagcagtactcccagctcccgcccagcctccctggggtacagtggagctgctgggccccggcccatcacccagagtgagctggccaccgccttggccctggccagcactccggagagcagctctcacacaccgactcctggcacccagggtcattcctcagggacctcaccaatgtcctctggtgtccagtcagggacgcccatcaccaatgatctcttcagccaagccctacagcatgcccttcaggcctctgggcagcccagccttcagagccagtggcagccccagctgcagcagctacgtgacatgggcatccaggacgatgagctgagcctgcgggccctgcaggccaccggtggggacatccaagcagccctggagctcatctttgctggaggagccccatgaactccctgcttcccctgaacccccagcaagttgcagaggctactgcccttgggaggcactcatgaaggtgcctccatctctcccttccccaatatacctgatggtcaactctc

SEQ ID NO: 367390 - DNA, 1527 bp, Homo sapiens
tacagcggctggtacggcccggagtgtttgggatgcggccgggttccttccgcgggacgggtgagggcgctggggccctgggcagcgcgggctcgatgtgtgtcagccaagtagctggtcccactggagcgaggtctctttggaagcaataatgatgactataacaagaacttatcttgctttgcaagattcttccgccgtcagagtttctgatttattttctggggttccatgtatgccagggagaaagagagagcgcgaaagagagaggatgtctctctcagactggcacctggcggtgaagctggctgaccagccacttactccaaagtctattcttcggttgccagagacagaactgggagaatactcgctagggggctatagtatttcatttctgaagcagcttattgctggcaaactccaggagtctgttccagaccctgagctgattgatctgatctactgtggtcggaagctaaaagatgaccagacacttgacttctatggcattcaacctgggtccactgtccatgttctgcgaaagtcctggcctgaacctgatcagaaaccggaacctgtggacaaagtggctgccatgagagagttccgggtgttgcacactgccctgcacagcagctcctcttacagggaggcggtctttaagatgctcagcaataaggagtctctggatcagatcattgtggccaccccaggcctcagcagtgaccctattgctcttggggttctccaggacaaggacctcttctctgtcttcgctgatcccaatatgcttgatacgttggtgcctgctcacccagccctcgtcaatgccattgtcctggttctgcactccgtagcaggcagtgccccaatgcctgggactgactcctcttcccggagcatgccctccagctcataccgggatatgccaggtggcttcctgtttgaagggctctcagatgatgaggatgactttcacccaaacaccaggtccacaccctctagcagtactcccagctcccgcccagcctccctggggtacagtggagctgctgggccccggcccatcacccagagtgagctggccaccgccttggccctggccagcactccggagagcagctctcacacaccgactcctggcacccagggtcattcctcagggacctcaccaatgtcctctggtgtccagtcagggacgcccatcaccaatgatctcttcagccaagccctacagcatgcccttcaggcctctgggcagcccagccttcagagccagtggcagccccagctgcagcagctacgtgacatgggcatccaggacgatgagctgagcctgcgggccctgcaggccaccggtggggacatccaagcagccctggagctcatctttgctggaggagccccatgaactccctgcttcccctgaacccccagcaagttgcagaggctactgcccttgggaggcactcatgaaggtgcctccatctctcccttccccaatatacctgatggtcaactctc

SEQ ID NO: 367391 - DNA, 1247 bp, Homo sapiens
  misc_feature (1037)..(1038): n is a, c, g, or t
  misc_feature (1054)..(1054): n is a, c, g, or t
agcgcggaatttccggtttccggcgagagggccagagtgagtgtttacaccggcggcagtgcggccgggttccttccgcgggacggggagaaagagagagcgcgaaagagagaggatgtctctctcagactggcacctggcggtgaagctggctgaccagccacttactccaaagtctattcttcggttgccagagacagaactgggagaatactcgctagggggctatagtatttcatttctgaagcagcttattgctggcaaactccaggagtctgttccagaccctgagctgattgatctgatctactgtggtcggaagctaaaagatgaccagacacttgacttctatggcattcaacctgggtccactgtccatgttctgcgaaagtcctggcctgaacctgatcagaaaccggaacctgtggacaaagtggctgccatgagagagttccgggtgttgcacactgccctgcacagcagctcctcttacagggaggcggtctttaagatgctcagcaataaggagtctctggatcagatcattgtggccaccccaggcctcagcagtgaccctattgctcttggggttctccaggacaaggacctcttctctgtcttcgctgatcccaatatgcttgatacgttggtgcctgctcacccagccctcgtcaatgccattgtcctggttctgcactccgtagcaggcagtgccccaatgcctgggactgactcctcttcccggagcatgccctccagctcataccgggatatgccaggtggcttcctgtttgaagggctctcagatgatgaggatgactttcacccaaacaccaggtccacaccctctagcagtactcccagctcccgcccagcctccctggggtacagtggagctgctgggccccggcccatcacccagagtgagctggccaccgccttggccctggccagcactccggagagcagctctcacacaccgactcctggcacccagaccagggtcattctcaggactcacaatgtctcttgtgtcnntcggagccatacatgnttttagcaggcctagaggcctagcctgggccgcttgagccgtgggccgtgtggtaggatggtccgggagtgtctggcccggccgggagaccaccgggactttgggcccgcctccgccccggagcgggggggggcccctcggtaaagggggggcgcgcgttgtaggggtgtgcgtgtgtttttttttgtatgct

SEQ ID NO: 367392 - DNA, 1378 bp, Homo sapiens
actatgaaaatgctttaatggtggtgtctgtacagcatggatgtggacagggaaaacagcaagtgcacacagtgggacaggccacaggacaggctgggagtgaataaagagttcacactgcttccctgctttccccagtgactgaaggctctaggccacctcctcctcagcctcctcctcgaactcgccctcctcctcggctgtggcatcctggtactgctggtactcggacaccaggtcattcatgttgctctcggcctcggtgaactccatctcgtccatgccctcgcccgtgtaccagtgcaggaaggccttgcgccggaacatggccgtgaactgctcggagctcgtgccgaattcggcacgagtctctctctctctctctctctctctctctctctcctcgggccgctgatcagaaaccggaacctgtggacaaagtggctgccatgagagagttccgggtgttgcacactgccctgcacagcagctcctcttacagggaggcggtctttaagatgctcagcaataaggagtctctggatcagatcattgtggccaccccaggcctcagcagtgaccctattgctcttggggttctccaggacaaggacctcttctctgtcttcgctgatcccaatatgcttgatacgttggtgcctgctcacccagccctcgtcaatgccattgtcctggttctgcactccgtagcaggcagtgccccaatgcctgggactgactcctcttcccggagcatgccctccagctcataccgggatatgccaggtggcttcctgtttgaagggctctcagatgatgaggatgactttcacccaaacaccaggtccacaccctctagcagtactcccagctcccgcccagcctccctggggtacagtggagctgctgggccccggcccatcacccagagtgagctggccaccgccttggccctggccagcactccggagagcagctctcacacaccgactcctggcacccagggtcattcctcagggacctcaccaatgtcctctggtgtccagtcagggacgcccatcaccaatgatctcttcagccaagccctacagcatgcccttcaggcctctgggcagcccagccttcagagccagtggcagccccagctgcagcagctacgtgacatgggcatccaggacgatgagctgagcctgcgggccctgcaggccaccggtggggacatccaagcagccctggagctcatctttgctggaggagccccatgaactccctgcttcccctgaacccccagcaagttgcagaggctactgcccttgggaggcactcatgaaggtgcctccatctctcccttccccaatatacctgatggtcaactctc

SEQ ID NO: 367393 - DNA, 613 bp, Homo sapiens
aatctgttcgtcctcctccaggtggcttcctgtttgaagggctctcagatgatgaggatgactttcacccaaacaccaggtccacaccctctagcagtactcccagctcccgcccagcctccctggggtacagtggagctgctgggccccggcccatcacccagagtgagctggccaccgccttggccctggccagcactccggagagcagctctcacacaccgactcctggcacccagggtcattcctcagggacctcaccaatgtcctctggtgtccagtcagggacgcccatcaccaatgatctcttcagccaagccctacagcatgcccttcaggcctctgggcagcccagccttcagagccagtggcagccccagctgcagcagctacgtgacatgggcatccaggacgatgagctgagcctgcgggccctgcaggccaccggtggggacatccaagcagccctggagctcatctttgctggaggagccccatgaactccctgcttcccctgaacccccagcaagttgcagaggctactgcccttgggaggcactcatgaaggtgcctccatctctcccttccccaatatacctgatggtcaactctc

SEQ ID NO: 367394 - DNA, 824 bp, Homo sapiens
tacagcggctggtacggcccggagtgtttgggatgcggccgggttccttccgcgggacgggtgagggcgctggggccctgggcagcgcgggctcgatgtgtgtcagccaagtagctggtcccactggagcgggagaaagagagagcgcgaaagagagaggatgtctctctcagactggcacctggcggtgaagctggctgaccagccacttactccaaagtctattcttcggttgccagagacagaactgggagaatactcgctagggggctatagtatttcatttctgaagcagcttattgctggcaaactccaggagtctgttccagaccctgagctgattgatctgatctactgtggtcggaagctaaaagatgaccagacacttgacttctatggcattcaacctgggtccactgtccatgttctgcgaaagtcctggcctgaacctgatcagaaaccggaacctgtggacaaagtggctgccatgagagagttccgggtgttgcacactgccctgcacagcagctcctcttacagggaggcggtctttaagatgctcagcaataaggagtctctggatcagatcattgtggccaccccaggcctcagcagtgaccctattgctcttggtaagtgcaggactgaatttgaggaaataggagttgtcggaaaaggagaaaacaggagaagacaattcctctaaagagacttggactatcttttgaagaatgactggtcttgtgggaagagggagagtaatcaaggtgtgtttgatatccccagccctttaagagctctcagtcccacagagagataatggc

SEQ ID NO: 367395 - DNA, 1603 bp, Homo sapiens
acagtgagaatggggaaagtcagctaagtgacaagcagttgttgaaacaaatacttgatcagaatggtggaagtgatatgggctaggagcaactaagagagtcatttcaaggtaaataggatttgtggccgccctgtaagaacacccacacaaagcccccgttgttcttttgatcagagcaaagagaagcatggaatgaagaccaccacaaggaacagtgaagagacgcttgccaacagaagaaaagaatttatcaacagccttcgactgtacaggtcattctatggaggtctagctgatcagctttgtgctaatgaattagctgctgcagatggacttccctgctggaatggagaagatatagtaaaaagttatactcagcgtgtggttggaaatggaatcaaagcccagtctggaaatcctgaagtcaaagtcaaaggaattgatcctgtgataaatcagattattgataaactgaagcatgttgttcagttgttacagggtagatcacccaaacctgacaagtgggaacttcttcagctgggcagtggtggaggcatggttgaacaagtcagtggggactgtgatgatgaagatggttgcgggggatcaggaagtggagaagtcaagaggacactgaagatcacagactggatgccagatgatatgaacttcagtgatgtaaagcaaatccatcaaacagacactggcagtactttagacacaacaggagcaggatgtgcagtggcgactgaatctatgacattcactctgataagtgtggtgatgttacttcccgggatttggtaactgaactcttctgtcctgacataccttactgaagtctcgatttcttctctctctgcatatgcctggaataagagatcctttttcaatgtaacaattatatttatgaaaagatatgttacactaacttctcagaagccaagctgaaatattcataaagtccctaaaactcaacgtttaaatgacacactttaaaaatatgtcttttttcaatctaactgaaaaccttcttaacttctaatatattaaatctgaagatgtgaagggcacagaagtgactttgaataagaagaatttagtgtatctgtaattttattatcaattccaagccccttcctttctaaattaaaaatgttttcatttgaaagtgtatttgccagacaatgaaaacagtatgcagtatttcttaaagtattgaaattagaatatcatgaaataaatcaaaacatacaatggcaagtagtatgcatgcatattcaagagactcttccatttttgcaagctgtagaaggaaatgtctgaatgtctataagttatggggtagattcttgagaagcatttcatataatttcactgaagaaccttgataattttgacccactgtaacttagccactgatgaaccttaaagctgagtattttattaacacctgatttgtattctattatattcaaaatgcatctttggtattgtgcctctgctcccatctctctctttgcctcatagatttagctatgttgggaagcacatgcttgctctaggaatatctccaataaagctgttaactatttggtgg

SEQ ID NO: 367396 - DNA, 2905 bp, Homo sapiens
aggcggcggcgagccgagccgggcggcggcggcagtggcggcagtggcggcagcggcagcagttgcagcagtggtggccagagcggatgcttgcgggctccctgcggctccactagttttcttcgccccgcccagccgcccactcttctcggctagggaagaagaccagagggtgctcagctggaaaactctggtgtctcagcttagggcctcctccgggaagagctaactgctcccaggtgaagccggtgcccgcgggcggtccgtacaccccgcagccggctcgcaccgctcgagagcctcggccgctgtgtcttccacgtctgcagctcagccagggcgcgcagggcgagtggggtccactggcgggtaaaggggaccaggacggcgaggatggacgcacagacctggcccgtgggctttcgctgcctcctccttctggccctggttgggtccgcccgcagcgagggcgtgcagacctgcgaagaagttcggaaacttttccagtggcggctgctgggagctgtcagggggctgccggattcgccgcgggcaggacctgatcttcaggtttgcatatccaaaaagcctacatgttgcaccaggaagatggaggagagatatcagattgcggctcgccaggatatgcagcagtttcttcaaacgtccagctctacattaaagtttctaatatctcgaaatgcggctgcttttcaagaaacccttgaaactctcatcaaacaagcagaaaattacaccagtatacttttttgcagtacctacaggaacatggccttggaggctgctgcttcggttcaggagttcttcactgatgtggggctgtatttatttggtgcggatgttaatcctgaagaatttgtaaacagattttttgacagtctttttcctctggtctacaaccacctcattaaccctggtgtgactgacagttccctggaatactcagaatgcatccggatggctcgccgggatgtgagtccatttggtaatattccccaaagagtaatgggacagatggggaggtccctgctgcccagccgcacttttctgcaggcactcaatctgggcattgaagtcatcaacaccacagactatctgcacttctccaaagagtgcagcagagccctcctgaagatgcaatactgcccgcactgccaaggcctggcgctcactaagccttgtatgggatactgcctcaatgtcatgcgaggctgcctggcgcacatggcggagcttaatccacactggcatgcatatatccggtcgttggaagaactctcggatgcaatgcatggaacatacgacattggacacgtgctgctgaactttcacttgcttgttaatgatgctgtgttacaggctcacctcaatggacaaaaattattggaacaggtaaataggatttgtggccgccctgtaagaacacccacacaaagcccccgttgttcttttgatcagagcaaagagaagcatggaatgaagaccaccacaaggaacagtgaagagacgcttgccaacagaagaaaagaatttatcaacagccttcgactgtacaggtcattctatggaggtctagctgatcagctttgtgctaatgaattagctgctgcagatggacttccctgctggaatggagaagatatagtaaaaagttatactcagcgtgtggttggaaatggaatcaaagcccagtctggaaatcctgaagtcaaagtcaaaggaattgatcctgtgataaatcagattattgataaactgaagcatgttgttcagttgttacagggtagatcacccaaacctgacaagtgggaacttcttcagctgggcagtggtggaggcatggttgaacaagtcagtggggactgtgatgatgaagatggttgcgggggatcaggaagtggagaagtcaagaggacactgaagatcacagactggatgccagatgatatgaacttcagtgatgtaaagcaaatccatcaaacagacactggcagtactttagacacaacaggagcaggatgtgcagtggcgactgaatctatgacattcactctgataagtgtggtgatgttacttcccgggatttggtaactgaactcttctgtcctgacataccttactgaagtctcgatttcttctctctctgcatatgcctggaataagagatcctttttcaatgtaacaattatatttatgaaaagatatgttacactaacttctcagaagccaagctgaaatattcataaagtccctaaaactcaacgtttaaatgacacactttaaaaatatgtcttttttcaatctaactgaaaaccttcttaacttctaatatattaaatctgaagatgtgaagggcacagaagtgactttgaataagaagaatttagtgtatctgtaattttattatcaattccaagccccttcctttctaaattaaaaatgttttcatttgaaagtgtatttgccagacaatgaaaacagtatgcagtatttcttaaagtattgaaattagaatatcatgaaataaatcaaaacatacaatggcaagtagtatgcatgcatattcaagagactcttccatttttgcaagctgtagaaggaaatgtctgaatgtctataagttatggggtagattcttgagaagcatttcatataatttcactgaagaaccttgataattttgacccactgtaacttagccactgatgaaccttaaagctgagtattttattaacacctgatttgtattctattatattcaaaatgcatctttggtattgtgcctctgctcccatctctctctttgcctcatagatttagctatgttgggaagcacatgcttgctctaggaatatctccaataaagctgttaactatttggtgg

SEQ ID NO: 367397 - DNA, 931 bp, Homo sapiens
ggggcagtctcttttctctcctcacctgacggctcccctccgcgcctccgggggctccctcaggcctccccacggtcatttcagctggacagaggcagcagcgacagtgacagcgatagtggcagcagcggtggcagcgagagctatgcggggccagggtccacccctttctagctttggcgtctggttggcttccagggcagcctccgatccatcccgcccgaggaggcaaggatatgatattcactttcatgacaagaaaatcctgttgctcgaagcaggtccaaagaaagtactggagaaattgtcagaaacttacagcaacagggtcagctccatttcccctggctctgcaacgcttctcagtagtgtgggacgcctgctcagaggccctgataatgtttgataaggataatttagatgacatgggctatatcgtggagaatgatgtcatcatgcatgctctcactaagcagttggaggctgtgtctgaccgagtgacggttctctacaggagcaaagccattcgctatacctggccttgtccatttcctatggccgactccagcccttgggttcatattaccctaggtgatggcagcaccttccagaccaaattgttgataggtgcagatggtcacaactccggagtacggcaggctgttggaatccagaatgtgagctggaactatgaccagtctgctgttgtggctactctgcatttatcagaggccacagaaaacaacgtagcctggcagagatttcttccctctgggcctattgctctgctcccgctctcagacaccttgagttccttggtttggtccacgtcccatgaacatgcagcagagctagttagcatggatgaggaaaaatttgtggatgccgttaactctgcctttgtgagtatcaatttacccagctgatgatg

SEQ ID NO: 367398 - DNA, 356 bp, Homo sapiens
cagtgagctatgatcacaccactgcactccagcccagtcaacagagtgagaccctgtctctaaaacgtgtgtatatgtatgtatatttttctttttttagctgaaataaaacaaggacacttgggaagaatacctacgtgattattatctacaataattattttcttcaccttactgtgttaagagtttcattcacttttattttttctccaggaacagattatggcctttgcaagcaaatgagtactcctctcctaaagaaagattacgttgatgaaaaagaacatcctgcccaggacccatcatacatattttcaagatcttatttaatttaataaacttactttacattaaaa

SEQ ID NO: 367399 - DNA, 443 bp, Homo sapiens
tgtaaaatccatggaacatctttagtacattgtaggtgctcaacaaatactaataattctggagtagacacagcctttggataatatgggtaccagtattacttttggagcctaaatgacactcaaagcctgctaccttcacaccaaagactccactgctctgtagtagcaacaagaataaagggaactgaacatactgaaatggattccgagataaatggtgaacactaccctactctgggccatttagtatatattcctggcacaggtctaggtcctctgcagtgcagtcattcaccattaattgtcctttctatgtagcaggctctggagatactgagaacagtctccgctttcaggaagttcatagtcaagtaaggaagaccgtaaatgacaatctccgtacagtgatagaagtatgcataggatgctgtggaagcata

SEQ ID NO: 367400 - DNA, 4186 bp, Homo sapiens
cgggacgggattggagtgctctgctccggacgcactacgtaggtgggcctgcgggagttctgagtgcgacggcgcaggtctgcaccatggcggcccggcttgtcagccgatgcggggctgtgcgtgcagctccccacagcggcccgctggtgtcctggcgcaggtggtccggcgcctcaacagacaccgtgtatgacgtggtggtgtcgggtggaggcctggtgggcgctgccatggcctgtgccttgggatatgatattcactttcatgacaagaaaatcctgttgctcgaagcaggtccaaagaaagtactggagaaattgtcagaaacttacagcaacagggtcagctccatttcccctggctctgcaacgcttctcagtagttttggtgcctgggaccatatctgcaacatgagatacagagcctttcggcgaatgcaggtgtgggacgcctgctcagaggccctgataatgtttgataaggataatttagatgacatgggctatatcgtggagaatgatgtcatcatgcatgctctcactaagcagttggaggctgtgtctgaccgagtgacggttctctacaggagcaaagccattcgctatacctggccttgtccatttcctatggccgactccagcccttgggttcatattaccctaggtgatggcagcaccttccagaccaaattgttgataggtgcagatggtcacaactccggagtacggcaggctgttggaatccagaatgtgagctggaactatgaccagtctgctgttgtggctactctgcatttatcagaggccacagaaaacaacgtagcctggcagagatttcttccctctgggcctattgctctgctcccgctctcagacaccttgagttccttggtttggtccacgtcccatgaacatgcagcagagctagttagcatggatgaggaaaaatttgtggatgccgttaactctgccttttggagtgatgctgaccacacggacttcatcgacacagctggtgccatgctgcagtatgctgtcagccttctgaagcccactaaggtctcggctcgccagctgcccccaagcgtagccagggtggatgccaaaagccgagttctgtttcctcttgggttgggacatgctgctgagtacgtcaggcctcgggtggcgctcattgggtaagacgataacagagcagggccactcccttctcactttgctgccagaggtcacacctgaactctgctttattcttagggatgcagcccacagagtccatccgcttgcaggacagggtgtcaacatgggctttggggatatctccagcttggcccatcacctcagtacggcagccttcaatgggaaggacttaggtaaggattcagatactatggggaagtatccagaggtcatatagttaggcaagatcagggcccacagtagcaagagggagtggacataaaatatatctggcttgctaggagatggaagaaaaccttattattggattagggatttaatctttcctctgcccttcaggttccgtgagccacctcacaggttatgaaacagaaagacagcgtcacaacactgctcttctggctgctacagacttactaaaaaggctctattctaccagtgcctccccgcttgtgttgctcaggacgtggggcttgcaggccacaaatgcagtgtctccactcaaagaacagattatggcctttgcaagcaaatgagtactcctctcctaaagaaagattacgttgatgaaaaagaacatcctgcccaggacccatcatacatattttcaagatcttatttaatttaataaacttactttacattaaaattctctttttcttctttgcttaatgggcctgtggcacccaaataatgaatgataatttgctgtgaggagcgtatattagccagaccaaaggaaaaaacttcgaaggaagacttacaatttggttgaaaagagctttttattactaaaaaacccacaaggtgctgtctcactcatttccagttaatcatttctaaagagaaaatttacattttgtttttgttttaatgttggtcataaatttatacagttgttttttgatagaggtaagaattagactcgatgcatttttgttagaattgctgtttaaatgttaacatcagaatgcaaattaaatataaattgctttaacctttgttacaggtatactggactttctgaaaggaaaaccaggtctcattaatgctagttattactttatcacagcaccagatttccattttatttatggttcctctctgggacaccactgtcggtttaataaaacaataaataattcattgcacagatccgaagacctcaggaaccagatcacaagggaaaccgattagcagcagaatttgttcatgtttggtggcagactggtggccaactggagggaggggagttttactgtgggtttttgaagaggtctcgtcacaagaccagagatgcctcttgaagagatttttaggttgtaggtttgcttactctaaagaacatcttgcccagaagtctgatttgagatgaaatgaagagaaacagtctgcttttgaaccaagtaaggtattcttgggaataatttttagagccatgagaaatctattcttacaggggtgcttttcaggcaaatgcagaaaatttaaaagagtctagaacaaaaaagtgacaatgtcacaaccttgctggaatctcaggaaaaagaattaaagatggcagctgctgtgaaaagctgtgtgactcctggcggagactgcagggacaaggtcatctttcacaaaaaatggaaaggtggcctagatgaggaggacacagactctccagaagttatgcaaacaaaatcaggcaagatgaagaattttaaggcacacctccattggcccacagagagtgttcttcatatgacaatgatgttaaacaccatctgtcacgtaccaggccatgtcctaagtattttaaatatgttaacacatctacaaagaggaaactattagaatctgtaggacctcttaagcccaaagggtctactgcaggcaggatgggcgttacagaaaaaaataaaaactctcattccaaattgctcctaagatggacaaattggttacttctccagaaggtctaatcaaggttaacaaaataggtaagttcgtggagttagaatgcatcttccctggagttcagaggtatttgggatgaccaaaggagtctgctggacagtatgtgtgttttacaaaatggcccccacagtgattaaagaccagagacttatatctctgcatttgtcaagctggaacagtctttagtgaacacagcttacctcttttaaaactgctggtttctactgaaggaaacatggatgacatttagtgttctgtgactggtctggcaccctacttttgttgacaaagatgggaaggggtctaaaagtcatgtcacttataaaagaacttgggaggaacttttttcaaaagatccaaagattttggaaggagagattagagcagaactaagaccacttagaagataggtagatttcagctcaatataaggaatttttttttaatatcagtgcagttccaaatggaataagctgtttgaacatggcttagcagaagctgaatgacaacctgttagaaattctagggaattctgcactgagtacaacattggattatttctttgggctgtttccaactcaagattctgttatttcattataagcattttgaggaaggcagttggtataaaggtgaccttagtaataaaagtcagtgtgaagtctaaagaaattccacaatgaatttaaagacaagaattttagggacaaggatacagaaatttgcctagtaacttgcacacagcagatggtaaatatttattgactcaatggagtaatgttaaaaataaggtttcccatggactgtgtgagggccaggcatacttaacatcctttgtgagagagaggatggaaacggagtctactgtgaaagccacaagttttggggaaatacactcctgcaaagaagctggaggttaacaaccaaggcaaaggggccagaccacagggagatcttccaggtccaagagcactgcagggcagatgagaagcagggatgattatgttgaaagtgcaagataa

SEQ ID NO: 367401 - DNA, 3888 bp, Homo sapiens
cgggacgggattggagtgctctgctccggacgcactacgtaggtgggcctgcgggagttctgagtgcgacggcgcaggtctgcaccatggcggcccggcttgtcagccgatgcggggctgtgcgtgcagctccccacagcggcccgctggtgtcctggcgcaggtggtccggcgcctcaacagacaccgtgtatgacgtggtggtgtcgggtggaggcctggtgggcgctgccatggcctgtgccttgggatatgatattcactttcatgacaagaaaatcctgttgctcgaagcaggtccaaagaaagtactggagaaattgtcagaaacttacagcaacagggtcagctccatttcccctggctctgcaacgcttctcagtagttttggtgcctgggaccatatctgcaacatgagatacagagcctttcggcgaatgcaggtgtgggacgcctgctcagaggccctgataatgtttgataaggataatttagatgacatgggctatatcgtggagaatgatgtcatcatgcatgctctcactaagcagttggaggctgtgtctgaccgagtgacggttctctacaggagcaaagccattcgctatacctggccttgtccatttcctatggccgactccagcccttgggttcatattaccctaggtgatggcagcaccttccagaccaaattgttgataggtgcagatggtcacaactccggagtacggcaggctgttggaatccagaatgtgagctggaactatgaccagtctgctgttgtggctactctgcatttatcagaggccacagaaaacaacgtagcctggcagagatttcttccctctgggcctattgctctgctcccgctctcagacaccttgagttccttggtttggtccacgtcccatgaacatgcagcagagctagttagcatggatgaggaaaaatttgtggatgccgttaactctgccttttggagtgatgctgaccacacggacttcatcgacacagctggtgccatgctgcagtatgctgtcagccttctgaagcccactaaggtctcggctcgccagctgcccccaagcgtagccagggtggatgccaaaagccgagttctgtttcctcttgggttgggacatgctgctgagtacgtcaggcctcgggtggcgctcattggggatgcagcccacagagtccatccgcttgcaggacagggtgtcaacatgggctttggggatatctccagcttggcccatcacctcagtacggcagccttcaatgggaaggacttaggttccgtgagccacctcacaggttatgaaacagaaagacagcgtcacaacactgctcttctggctgctacagacttactaaaaaggctctattctaccagtgcctccccgcttgtgttgctcaggacgtggggcttgcaggccacaaatgcagtgtctccactcaaagaacagattatggcctttgcaagcaaatgagtactcctctcctaaagaaagattacgttgatgaaaaagaacatcctgcccaggacccatcatacatattttcaagatcttatttaatttaataaacttactttacattaaaattctctttttcttctttgcttaatgggcctgtggcacccaaataatgaatgataatttgctgtgaggagcgtatattagccagaccaaaggaaaaaacttcgaaggaagacttacaatttggttgaaaagagctttttattactaaaaaacccacaaggtgctgtctcactcatttccagttaatcatttctaaagagaaaatttacattttgtttttgttttaatgttggtcataaatttatacagttgttttttgatagaggtaagaattagactcgatgcatttttgttagaattgctgtttaaatgttaacatcagaatgcaaattaaatataaattgctttaacctttgttacaggtatactggactttctgaaaggaaaaccaggtctcattaatgctagttattactttatcacagcaccagatttccattttatttatggttcctctctgggacaccactgtcggtttaataaaacaataaataattcattgcacagatccgaagacctcaggaaccagatcacaagggaaaccgattagcagcagaatttgttcatgtttggtggcagactggtggccaactggagggaggggagttttactgtgggtttttgaagaggtctcgtcacaagaccagagatgcctcttgaagagatttttaggttgtaggtttgcttactctaaagaacatcttgcccagaagtctgatttgagatgaaatgaagagaaacagtctgcttttgaaccaagtaaggtattcttgggaataatttttagagccatgagaaatctattcttacaggggtgcttttcaggcaaatgcagaaaatttaaaagagtctagaacaaaaaagtgacaatgtcacaaccttgctggaatctcaggaaaaagaattaaagatggcagctgctgtgaaaagctgtgtgactcctggcggagactgcagggacaaggtcatctttcacaaaaaatggaaaggtggcctagatgaggaggacacagactctccagaagttatgcaaacaaaatcaggcaagatgaagaattttaaggcacacctccattggcccacagagagtgttcttcatatgacaatgatgttaaacaccatctgtcacgtaccaggccatgtcctaagtattttaaatatgttaacacatctacaaagaggaaactattagaatctgtaggacctcttaagcccaaagggtctactgcaggcaggatgggcgttacagaaaaaaataaaaactctcattccaaattgctcctaagatggacaaattggttacttctccagaaggtctaatcaaggttaacaaaataggtaagttcgtggagttagaatgcatcttccctggagttcagaggtatttgggatgaccaaaggagtctgctggacagtatgtgtgttttacaaaatggcccccacagtgattaaagaccagagacttatatctctgcatttgtcaagctggaacagtctttagtgaacacagcttacctcttttaaaactgctggtttctactgaaggaaacatggatgacatttagtgttctgtgactggtctggcaccctacttttgttgacaaagatgggaaggggtctaaaagtcatgtcacttataaaagaacttgggaggaacttttttcaaaagatccaaagattttggaaggagagattagagcagaactaagaccacttagaagataggtagatttcagctcaatataaggaatttttttttaatatcagtgcagttccaaatggaataagctgtttgaacatggcttagcagaagctgaatgacaacctgttagaaattctagggaattctgcactgagtacaacattggattatttgaaggcagttggtataaaggtgaccttagtaataaaagtcagtgtgaagtctaaagaaattccacaatgaatttaaagacaagaattttagggacaaggatacagaaatttgcctagtaacttgcacacagcagatggtaaatatttattgactcaatggagtaatgttaaaaataaggtttcccatggactgtgtgagggccaggcatacttaacatcctttgtgagagagaggatggaaacggagtctactgtgaaagccacaagttttggggaaatacactcctgcaaagaagctggaggttaacaaccaaggcaaaggggccagaccacagggagatcttccaggtccaagagcactgcagggcagatgagaagcagggatgattatgttgaaagtgcaagataa

SEQ ID NO: 367402 - DNA, 4634 bp, Homo sapiens
cgggacgggattggagtgctctgctccggacgcactacgtaggtgggcctgcgggagttctgagtgcgacggcgcaggtctgcaccatggcggcccggcttgtcagccgatgcggggctgtgcgtgcagctccccacagcggcccgctggtgtcctggcgcaggtggtccggcgcctcaacagacaccgtgtatgacgtggtggtgtcgggtggaggcctggtgggcgctgccatggcctgtgccttgggatatgatattcactttcatgacaagaaaatcctgttgctcgaagcaggtccaaagaaagtactggagaaattgtcagaaacttacagcaacagggtcagctccatttcccctggctctgcaacgcttctcagtagttttggtgcctgggaccatatctgcaacatgagatacagagcctttcggcgaatgcaggtgtgggacgcctgctcagaggccctgataatgtttgataaggataatttagatgacatgggctatatcgtggagaatgatgtcatcatgcatgctctcactaagcagttggaggctgtgtctgaccgagtgacggttctctacaggagcaaagccattcgctatacctggccttgtccatttcctatggccgactccagcccttgggttcatattaccctaggtgatggcagcaccttccagaccaaattgttggtagttgaagattcttattttgctaggggtcttgtatatctacatcttatcctagattctagggactctggttttcgatttaagctatagtttaattttaggcaaaacttttggttatgaggaccagtacctattcaggccagctcaagtggagatggtctcatcgtaaatcctgtacagggagcaatctcatgggccgtcttaggttgtgaaataacagatagctgggcctcacaggacaggcaccagagtgttgggaatggaggctgttctttccctctgaggagtctgtggtcattgatctcttgcctctcatttttctcctttctgctcacaagcttccctttttgcatggtagccattcctaaccctacatcagaactattcagctccagtgtgtgccccatactgaaactttccttattgctctctagttcaaatatcaggagggcctggctgagtttaactcatggctggcacctgttcagtcatgtccagctttggctctgttggctgaggctgatgtgacagtgcaggggctccacctctaggggctgtgagtgaagcaggcctgatggaattatcctgccacacaacaatcagagctggaggaaactttagggagcagagaaaaacttctgaagcagtttatgaagaggctggaagacttagcaggctcatgtgtccatgcagataggtgcagatggtcacaactccggagtacggcaggctgttggaatccagaatgtgagctggaactatgaccagtctgctgttgtggctactctgcatttatcagaggccacagaaaacaacgtagcctggcagagatttcttccctctgggcctattgctctgctcccgctctcagacaccttgagttccttggtttggtccacgtcccatgaacatgcagcagagctagttagcatggatgaggaaaaatttgtggatgccgttaactctgccttttggagtgatgctgaccacacggacttcatcgacacagctggtgccatgctgcagtatgctgtcagccttctgaagcccactaaggtctcggctcgccagctgcccccaagcgtagccagggtggatgccaaaagccgagttctgtttcctcttgggttgggacatgctgctgagtacgtcaggcctcgggtggcgctcattggggatgcagcccacagagtccatccgcttgcaggacagggtgtcaacatgggctttggggatatctccagcttggcccatcacctcagtacggcagccttcaatgggaaggacttaggttccgtgagccacctcacaggttatgaaacagaaagacagcgtcacaacactgctcttctggctgctacagacttactaaaaaggctctattctaccagtgcctccccgcttgtgttgctcaggacgtggggcttgcaggccacaaatgcagtgtctccactcaaagaacagattatggcctttgcaagcaaatgagtactcctctcctaaagaaagattacgttgatgaaaaagaacatcctgcccaggacccatcatacatattttcaagatcttatttaatttaataaacttactttacattaaaattctctttttcttctttgcttaatgggcctgtggcacccaaataatgaatgataatttgctgtgaggagcgtatattagccagaccaaaggaaaaaacttcgaaggaagacttacaatttggttgaaaagagctttttattactaaaaaacccacaaggtgctgtctcactcatttccagttaatcatttctaaagagaaaatttacattttgtttttgttttaatgttggtcataaatttatacagttgttttttgatagaggtaagaattagactcgatgcatttttgttagaattgctgtttaaatgttaacatcagaatgcaaattaaatataaattgctttaacctttgttacaggtatactggactttctgaaaggaaaaccaggtctcattaatgctagttattactttatcacagcaccagatttccattttatttatggttcctctctgggacaccactgtcggtttaataaaacaataaataattcattgcacagatccgaagacctcaggaaccagatcacaagggaaaccgattagcagcagaatttgttcatgtttggtggcagactggtggccaactggagggaggggagttttactgtgggtttttgaagaggtctcgtcacaagaccagagatgcctcttgaagagatttttaggttgtaggtttgcttactctaaagaacatcttgcccagaagtctgatttgagatgaaatgaagagaaacagtctgcttttgaaccaagtaaggtattcttgggaataatttttagagccatgagaaatctattcttacaggggtgcttttcaggcaaatgcagaaaatttaaaagagtctagaacaaaaaagtgacaatgtcacaaccttgctggaatctcaggaaaaagaattaaagatggcagctgctgtgaaaagctgtgtgactcctggcggagactgcagggacaaggtcatctttcacaaaaaatggaaaggtggcctagatgaggaggacacagactctccagaagttatgcaaacaaaatcaggcaagatgaagaattttaaggcacacctccattggcccacagagagtgttcttcatatgacaatgatgttaaacaccatctgtcacgtaccaggccatgtcctaagtattttaaatatgttaacacatctacaaagaggaaactattagaatctgtaggacctcttaagcccaaagggtctactgcaggcaggatgggcgttacagaaaaaaataaaaactctcattccaaattgctcctaagatggacaaattggttacttctccagaaggtctaatcaaggttaacaaaataggtaagttcgtggagttagaatgcatcttccctggagttcagaggtatttgggatgaccaaaggagtctgctggacagtatgtgtgttttacaaaatggcccccacagtgattaaagaccagagacttatatctctgcatttgtcaagctggaacagtctttagtgaacacagcttacctcttttaaaactgctggtttctactgaaggaaacatggatgacatttagtgttctgtgactggtctggcaccctacttttgttgacaaagatgggaaggggtctaaaagtcatgtcacttataaaagaacttgggaggaacttttttcaaaagatccaaagattttggaaggagagattagagcagaactaagaccacttagaagataggtagatttcagctcaatataaggaatttttttttaatatcagtgcagttccaaatggaataagctgtttgaacatggcttagcagaagctgaatgacaacctgttagaaattctagggaattctgcactgagtacaacattggattatttctttgggctgtttccaactcaagattctgttatttcattataagcattttgaggaaggcagttggtataaaggtgaccttagtaataaaagtcagtgtgaagtctaaagaaattccacaatgaatttaaagacaagaattttagggacaaggatacagaaatttgcctagtaacttgcacacagcagatggtaaatatttattgactcaatggagtaatgttaaaaataaggtttcccatggactgtgtgagggccaggcatacttaacatcctttgtgagagagaggatggaaacggagtctactgtgaaagccacaagttttggggaaatacactcctgcaaagaagctggaggttaacaaccaaggcaaaggggccagaccacagggagatcttccaggtccaagagcactgcagggcagatgagaagcagggatgattatgttgaaagtgcaagataa

SEQ ID NO: 367403 - DNA, 3707 bp, Homo sapiens
cggaaaccgggccgcggaggcacgatgagagccgtgagagccctagcacgacttgcccaaagacaatttctcaggatatgatattcactttcatgacaagaaaatcctgttgctcgaagcaggtccaaagaaagtactggagaaattgtcagaaacttacagcaacagggtcagctccatttcccctggctctgcaacgcttctcagtagtgtgggacgcctgctcagaggccctgataatgtttgataaggataatttagatgacatgggctatatcgtggagaatgatgtcatcatgcatgctctcactaagcagttggaggctgtgtctgaccgagtgacggttctctacaggagcaaagccattcgctatacctggccttgtccatttcctatggccgactccagcccttgggttcatattaccctaggtgatggcagcaccttccagaccaaattgttgataggtgcagatggtcacaactccggagtacggcaggctgttggaatccagaatgtgagctggaactatgaccagtctgctgttgtggctactctgcatttatcagaggccacagaaaacaacgtagcctggcagagatttcttccctctgggcctattgctctgctcccgctctcagacaccttgagttccttggtttggtccacgtcccatgaacatgcagcagagctagttagcatggatgaggaaaaatttgtggatgccgttaactctgccttttggagtgatgctgaccacacggacttcatcgacacagctggtgccatgctgcagtatgctgtcagccttctgaagcccactaaggtctcggctcgccagctgcccccaagcgtagccagggtggatgccaaaagccgagttctgtttcctcttgggttgggacatgctgctgagtacgtcaggcctcgggtggcgctcattggggatgcagcccacagagtccatccgcttgcaggacagggtgtcaacatgggctttggggatatctccagcttggcccatcacctcagtacggcagccttcaatgggaaggacttaggttccgtgagccacctcacaggttatgaaacagaaagacagcgtcacaacactgctcttctggctgctacagacttactaaaaaggctctattctaccagtgcctccccgcttgtgttgctcaggacgtggggcttgcaggccacaaatgcagtgtctccactcaaagaacagattatggcctttgcaagcaaatgagtactcctctcctaaagaaagattacgttgatgaaaaagaacatcctgcccaggacccatcatacatattttcaagatcttatttaatttaataaacttactttacattaaaattctctttttcttctttgcttaatgggcctgtggcacccaaataatgaatgataatttgctgtgaggagcgtatattagccagaccaaaggaaaaaacttcgaaggaagacttacaatttggttgaaaagagctttttattactaaaaaacccacaaggtgctgtctcactcatttccagttaatcatttctaaagagaaaatttacattttgtttttgttttaatgttggtcataaatttatacagttgttttttgatagaggtaagaattagactcgatgcatttttgttagaattgctgtttaaatgttaacatcagaatgcaaattaaatataaattgctttaacctttgttacaggtatactggactttctgaaaggaaaaccaggtctcattaatgctagttattactttatcacagcaccagatttccattttatttatggttcctctctgggacaccactgtcggtttaataaaacaataaataattcattgcacagatccgaagacctcaggaaccagatcacaagggaaaccgattagcagcagaatttgttcatgtttggtggcagactggtggccaactggagggaggggagttttactgtgggtttttgaagaggtctcgtcacaagaccagagatgcctcttgaagagatttttaggttgtaggtttgcttactctaaagaacatcttgcccagaagtctgatttgagatgaaatgaagagaaacagtctgcttttgaaccaagtaaggtattcttgggaataatttttagagccatgagaaatctattcttacaggggtgcttttcaggcaaatgcagaaaatttaaaagagtctagaacaaaaaagtgacaatgtcacaaccttgctggaatctcaggaaaaagaattaaagatggcagctgctgtgaaaagctgtgtgactcctggcggagactgcagggacaaggtcatctttcacaaaaaatggaaaggtggcctagatgaggaggacacagactctccagaagttatgcaaacaaaatcaggcaagatgaagaattttaaggcacacctccattggcccacagagagtgttcttcatatgacaatgatgttaaacaccatctgtcacgtaccaggccatgtcctaagtattttaaatatgttaacacatctacaaagaggaaactattagaatctgtaggacctcttaagcccaaagggtctactgcaggcaggatgggcgttacagaaaaaaataaaaactctcattccaaattgctcctaagatggacaaattggttacttctccagaaggtctaatcaaggttaacaaaataggtaagttcgtggagttagaatgcatcttccctggagttcagaggtatttgggatgaccaaaggagtctgctggacagtatgtgtgttttacaaaatggcccccacagtgattaaagaccagagacttatatctctgcatttgtcaagctggaacagtctttagtgaacacagcttacctcttttaaaactgctggtttctactgaaggaaacatggatgacatttagtgttctgtgactggtctggcaccctacttttgttgacaaagatgggaaggggtctaaaagtcatgtcacttataaaagaacttgggaggaacttttttcaaaagatccaaagattttggaaggagagattagagcagaactaagaccacttagaagataggtagatttcagctcaatataaggaatttttttttaatatcagtgcagttccaaatggaataagctgtttgaacatggcttagcagaagctgaatgacaacctgttagaaattctagggaattctgcactgagtacaacattggattatttctttgggctgtttccaactcaagattctgttatttcattataagcattttgaggaaggcagttggtataaaggtgaccttagtaataaaagtcagtgtgaagtctaaagaaattccacaatgaatttaaagacaagaattttagggacaaggatacagaaatttgcctagtaacttgcacacagcagatggtaaatatttattgactcaatggagtaatgttaaaaataaggtttcccatggactgtgtgagggccaggcatacttaacatcctttgtgagagagaggatggaaacggagtctactgtgaaagccacaagttttggggaaatacactcctgcaaagaagctggaggttaacaaccaaggcaaaggggccagaccacagggagatcttccaggtccaagagcactgcagggcagatgagaagcagggatgattatgttgaaagtgcaagataa

SEQ ID NO: 367404 - DNA, 3309 bp, Homo sapiens
ttagcctaagctttggttacaaacaaggtttctttattgaatttttaattccctgctactcacatttcaccttgtttgtcttgtggctgatgctgctcagtggagtgatgctgaccacacggacttcatcgacacagctggtgccatgctgcagtatgctgtcagccttctgaagcccactaaggtctcggctcgccagctgcccccaagcgtagccagggtggatgccaaaagccgagttctgtttcctcttgggttgggacatgctgctgagtacgtcaggcctcgggtggcgctcattgggtaagacgataacagagcagggccactcccttctcactttgctgccagaggtcacacctgaactctgctttattcttagggatgcagcccacagagtccatccgcttgcaggacagggtgtcaacatgggctttggggatatctccagcttggcccatcacctcagtacggcagccttcaatgggaaggacttaggtaaggattcagatactatggggaagtatccagaggtcatatagttaggcaagatcagggcccacagtagcaagagggagtggacataaaatatatctggcttgctaggagatggaagaaaaccttattattggattagggatttaatctttcctctgcccttcaggttccgtgagccacctcacaggttatgaaacagaaagacagcgtcacaacactgctcttctggctgctacagacttactaaaaaggctctattctaccagtgcctccccgcttgtgttgctcaggacgtggggcttgcaggccacaaatgcagtgtctccactcaaagaacagattatggcctttgcaagcaaatgagtactcctctcctaaagaaagattacgttgatgaaaaagaacatcctgcccaggacccatcatacatattttcaagatcttatttaatttaataaacttactttacattaaaattctctttttcttctttgcttaatgggcctgtggcacccaaataatgaatgataatttgctgtgaggagcgtatattagccagaccaaaggaaaaaacttcgaaggaagacttacaatttggttgaaaagagctttttattactaaaaaacccacaaggtgctgtctcactcatttccagttaatcatttctaaagagaaaatttacattttgtttttgttttaatgttggtcataaatttatacagttgttttttgatagaggtaagaattagactcgatgcatttttgttagaattgctgtttaaatgttaacatcagaatgcaaattaaatataaattgctttaacctttgttacaggtatactggactttctgaaaggaaaaccaggtctcattaatgctagttattactttatcacagcaccagatttccattttatttatggttcctctctgggacaccactgtcggtttaataaaacaataaataattcattgcacagatccgaagacctcaggaaccagatcacaagggaaaccgattagcagcagaatttgttcatgtttggtggcagactggtggccaactggagggaggggagttttactgtgggtttttgaagaggtctcgtcacaagaccagagatgcctcttgaagagatttttaggttgtaggtttgcttactctaaagaacatcttgcccagaagtctgatttgagatgaaatgaagagaaacagtctgcttttgaaccaagtaaggtattcttgggaataatttttagagccatgagaaatctattcttacaggggtgcttttcaggcaaatgcagaaaatttaaaagagtctagaacaaaaaagtgacaatgtcacaaccttgctggaatctcaggaaaaagaattaaagatggcagctgctgtgaaaagctgtgtgactcctggcggagactgcagggacaaggtcatctttcacaaaaaatggaaaggtggcctagatgaggaggacacagactctccagaagttatgcaaacaaaatcaggcaagatgaagaattttaaggcacacctccattggcccacagagagtgttcttcatatgacaatgatgttaaacaccatctgtcacgtaccaggccatgtcctaagtattttaaatatgttaacacatctacaaagaggaaactattagaatctgtaggacctcttaagcccaaagggtctactgcaggcaggatgggcgttacagaaaaaaataaaaactctcattccaaattgctcctaagatggacaaattggttacttctccagaaggtctaatcaaggttaacaaaataggtaagttcgtggagttagaatgcatcttccctggagttcagaggtatttgggatgaccaaaggagtctgctggacagtatgtgtgttttacaaaatggcccccacagtgattaaagaccagagacttatatctctgcatttgtcaagctggaacagtctttagtgaacacagcttacctcttttaaaactgctggtttctactgaaggaaacatggatgacatttagtgttctgtgactggtctggcaccctacttttgttgacaaagatgggaaggggtctaaaagtcatgtcacttataaaagaacttgggaggaacttttttcaaaagatccaaagattttggaaggagagattagagcagaactaagaccacttagaagataggtagatttcagctcaatataaggaatttttttttaatatcagtgcagttccaaatggaataagctgtttgaacatggcttagcagaagctgaatgacaacctgttagaaattctagggaattctgcactgagtacaacattggattatttctttgggctgtttccaactcaagattctgttatttcattataagcattttgaggaaggcagttggtataaaggtgaccttagtaataaaagtcagtgtgaagtctaaagaaattccacaatgaatttaaagacaagaattttagggacaaggatacagaaatttgcctagtaacttgcacacagcagatggtaaatatttattgactcaatggagtaatgttaaaaataaggtttcccatggactgtgtgagggccaggcatacttaacatcctttgtgagagagaggatggaaacggagtctactgtgaaagccacaagttttggggaaatacactcctgcaaagaagctggaggttaacaaccaaggcaaaggggccagaccacagggagatcttccaggtccaagagcactgcagggcagatgagaagcagggatgattatgttgaaagtgcaagataa

SEQ ID NO: 367405 - DNA, 2691 bp, Homo sapiens
cagtgagctatgatcacaccactgcactccagcccagtcaacagagtgagaccctgtctctaaaacgtgtgtatatgtatgtatatttttctttttttagctgaaataaaacaaggacacttgggaagaatacctacgtgattattatctacaataattattttcttcaccttactgtgttaagagtttcattcacttttattttttctccaggaacagattatggcctttgcaagcaaatgagtactcctctcctaaagaaagattacgttgatgaaaaagaacatcctgcccaggacccatcatacatattttcaagatcttatttaatttaataaacttactttacattaaaattctctttttcttctttgcttaatgggcctgtggcacccaaataatgaatgataatttgctgtgaggagcgtatattagccagaccaaaggaaaaaacttcgaaggaagacttacaatttggttgaaaagagctttttattactaaaaaacccacaaggtgctgtctcactcatttccagttaatcatttctaaagagaaaatttacattttgtttttgttttaatgttggtcataaatttatacagttgttttttgatagaggtaagaattagactcgatgcatttttgttagaattgctgtttaaatgttaacatcagaatgcaaattaaatataaattgctttaacctttgttacaggtatactggactttctgaaaggaaaaccaggtctcattaatgctagttattactttatcacagcaccagatttccattttatttatggttcctctctgggacaccactgtcggtttaataaaacaataaataattcattgcacagatccgaagacctcaggaaccagatcacaagggaaaccgattagcagcagaatttgttcatgtttggtggcagactggtggccaactggagggaggggagttttactgtgggtttttgaagaggtctcgtcacaagaccagagatgcctcttgaagagatttttaggttgtaggtttgcttactctaaagaacatcttgcccagaagtctgatttgagatgaaatgaagagaaacagtctgcttttgaaccaagtaaggtattcttgggaataatttttagagccatgagaaatctattcttacaggggtgcttttcaggcaaatgcagaaaatttaaaagagtctagaacaaaaaagtgacaatgtcacaaccttgctggaatctcaggaaaaagaattaaagatggcagctgctgtgaaaagctgtgtgactcctggcggagactgcagggacaaggtcatctttcacaaaaaatggaaaggtggcctagatgaggaggacacagactctccagaagttatgcaaacaaaatcaggcaagatgaagaattttaaggcacacctccattggcccacagagagtgttcttcatatgacaatgatgttaaacaccatctgtcacgtaccaggccatgtcctaagtattttaaatatgttaacacatctacaaagaggaaactattagaatctgtaggacctcttaagcccaaagggtctactgcaggcaggatgggcgttacagaaaaaaataaaaactctcattccaaattgctcctaagatggacaaattggttacttctccagaaggtctaatcaaggttaacaaaataggtaagttcgtggagttagaatgcatcttccctggagttcagaggtatttgggatgaccaaaggagtctgctggacagtatgtgtgttttacaaaatggcccccacagtgattaaagaccagagacttatatctctgcatttgtcaagctggaacagtctttagtgaacacagcttacctcttttaaaactgctggtttctactgaaggaaacatggatgacatttagtgttctgtgactggtctggcaccctacttttgttgacaaagatgggaaggggtctaaaagtcatgtcacttataaaagaacttgggaggaacttttttcaaaagatccaaagattttggaaggagagattagagcagaactaagaccacttagaagataggtagatttcagctcaatataaggaatttttttttaatatcagtgcagttccaaatggaataagctgtttgaacatggcttagcagaagctgaatgacaacctgttagaaattctagggaattctgcactgagtacaacattggattatttctttgggctgtttccaactcaagattctgttatttcattataagcattttgaggaaggcagttggtataaaggtgaccttagtaataaaagtcagtgtgaagtctaaagaaattccacaatgaatttaaagacaagaattttagggacaaggatacagaaatttgcctagtaacttgcacacagcagatggtaaatatttattgactcaatggagtaatgttaaaaataaggtttcccatggactgtgtgagggccaggcatacttaacatcctttgtgagagagaggatggaaacggagtctactgtgaaagccacaagttttggggaaatacactcctgcaaagaagctggaggttaacaaccaaggcaaaggggccagaccacagggagatcttccaggtccaagagcactgcagggcagatgagaagcagggatgattatgttgaaagtgcaagataa

SEQ ID NO: 367406 - DNA, 3439 bp, Homo sapiens
tgtaaaatccatggaacatctttagtacattgtaggtgctcaacaaatactaataattctggagtagacacagcctttggataatatgggtaccagtattacttttggagcctaaatgacactcaaagcctgctaccttcacaccaaagactccactgctctgtagtagcaacaagaataaagggaactgaacatactgaaatggattccgagataaatggtgaacactaccctactctgggccatttagtatatattcctggcacaggtctaggtcctctgcatatgctgtcagccttctgaagcccactaaggtctcggctcgccagctgcccccaagcgtagccagggtggatgccaaaagccgagttctgtttcctcttgggttgggacatgctgctgagtacgtcaggcctcgggtggcgctcattgggtaagacgataacagagcagggccactcccttctcactttgctgccagaggtcacacctgaactctgctttattcttagggatgcagcccacagagtccatccgcttgcaggacagggtgtcaacatgggctttggggatatctccagcttggcccatcacctcagtacggcagccttcaatgggaaggacttaggtaaggattcagatactatggggaagtatccagaggtcatatagttaggcaagatcagggcccacagtagcaagagggagtggacataaaatatatctggcttgctaggagatggaagaaaaccttattattggattagggatttaatctttcctctgcccttcaggttccgtgagccacctcacaggttatgaaacagaaagacagcgtcacaacactgctcttctggctgctacagacttactaaaaaggctctattctaccagtgcctccccgcttgtgttgctcaggacgtggggcttgcaggccacaaatgcagtgtctccactcaaagaacagattatggcctttgcaagcaaatgagtactcctctcctaaagaaagattacgttgatgaaaaagaacatcctgcccaggacccatcatacatattttcaagatcttatttaatttaataaacttactttacattaaaattctctttttcttctttgcttaatgggcctgtggcacccaaataatgaatgataatttgctgtgaggagcgtatattagccagaccaaaggaaaaaacttcgaaggaagacttacaatttggttgaaaagagctttttattactaaaaaacccacaaggtgctgtctcactcatttccagttaatcatttctaaagagaaaatttacattttgtttttgttttaatgttggtcataaatttatacagttgttttttgatagaggtaagaattagactcgatgcatttttgttagaattgctgtttaaatgttaacatcagaatgcaaattaaatataaattgctttaacctttgttacaggtatactggactttctgaaaggaaaaccaggtctcattaatgctagttattactttatcacagcaccagatttccattttatttatggttcctctctgggacaccactgtcggtttaataaaacaataaataattcattgcacagatccgaagacctcaggaaccagatcacaagggaaaccgattagcagcagaatttgttcatgtttggtggcagactggtggccaactggagggaggggagttttactgtgggtttttgaagaggtctcgtcacaagaccagagatgcctcttgaagagatttttaggttgtaggtttgcttactctaaagaacatcttgcccagaagtctgatttgagatgaaatgaagagaaacagtctgcttttgaaccaagtaaggtattcttgggaataatttttagagccatgagaaatctattcttacaggggtgcttttcaggcaaatgcagaaaatttaaaagagtctagaacaaaaaagtgacaatgtcacaaccttgctggaatctcaggaaaaagaattaaagatggcagctgctgtgaaaagctgtgtgactcctggcggagactgcagggacaaggtcatctttcacaaaaaatggaaaggtggcctagatgaggaggacacagactctccagaagttatgcaaacaaaatcaggcaagatgaagaattttaaggcacacctccattggcccacagagagtgttcttcatatgacaatgatgttaaacaccatctgtcacgtaccaggccatgtcctaagtattttaaatatgttaacacatctacaaagaggaaactattagaatctgtaggacctcttaagcccaaagggtctactgcaggcaggatgggcgttacagaaaaaaataaaaactctcattccaaattgctcctaagatggacaaattggttacttctccagaaggtctaatcaaggttaacaaaataggtaagttcgtggagttagaatgcatcttccctggagttcagaggtatttgggatgaccaaaggagtctgctggacagtatgtgtgttttacaaaatggcccccacagtgattaaagaccagagacttatatctctgcatttgtcaagctggaacagtctttagtgaacacagcttacctcttttaaaactgctggtttctactgaaggaaacatggatgacatttagtgttctgtgactggtctggcaccctacttttgttgacaaagatgggaaggggtctaaaagtcatgtcacttataaaagaacttgggaggaacttttttcaaaagatccaaagattttggaaggagagattagagcagaactaagaccacttagaagataggtagatttcagctcaatataaggaatttttttttaatatcagtgcagttccaaatggaataagctgtttgaacatggcttagcagaagctgaatgacaacctgttagaaattctagggaattctgcactgagtacaacattggattatttctttgggctgtttccaactcaagattctgttatttcattataagcattttgaggaaggcagttggtataaaggtgaccttagtaataaaagtcagtgtgaagtctaaagaaattccacaatgaatttaaagacaagaattttagggacaaggatacagaaatttgcctagtaacttgcacacagcagatggtaaatatttattgactcaatggagtaatgttaaaaataaggtttcccatggactgtgtgagggccaggcatacttaacatcctttgtgagagagaggatggaaacggagtctactgtgaaagccacaagttttggggaaatacactcctgcaaagaagctggaggttaacaaccaaggcaaaggggccagaccacagggagatcttccaggtccaagagcactgcagggcagatgagaagcagggatgattatgttgaaagtgcaagataa

SEQ ID NO: 367407 - DNA, 1599 bp, Homo sapiens
cgggacgggattggagtgctctgctccggacgcactacgtaggtgggcctgcgggagttctgagtgcgacggcgcaggtctgcaccatggcggcccggcttgtcagccgatgcggggctgtgcgtgcagctccccacagcggcccgctggtgtcctggcgcaggtggtccggcgcctcaacagacaccgtgtatgacgtggtggtgtcgggtggaggcctggtgggcgctgccatggcctgtgccttgggatatgatattcactttcatgacaagaaaatcctgttgctcgaagcaggtccaaagaaagtactggagaaattgtcagaaacttacagcaacagggtcagctccatttcccctggctctgcaacgcttctcagtagttttggtgcctgggaccatatctgcaacatgagatacagagcctttcggcgaatgcaggtgtgggacgcctgctcagaggccctgataatgtttgataaggataatttagatgacatgggctatatcgtggagaatgatgtcatcatgcatgctctcactaagcagttggaggctgtgtctgaccgagtgacggttctctacaggagcaaagccattcgctatacctggccttgtccatttcctatggccgactccagcccttgggttcatattaccctaggtgatggcagcaccttccagaccaaattgttgataggtgcagatggtcacaactccggagtacggcaggctgttggaatccagaatgtgagctggaactatgaccagtctgctgttgtggctactctgcatttatcagaggccacagaaaacaacgtagcctggcagagatttcttccctctgggcctattgctctgctcccgctctcagacaccttgagttccttggtttggtccacgtcccatgaacatgcagcagagctagttagcatggatgaggaaaaatttgtggatgccgttaactctgccttttggagtgatgctgaccacacggacttcatcgacacagctggtgccatgctgcagtatgctgtcagccttctgaagcccactaaggtctcggctcgccagctgcccccaagcgtagccagggtggatgccaaaagccgagttctgtttcctcttgggttgggacatgctgctgagtacgtcaggcctcgggtggcgctcattggggatgcagcccacagagtccatccgcttgcaggacagggtgtcaacatgggctttggggatatctccagcttggcccatcacctcagtacggcagccttcaatgggaaggacttaggttccgtgagccacctcacaggttatgaaacagaaagacagcgtcacaacactgctcttctggctgctacagacttactaaaaaggctctattctaccagtgcctccccgcttgtgttgctcaggacgtggggcttgcaggccacaaatgcagtgtctccactcaaagtaagaggttgctcagaggaatgactttgcaaacagctcttaatttcttttgcttttttttgaaacagaaggttgcagtgagccgagatctcaccactgcactccagcctgggtgacagagcaagactctgtctca

SEQ ID NO: 367408 - DNA, 709 bp, Homo sapiens
cgggacgggattggagtgctctgctccggacgcactacgtaggtgggcctgcgggagttctgagtgcgacggcgcaggtctgcaccatggcggcccggcttgtcagccgatgcggggctgtgcgtgcagctccccacagcggcccgctggtgtcctggcgcaggtggtccggcgcctcaacagacaccgtgtatgacgtggtggtgtcgggtggaggcctggtgggcgctgccatggcctgtgccttgggatatgatattcactttcatgacaagaaaatcctgttgctcgaagcaggtccaaagaaagtactggagaaattgtcagaaacttacagcaacagggtcagctccatttcccctggctctgcaacgcttctcagtagttttggtgcctgggaccatatctgcaacatgagatacagagcctttcggcgaatgcaggtgcccctttatcttttcaattttgtcaagatgtcttggtctgtcttaagatatcggagtccactttctccaagtgttctgtgaatgtaggaggaatcagacaaggttcacattcagtccgaggaagtggggagaagcattcccaggagaattttcttctcattttatattttcctaccagagaggctgacaaattgtgattttctgctctgtcacttgggaaagcaatattgtttctgattggagtgatgtttccctcttggttt

SEQ ID NO: 367409 - DNA, 1606 bp, Homo sapiens
cgggacgggattggagtgctctgctccggacgcactacgtaggtgggcctgcgggagttctgagtgcgacggcgcaggtctgcaccatggcggcccggcttgtcagccgatgcggggctgtgcgtgcagctccccacagcggcccgctggtgtcctggcgcaggtggtccggcgcctcaacagacaccgtgtatgacgtggtggtgtcgggtggaggcctggtgggcgctgccatggcctgtgccttgggatatgatattcactttcatgacaagaaaatcctgttgctcgaagcaggtccaaagaaagtactggagaaattgtcagaaacttacagcaacagggtcagctccatttcccctggctctgcaacgcttctcagtagttttggtgcctgggaccatatctgcaacatgagatacagagcctttcggcgaatgcaggtgtgggacgcctgctcagaggccctgataatgtttgataaggataatttagatgacatgggctatatcgtggagaatgatgtcatcatgcatgctctcactaagcagttggaggctgtgtctgaccgagtgacggttctctacaggagcaaagccattcgctatacctggccttgtccatttcctatggccgactccagcccttgggttcatattaccctaggtgatggcagcaccttccagaccaaattgttgataggtgcagatggtcacaactccggagtacggcaggctgttggaatccagaatgtgagctggaactatgaccagtctgctgttgtggctactctgcatttatcagaggccacagaaaacaacgtagcctggcagagatttcttccctctgggcctattgctctgctcccgctctcagacaccttgagttccttggtttggtccacgtcccatgaacatgcagcagagctagttagcatggatgaggaaaaatttgtggatgccgttaactctgccttttggagtgatgctgaccacacggacttcatcgacacagctggtgccatgctgcagtatgctgtcagccttctgaagcccactaaggtctcggctcgccagctgcccccaagcgtagccagggtggatgccaaaagccgagttctgtttcctcttgggttgggacatgctgctgagtacgtcaggcctcgggtggcgctcattggggatgcagcccacagagtccatccgcttgcaggacagggtgtcaacatgggctttggggatatctccagcttggcccatcacctcagtacggcagccttcaatgggaaggacttaggttccgtgagccacctcacaggttatgaaacagaaagacagcgtcacaacactgctcttctggctgctacagacttactaaaaaggctctattctaccagtgcctccccgcttgtgttgctcaggacgtggggcttgcaggccacaaatgcagtgtctccactcaaagaacagattatggcctttgcaagcaaatgagtactcctctcctaaagaaagattacgttgatgaaaaagaacatcctgcccaggacccatcatacatattttcaagatcttatttaatttaataaacttactttacattaaaa

SEQ ID NO: 367410 - DNA, 3941 bp, Homo sapiens
cgggacgggattggagtgctctgctccggacgcactacgtaggtgggcctgcgggagttctgagtgcgacggcgcaggtctgcaccatggcggcccggcttgtcagccgatgcggggctgtgcgtgcagctccccacagcggcccgctggtgtcctggcgcaggtggtccggcgcctcaacagacaccgtgtatgacgtggtggtgtcgggtggaggcctggtgggcgctgccatggcctgtgccttgggatatgatattcactttcatgacaagaaaatcctgttgctcgaagcaggtccaaagaaagtactggagaaattgtcagaaacttacagcaacagggtcagctccatttcccctggctctgcaacgcttctcagtagttttggtgcctgggaccatatctgcaacatgagatacagagcctttcggcgaatgcaggtgtgggacgcctgctcagaggccctgataatgtttgataaggataatttagatgacatgggctatatcgtggagaatgatgtcatcatgcatgctctcactaagcagttggaggctgtgtctgaccgagtgacggttctctacaggagcaaagccattcgctatacctggccttgtccatttcctatggccgactccagcccttgggttcatattaccctaggtgatggcagcaccttccagaccaaattgttgataggtgcagatggtcacaactccggagtacggcaggctgttggaatccagaatgtgagctggaactatgaccagtctgctgttgtggctactctgcatttatcagaggccacagaaaacaacgtagcctggcagagatttcttccctctgggcctattgctctgctcccgctctcagacaccttgagttccttggtttggtccacgtcccatgaacatgcagcagagctagttagcatggatgaggaaaaatttgtggatgccgttaactctgccttttggagtgatgctgaccacacggacttcatcgacacagctggtgccatgctgcagtatgctgtcagccttctgaagcccactaaggtctcggctcgccagctgcccccaagcgtagccagggtggatgccaaaagccgagttctgtttcctcttgggttgggacatgctgctgagtacgtcaggcctcgggtggcgctcattggggatgcagcccacagagtccatccgcttgcaggacagggtgtcaacatgggctttggggatatctccagcttggcccatcacctcagtacggcagccttcaatgggaaggacttaggttccgtgagccacctcacaggttatgaaacagaaagacagcgtcacaacactgctcttctggctgctacagacttactaaaaaggctctattctaccagtgcctccccgcttgtgttgctcaggacgtggggcttgcaggccacaaatgcagtgtctccactcaaagaacagattatggcctttgcaagcaaatgagtactcctctcctaaagaaagattacgttgatgaaaaagaacatcctgcccaggacccatcatacatattttcaagatcttatttaatttaataaacttactttacattaaaattctctttttcttctttgcttaatgggcctgtggcacccaaataatgaatgataatttgctgtgaggagcgtatattagccagaccaaaggaaaaaacttcgaaggaagacttacaatttggttgaaaagagctttttattactaaaaaacccacaaggtgctgtctcactcatttccagttaatcatttctaaagagaaaatttacattttgtttttgttttaatgttggtcataaatttatacagttgttttttgatagaggtaagaattagactcgatgcatttttgttagaattgctgtttaaatgttaacatcagaatgcaaattaaatataaattgctttaacctttgttacaggtatactggactttctgaaaggaaaaccaggtctcattaatgctagttattactttatcacagcaccagatttccattttatttatggttcctctctgggacaccactgtcggtttaataaaacaataaataattcattgcacagatccgaagacctcaggaaccagatcacaagggaaaccgattagcagcagaatttgttcatgtttggtggcagactggtggccaactggagggaggggagttttactgtgggtttttgaagaggtctcgtcacaagaccagagatgcctcttgaagagatttttaggttgtaggtttgcttactctaaagaacatcttgcccagaagtctgatttgagatgaaatgaagagaaacagtctgcttttgaaccaagtaaggtattcttgggaataatttttagagccatgagaaatctattcttacaggggtgcttttcaggcaaatgcagaaaatttaaaagagtctagaacaaaaaagtgacaatgtcacaaccttgctggaatctcaggaaaaagaattaaagatggcagctgctgtgaaaagctgtgtgactcctggcggagactgcagggacaaggtcatctttcacaaaaaatggaaaggtggcctagatgaggaggacacagactctccagaagttatgcaaacaaaatcaggcaagatgaagaattttaaggcacacctccattggcccacagagagtgttcttcatatgacaatgatgttaaacaccatctgtcacgtaccaggccatgtcctaagtattttaaatatgttaacacatctacaaagaggaaactattagaatctgtaggacctcttaagcccaaagggtctactgcaggcaggatgggcgttacagaaaaaaataaaaactctcattccaaattgctcctaagatggacaaattggttacttctccagaaggtctaatcaaggttaacaaaataggtaagttcgtggagttagaatgcatcttccctggagttcagaggtatttgggatgaccaaaggagtctgctggacagtatgtgtgttttacaaaatggcccccacagtgattaaagaccagagacttatatctctgcatttgtcaagctggaacagtctttagtgaacacagcttacctcttttaaaactgctggtttctactgaaggaaacatggatgacatttagtgttctgtgactggtctggcaccctacttttgttgacaaagatgggaaggggtctaaaagtcatgtcacttataaaagaacttgggaggaacttttttcaaaagatccaaagattttggaaggagagattagagcagaactaagaccacttagaagataggtagatttcagctcaatataaggaatttttttttaatatcagtgcagttccaaatggaataagctgtttgaacatggcttagcagaagctgaatgacaacctgttagaaattctagggaattctgcactgagtacaacattggattatttctttgggctgtttccaactcaagattctgttatttcattataagcattttgaggaaggcagttggtataaaggtgaccttagtaataaaagtcagtgtgaagtctaaagaaattccacaatgaatttaaagacaagaattttagggacaaggatacagaaatttgcctagtaacttgcacacagcagatggtaaatatttattgactcaatggagtaatgttaaaaataaggtttcccatggactgtgtgagggccaggcatacttaacatcctttgtgagagagaggatggaaacggagtctactgtgaaagccacaagttttggggaaatacactcctgcaaagaagctggaggttaacaaccaaggcaaaggggccagaccacagggagatcttccaggtccaagagcactgcagggcagatgagaagcagggatgattatgttgaaagtgcaagataa

SEQ ID NO: 367411 - DNA, 3658 bp, Homo sapiens
cgggacgggattggagtgctctgctccggacgcactacgtaggtgggcctgcgggagttctgagtgcgacggcgcaggtctgcaccatggcggcccggcttgtcagccgatgcggggctgtgcgtgcagctccccacagcggcccgctggtgtcctggcgcaggtggtccggcgcctcaacagacaccgtgtatgacgtggtggtgtcgggtggaggcctggtgggcgctgccatggcctgtgccttgggatatgatattcactttcatgacaagaaaatcctgttgctcgaagcaggtccaaagaaagtactggagaaattgtcagaaacttacagcaacagggtcagctccatttcccctggctctgcaacgcttctcagtagttttggtgcctgggaccatatctgcaacatgagatacagagcctttcggcgaatgcaggtgtgggacgcctgctcagaggccctgataatgtttgataaggataatttagatgacatgggctatatcgtggagaatgatgtcatcatgcatgctctcactaagcagttggaggctgtgtctgaccgagtgacggttctctacaggagcaaagccattcgctatacctggccttgtccatttcctatggccgactccagcccttgggttcatattaccctaggtgatggcagcaccttccagaccaaattgttgataggtgcagatggtcacaactccggagtacggcaggctgttggaatccagaatgtgagctggaactatgaccagtctgctgttgtggctactctgcatttatcagaggccacagaaaacaacgtagcctggcagagatttcttccctctgggcctattgctctgctcccgctctcagacaccttgagttccttggtttggtccacgtcccatgaacatgcagcagagctagttagcatggatgaggaaaaatttgtggatgccgttaactctgccttttggagtgatgctgaccacacggacttcatcgacacagctggtgccatgctgcagtatgctgtcagccttctgaagcccactaaggtctcggctcgccagctgcccccaagcgtagccagggtggatgccaaaagccgagttctgtttcctcttgggttgggacatgctgctgagtacgtcaggcctcgggtggcgctcattgggaacagattatggcctttgcaagcaaatgagtactcctctcctaaagaaagattacgttgatgaaaaagaacatcctgcccaggacccatcatacatattttcaagatcttatttaatttaataaacttactttacattaaaattctctttttcttctttgcttaatgggcctgtggcacccaaataatgaatgataatttgctgtgaggagcgtatattagccagaccaaaggaaaaaacttcgaaggaagacttacaatttggttgaaaagagctttttattactaaaaaacccacaaggtgctgtctcactcatttccagttaatcatttctaaagagaaaatttacattttgtttttgttttaatgttggtcataaatttatacagttgttttttgatagaggtaagaattagactcgatgcatttttgttagaattgctgtttaaatgttaacatcagaatgcaaattaaatataaattgctttaacctttgttacaggtatactggactttctgaaaggaaaaccaggtctcattaatgctagttattactttatcacagcaccagatttccattttatttatggttcctctctgggacaccactgtcggtttaataaaacaataaataattcattgcacagatccgaagacctcaggaaccagatcacaagggaaaccgattagcagcagaatttgttcatgtttggtggcagactggtggccaactggagggaggggagttttactgtgggtttttgaagaggtctcgtcacaagaccagagatgcctcttgaagagatttttaggttgtaggtttgcttactctaaagaacatcttgcccagaagtctgatttgagatgaaatgaagagaaacagtctgcttttgaaccaagtaaggtattcttgggaataatttttagagccatgagaaatctattcttacaggggtgcttttcaggcaaatgcagaaaatttaaaagagtctagaacaaaaaagtgacaatgtcacaaccttgctggaatctcaggaaaaagaattaaagatggcagctgctgtgaaaagctgtgtgactcctggcggagactgcagggacaaggtcatctttcacaaaaaatggaaaggtggcctagatgaggaggacacagactctccagaagttatgcaaacaaaatcaggcaagatgaagaattttaaggcacacctccattggcccacagagagtgttcttcatatgacaatgatgttaaacaccatctgtcacgtaccaggccatgtcctaagtattttaaatatgttaacacatctacaaagaggaaactattagaatctgtaggacctcttaagcccaaagggtctactgcaggcaggatgggcgttacagaaaaaaataaaaactctcattccaaattgctcctaagatggacaaattggttacttctccagaaggtctaatcaaggttaacaaaataggtaagttcgtggagttagaatgcatcttccctggagttcagaggtatttgggatgaccaaaggagtctgctggacagtatgtgtgttttacaaaatggcccccacagtgattaaagaccagagacttatatctctgcatttgtcaagctggaacagtctttagtgaacacagcttacctcttttaaaactgctggtttctactgaaggaaacatggatgacatttagtgttctgtgactggtctggcaccctacttttgttgacaaagatgggaaggggtctaaaagtcatgtcacttataaaagaacttgggaggaacttttttcaaaagatccaaagattttggaaggagagattagagcagaactaagaccacttagaagataggtagatttcagctcaatataaggaatttttttttaatatcagtgcagttccaaatggaataagctgtttgaacatggcttagcagaagctgaatgacaacctgttagaaattctagggaattctgcactgagtacaacattggattatttctttgggctgtttccaactcaagattctgttatttcattataagcattttgaggaaggcagttggtataaaggtgaccttagtaataaaagtcagtgtgaagtctaaagaaattccacaatgaatttaaagacaagaattttagggacaaggatacagaaatttgcctagtaacttgcacacagcagatggtaaatatttattgactcaatggagtaatgttaaaaataaggtttcccatggactgtgtgagggccaggcatacttaacatcctttgtgagagagaggatggaaacggagtctactgtgaaagccacaagttttggggaaatacactcctgcaaagaagctggaggttaacaaccaaggcaaaggggccagaccacagggagatcttccaggtccaagagcactgcagggcagatgagaagcagggatgattatgttgaaagtgcaagataa

SEQ ID NO: 367412 - DNA, 3887 bp, Homo sapiens
cgggacgggattggagtgctctgctccggacgcactacgtaggtgggcctgcgggagttctgagtgcgacggcgcaggtctgcaccatggcggcccggcttgtcagccgatgcggggctgtgcgtgcagctccccacagcggcccgctggtgtcctggcgcaggtggtccggcgcctcaacagacaccgtgtatgacgtggtggtgtcgggtggaggcctggtgggcgctgccatggcctgtgccttgggatatgatattcactttcatgacaagaaaatcctgttgctcgaagcaggtccaaagaaagtactggagaaattgtcagaaacttacagcaacagggtcagctccatttcccctggctctgcaacgcttctcagtagttttggtgcctgggaccatatctgcaacatgagatacagagcctttcggcgaatgcaggtgtgggacgcctgctcagaggccctgataatgtttgataaggataatttagatgacatgggctatatcgtggagaatgatgtcatcatgcatgctctcactaagcagttggaggctgtgtctgaccgagtgacggttctctacaggagcaaagccattcgctatacctggccttgtccatttcctatggccgactccagcccttgggttcatattaccctaggtgatggcagcaccttccagaccaaattgttgataggtgcagatggtcacaactccggagtacggcaggctgttggaatccagaatgtgagctggaactatgaccagtctgctgttgtggctactctgcatttatcagaggccacagaaaacaacgtagcctggcagagatttcttccctctgggcctattgctctgctcccgctctcagacaccttgagttccttggtttggtccacgtcccatgaacatgcagcagagctagttagcatggatgaggaaaaatttgtggatgccgttaactctgccttttggagtgatgctgaccacacggacttcatcgacacagctggtgccatgctgcagtatgctgtcagccttctgaagcccactaaggtctcggctcgccagctgcccccaagcgtagccagggtggatgccaaaagccgagttctgtttcctcttgggttgggacatgctgctgagtacgtcaggcctcgggtggcgctcattggggatgcagcccacagagtccatccgcttgcaggacagggtgtcaacatgggctttggggatatctccagcttggcccatcacctcagtacggcagccttcaatgggaaggacttaggttccgtgagccacctcacaggttatgaaacagaaagacagcgtcacaacactgctcttctggctgctacagacttactaaaaaggctctattctaccagtgcctccccgcttgtgttgctcaggacgtggggcttgcaggccacaaatgcagtgtctccactcaaagaacagattatggcctttgcaagcaaatgagtactcctctcctaaagaaagattacgttgatgaaaaagaacatcctgcccaggacccatcatacatattttcaagatcttatttaatttaataaacttactttacattaaaattctctttttcttctttgcttaatgggcctgtggcacccaaataatgaatgataatttgctgtgaggagcgtatattagccagaccaaaggaaaaaacttcgaaggaagacttacaatttggttgaaaagagctttttattactaaaaaacccacaaggtgctgtctcactcatttccagttaatcatttctaaagagaaaatttacattttgtttttgttttaatgttggtcataaatttatacagttgttttttgatagaggtaagaattagactcgatgcatttttgttagaattgctgtttaaatgttaacatcagaatgcaaattaaatataaattgctttaacctttgttacaggtatactggactttctgaaaggaaaaccaggtctcattaatgctagttattactttatcacagcaccagatttccattttatttatggttcctctctgggacaccactgtcggtttaataaaacaataaataattcattgcacagatccgaagacctcaggaaccagatcacaagggaaaccgattagcagcagaatttgttcatgtttggtggcagactggtggccaactggagggaggggagttttactgtgggtttttgaagaggtctcgtcacaagaccagagatgcctcttgaagagatttttaggttgtaggtttgcttactctaaagaacatcttgcccagaagtctgatttgagatgaaatgaagagaaacagtctgcttttgaaccaagtaaggtattcttgggaataatttttagagccatgagaaatctattcttacaggggtgcttttcaggcaaatgcagaaaatttaaaagagtctagaacaaaaaagtgacaatgtcacaaccttgctggaatctcaggaaaaagaattaaagatggcagctgctgtgaaaagctgtgtgactcctggcggagactgcagggacaaggtcatctttcacaaaaaatggaaaggtggcctagatgaggaggacacagactctccagaagttatgcaaacaaaatcaggcaagatgaagaattttaaggcacacctccattggcccacagagagtgttcttcatatgacaatgatgttaaacaccatctgtcacgtaccaggccatgtcctaagtattttaaatatgttaacacatctacaaagaggaaactattagaatctgtaggacctcttaagcccaaagggtctactgcaggcaggatgggcgttacagaaaaaaataaaaactctcattccaaattgctcctaagatggacaaattggttacttctccagaaggtctaatcaaggttaacaaaataggtaagttcgtggagttagaatgcatcttccctggaacaaaatggcccccacagtgattaaagaccagagacttatatctctgcatttgtcaagctggaacagtctttagtgaacacagcttacctcttttaaaactgctggtttctactgaaggaaacatggatgacatttagtgttctgtgactggtctggcaccctacttttgttgacaaagatgggaaggggtctaaaagtcatgtcacttataaaagaacttgggaggaacttttttcaaaagatccaaagattttggaaggagagattagagcagaactaagaccacttagaagataggtagatttcagctcaatataaggaatttttttttaatatcagtgcagttccaaatggaataagctgtttgaacatggcttagcagaagctgaatgacaacctgttagaaattctagggaattctgcactgagtacaacattggattatttctttgggctgtttccaactcaagattctgttatttcattataagcattttgaggaaggcagttggtataaaggtgaccttagtaataaaagtcagtgtgaagtctaaagaaattccacaatgaatttaaagacaagaattttagggacaaggatacagaaatttgcctagtaacttgcacacagcagatggtaaatatttattgactcaatggagtaatgttaaaaataaggtttcccatggactgtgtgagggccaggcatacttaacatcctttgtgagagagaggatggaaacggagtctactgtgaaagccacaagttttggggaaatacactcctgcaaagaagctggaggttaacaaccaaggcaaaggggccagaccacagggagatcttccaggtccaagagcactgcagggcagatgagaagcagggatgattatgttgaaagtgcaagataa

SEQ ID NO: 367413 - DNA, 3887 bp, Homo sapiens
cgggacgggattggagtgctctgctccggacgcactacgtaggtgggcctgcgggagttctgagtgcgacggcgcaggtctgcaccatggcggcccggcttgtcagccgatgcggggctgtgcgtgcagctccccacagcggcccgctggtgtcctggcgcaggtggtccggcgcctcaacagacaccgtgtatgacgtggtggtgtcgggtggaggcctggtgggcgctgccatggcctgtgccttgggatatgatattcactttcatgacaagaaaatcctgttgctcgaagcaggtccaaagaaagtactggagaaattgtcagaaacttacagcaacagggtcagctccatttcccctggctctgcaacgcttctcagtagttttggtgcctgggaccatatctgcaacatgagatacagagcctttcggcgaatgcaggtgtgggacgcctgctcagaggccctgataatgtttgataaggataatttagatgacatgggctatatcgtggagaatgatgtcatcatgcatgctctcactaagcagttggaggctgtgtctgaccgagtgacggttctctacaggagcaaagccattcgctatacctggccttgtccatttcctatggccgactccagcccttgggttcatattaccctaggtgatggcagcaccttccagaccaaattgttgataggtgcagatggtcacaactccggagtacggcaggctgttggaatccagaatgtgagctggaactatgaccagtctgctgttgtggctactctgcatttatcagaggccacagaaaacaacgtagcctggcagagatttcttccctctgggcctattgctctgctcccgctctcagacaccttgagttccttggtttggtccacgtcccatgaacatgcagcagagctagttagcatggatgaggaaaaatttgtggatgccgttaactctgccttttggagtgatgctgaccacacggacttcatcgacacagctggtgccatgctgcagtatgctgtcagccttctgaagcccactaaggtctcggctcgccagctgcccccaagcgtagccagggtggatgccaaaagccgagttctgtttcctcttgggttgggacatgctgctgagtacgtcaggcctcgggtggcgctcattggggatgcagcccacagagtccatccgcttgcaggacagggtgtcaacatgggctttggggatatctccagcttggcccatcacctcagtacggcagccttcaatgggaaggacttaggttccgtgagccacctcacaggttatgaaacagaaagacagcgtcacaacactgctcttctggctgctacagacttactaaaaaggctctattctaccagtgcctccccgcttgtgttgctcaggacgtggggcttgcaggccacaaatgcagtgtctccactcaaagaacagattatggcctttgcaagcaaatgagtactcctctcctaaagaaagattacgttgatgaaaaagaacatcctgcccaggacccatcatacatattttcaagatcttatttaatttaataaacttactttacattaaaattctctttttcttctttgcttaatgggcctgtggcacccaaataatgaatgataatttgctgtgaggagcgtatattagccagaccaaaggaaaaaacttcgaaggaagacttacaatttggttgaaaagagctttttattactaaaaaacccacaaggtgctgtctcactcatttccagttaatcatttctaaagagaaaatttacattttgtttttgttttaatgttggtcataaatttatacagttgttttttgatagaggtaagaattagactcgatgcatttttgttagaattgctgtttaaatgttaacatcagaatgcaaattaaatataaattgctttaacctttgttacaggtatactggactttctgaaaggaaaaccaggtctcattaatgctagttattactttatcacagcaccagatttccattttatttatggttcctctctgggacaccactgtcggtttaataaaacaataaataattcattgcacagatccgaagacctcaggaaccagatcacaagggaaaccgattagcagcagaatttgttcatgtttggtggcagactggtggccaactggagggaggggagttttactgtgggtttttgaagaggtctcgtcacaagaccagagatgcctcttgaagagatttttaggttgtaggtttgcttactctaaagaacatcttgcccagaagtctgatttgagatgaaatgaagagaaacagtctgcttttgaaccaagtaaggtattcttgggaataatttttagagccatgagaaatctattcttacaggggtgcttttcaggcaaatgcagaaaatttaaaagagtctagaacaaaaaagtgacaatgtcacaaccttgctggaatctcaggaaaaagaattaaagatggcagctgctgtgaaaagctgtgtgactcctggcggagactgcagggacaaggtcatctttcacaaaaaatggaaaggtggcctagatgaggaggacacagactctccagaagttatgcaaacaaaatcaggcaagatgaagaattttaaggcacacctccattggcccacagagagtgttcttcatatgacaatgatgttaaacaccatctgtcacgtaccaggccatgtcctaagtattttaaatatgttaacacatctacaaagaggaaactattagaatctgtaggacctcttaagcccaaagggtctactgcaggcaggatgggcgttacagaaaaaaataaaaactctcattccaaattgctcctaagatggacaaattggttacttctccagaaggtctaatcaaggttaacaaaataggtaagttcgtggagttagaatgcatcttccctggagttcagaggtatttgggatgaccaaaggagtctgctggacagtatgtgtgttttacaaaatggcccccacagtgattaaagaccagagacttataaaaactgctggtttctactgaaggaaacatggatgacatttagtgttctgtgactggtctggcaccctacttttgttgacaaagatgggaaggggtctaaaagtcatgtcacttataaaagaacttgggaggaacttttttcaaaagatccaaagattttggaaggagagattagagcagaactaagaccacttagaagataggtagatttcagctcaatataaggaatttttttttaatatcagtgcagttccaaatggaataagctgtttgaacatggcttagcagaagctgaatgacaacctgttagaaattctagggaattctgcactgagtacaacattggattatttctttgggctgtttccaactcaagattctgttatttcattataagcattttgaggaaggcagttggtataaaggtgaccttagtaataaaagtcagtgtgaagtctaaagaaattccacaatgaatttaaagacaagaattttagggacaaggatacagaaatttgcctagtaacttgcacacagcagatggtaaatatttattgactcaatggagtaatgttaaaaataaggtttcccatggactgtgtgagggccaggcatacttaacatcctttgtgagagagaggatggaaacggagtctactgtgaaagccacaagttttggggaaatacactcctgcaaagaagctggaggttaacaaccaaggcaaaggggccagaccacagggagatcttccaggtccaagagcactgcagggcagatgagaagcagggatgattatgttgaaagtgcaagataa

SEQ ID NO: 367414 - DNA, 3021 bp, Homo sapiens
cgggacgggattggagtgctctgctccggacgcactacgtaggtgggcctgcgggagttctgagtgcgacggcgcaggtctgcaccatggcggcccggcttgtcagccgatgcggggctgtgcgtgcagctccccacagcggcccgctggtgtcctggcgcaggtggtccggcgcctcaacagacaccgtgtatgacgtggtggtgtcgggtggaggcctggtgggcgctgccatggcctgtgccttgggatatgatattcactttcatgacaagaaaatcctgttgctcgaagcaggtccaaagaaagtactggagaaattgtcagaaacttacagcaacagggtcagctccatttcccctggctctgcaacgcttctcagtagttttggtgcctgggaccatatctgcaacatgagatacagagcctttcggcgaatgcaggtgtgggacgcctgctcagaggccctgataatgtttgataaggataatttagatgacatgggctatatcgtggagaatgatgtcatcatgcatgctctcactaagcagttggaggctgtgtctgaccgagtgacggttctctacaggagcaaagccattcgctatacctggccttgtccatttcctatggccgactccagcccttgggttcatattaccctaggtgatggcagcaccttccagaccaaattgttgataggtgcagatggtcacaactccggagtacggcaggctgttggaatccagaatgtgagctggaactatgaccagtctgctgttgtggctactctgcatttatcagaggccacagaaaacaacgtagcctggcagagatttcttccctctgggcctattgctctgctcccgctctcagacaccttgagttccttggtttggtccacgtcccatgaacatgcagcagagctagttagcatggatgaggaaaaatttgtggatgccgttaactctgccttttggagtgatgctgaccacacggacttcatcgacacagctggtgccatgctgcagtatgctgtcagccttctgaagcccactaaggtctcggctcgccagctgcccccaagcgtagccagggtggatgccaaaagccgagttctgtttcctcttgggttgggacatgctgctgagtacgtcaggcctcgggtggcgctcattggggatgcagcccacagagtccatccgcttgcaggacagggtgtcaacatgggctttggggatatctccagcttggcccatcacctcagtacggcagccttcaatgggaaggacttaggttccgtgagccacctcacaggttatgaaacagaaagacagcgtcacaacactgctcttctggctgctacagacttactaaaaaggctctattctaccagtgcctccccgcttgtgttgctcaggacgtggggcttgcaggccacaaatgcagtgtctccactcaaagaacagattatggcctttgcaagcaaatgagtactcctctcctaaagaaagattacgttgatgaaaaagaacatcctgcccaggacccatcatacatattttcaagatcttatttaatttaataaacttactttacattaaaattctctttttcttctttgcttaatgggcctgtggcacccaaataatgaatgataatttgctgtgaggagcgtatattagccagaccaaaggaaaaaacttcgaaggaagacttacaatttggttgaaaagagctttttattactaaaaaacccacaaggtgctgtctcactcatttccagttaatcatttctaaagagaaaatttacattttgtttttgttttaatgttggtcataaatttatacagttgttttttgatagaggtaagaattagactcgatgcatttttgttagaattgctgtttaaatgttaacatcagaatgcaaattaaatataaattgctttaacctttgttacaggtatactggactttctgaaaggaaaaccaggtctcattaatgctagttattactttatcacagcaccagatttccattttatttatggttcctctctgggacaccactgtcggtttaataaaacaataaataattcattgcacagatccgaagacctcaggaaccagatcacaagggaaaccgattagcagcagaatttgttcatgtttggtggcagactggtggccaactggagggaggggagttttactgtgggtttttgaagaggtctcgtcacaagaccagagatgcctcttgaagagatttttaggttgtaggtttgcttactctaaagaacatcttgcccagaagtctgatttgagatgaaatgaagagaaacagtctgcttttgaaccaagtaaggtattcttgggaataatttttagagccatgagaaatctattcttacaggggtgcttttcaggcaaatgcagaaaatttaaaagagtctagaacaaaaaagtgacaatgtcacaaccttgctggaatctcaggaaaaagaattaaagatggcagctgctgtgaaaagctgtgtgactcctggcggagactgcagggacaaggtcatctttcacaaaaaatggaaaggtggcctagatgaggaggacacagactctccagaagttatgcaaacaaaatcaggcaagatgaagaattttaaggcacacctccattggcccacagagagtgttcttcatatgacaatgatgttaaacaccatctgtcacgtaccaggccatgtcctaagtattttaaatatgttaacacatctacaaagaggaaactattagaatctgtaggacctcttaagcccaaagggtctactgcaggcaggatgggcgttacagaaaaaaataaaaactctcattccaaattgctcctaagatggacaaattggttacttctccagaaggtctaatcaaggttaacaaaataggtaagatgcattctaactccacgaacttacctattttgttaaccttgattggttacttctcccagaaggtctaatcaag

SEQ ID NO: 367415 - DNA, 3455 bp, Homo sapiens
cgggacgggattggagtgctctgctccggacgcactacgtaggtgggcctgcgggagttctgagtgcgacggcgcaggtctgcaccatggcggcccggcttgtcagccgatgcggggctgtgcgtgcagctccccacagcggcccgctggtgtcctggcgcaggtggtccggcgcctcaacagacaccgtgtatgacgtggtggtgtcgggtggaggcctggtgggcgctgccatggcctgtgccttgggatatgatattcactttcatgacaagaaaatcctgttgctcgaagcaggtccaaagaaagtactggagaaattgtcagaaacttacagcaacagggtcagctccatttcccctggctctgcaacgcttctcagtagttttggtgcctgggaccatatctgcaacatgagatacagagcctttcggcgaatgcaggtgtgggacgcctgctcagaggccctgataatgtttgataaggataatttagatgacatgggctatatcgtggagaatgatgtcatcatgcatgctctcactaagcagttggaggctgtgtctgaccgagtgacggttctctacaggagcaaagccattcgctatacctggccttgtccatttcctatggccgactccagcccttgggttcatattaccctaggtgatggcagcaccttccagaccaaattgttgataggtgcagatggtcacaactccggagtacggcaggctgttggaatccagaatgtgagctggaactatgaccagtctgctgttgtggctactctgcatttatcagaggccacagaaaacaacgtagcctggcagagatttcttccctctgggcctattgctctgctcccgctctcagacaccttgagttccttggtttggtccacgtcccatgaacatgcagcagagctagttagcatggatgaggaaaaatttgtggatgccgttaactctgcctttgaacagattatggcctttgcaagcaaatgagtactcctctcctaaagaaagattacgttgatgaaaaagaacatcctgcccaggacccatcatacatattttcaagatcttatttaatttaataaacttactttacattaaaattctctttttcttctttgcttaatgggcctgtggcacccaaataatgaatgataatttgctgtgaggagcgtatattagccagaccaaaggaaaaaacttcgaaggaagacttacaatttggttgaaaagagctttttattactaaaaaacccacaaggtgctgtctcactcatttccagttaatcatttctaaagagaaaatttacattttgtttttgttttaatgttggtcataaatttatacagttgttttttgatagaggtaagaattagactcgatgcatttttgttagaattgctgtttaaatgttaacatcagaatgcaaattaaatataaattgctttaacctttgttacaggtatactggactttctgaaaggaaaaccaggtctcattaatgctagttattactttatcacagcaccagatttccattttatttatggttcctctctgggacaccactgtcggtttaataaaacaataaataattcattgcacagatccgaagacctcaggaaccagatcacaagggaaaccgattagcagcagaatttgttcatgtttggtggcagactggtggccaactggagggaggggagttttactgtgggtttttgaagaggtctcgtcacaagaccagagatgcctcttgaagagatttttaggttgtaggtttgcttactctaaagaacatcttgcccagaagtctgatttgagatgaaatgaagagaaacagtctgcttttgaaccaagtaaggtattcttgggaataatttttagagccatgagaaatctattcttacaggggtgcttttcaggcaaatgcagaaaatttaaaagagtctagaacaaaaaagtgacaatgtcacaaccttgctggaatctcaggaaaaagaattaaagatggcagctgctgtgaaaagctgtgtgactcctggcggagactgcagggacaaggtcatctttcacaaaaaatggaaaggtggcctagatgaggaggacacagactctccagaagttatgcaaacaaaatcaggcaagatgaagaattttaaggcacacctccattggcccacagagagtgttcttcatatgacaatgatgttaaacaccatctgtcacgtaccaggccatgtcctaagtattttaaatatgttaacacatctacaaagaggaaactattagaatctgtaggacctcttaagcccaaagggtctactgcaggcaggatgggcgttacagaaaaaaataaaaactctcattccaaattgctcctaagatggacaaattggttacttctccagaaggtctaatcaaggttaacaaaataggtaagttcgtggagttagaatgcatcttccctggagttcagaggtatttgggatgaccaaaggagtctgctggacagtatgtgtgttttacaaaatggcccccacagtgattaaagaccagagacttatatctctgcatttgtcaagctggaacagtctttagtgaacacagcttacctcttttaaaactgctggtttctactgaaggaaacatggatgacatttagtgttctgtgactggtctggcaccctacttttgttgacaaagatgggaaggggtctaaaagtcatgtcacttataaaagaacttgggaggaacttttttcaaaagatccaaagattttggaaggagagattagagcagaactaagaccacttagaagataggtagatttcagctcaatataaggaatttttttttaatatcagtgcagttccaaatggaataagctgtttgaacatggcttagcagaagctgaatgacaacctgttagaaattctagggaattctgcactgagtacaacattggattatttctttgggctgtttccaactcaagattctgttatttcattataagcattttgaggaaggcagttggtataaaggtgaccttagtaataaaagtcagtgtgaagtctaaagaaattccacaatgaatttaaagacaagaattttagggacaaggatacagaaatttgcctagtaacttgcacacagcagatggtaaatatttattgactcaatggagtaatgttaaaaataaggtttcccatggactgtgtgagggccaggcatacttaacatcctttgtgagagagaggatggaaacggagtctactgtgaaagccacaagttttggggaaatacactcctgcaaagaagctggaggttaacaaccaaggcaaaggggccagaccacagggagatcttccaggtccaagagcactgcagggcagatgagaagcagggatgattatgttgaaagtgcaagataa

SEQ ID NO: 367416 - DNA, 3925 bp, Homo sapiens
ggggcagtctcttttctctcctcacctgacggctcccctccgcgcctccgggggctccctcaggcctccccacggtcatttcagctggacagaggcagcagcgacagtgacagcgatagtggcagcagcggtggcagcgagagctatgcggggccagggtccacccctttctagctttggcgtctggttggcttccagggcagcctccgatccatcccgcccgaggaggcaaggatatgatattcactttcatgacaagaaaatcctgttgctcgaagcaggtccaaagaaagtactggagaaattgtcagaaacttacagcaacagggtcagctccatttcccctggctctgcaacgcttctcagtagttttggtgcctgggaccatatctgcaacatgagatacagagcctttcggcgaatgcaggtgtgggacgcctgctcagaggccctgataatgtttgataaggataatttagatgacatgggctatatcgtggagaatgatgtcatcatgcatgctctcactaagcagttggaggctgtgtctgaccgagtgacggttctctacaggagcaaagccattcgctatacctggccttgtccatttcctatggccgactccagcccttgggttcatattaccctaggtgatggcagcaccttccagaccaaattgttgataggtgcagatggtcacaactccggagtacggcaggctgttggaatccagaatgtgagctggaactatgaccagtctgctgttgtggctactctgcatttatcagaggccacagaaaacaacgtagcctggcagagatttcttccctctgggcctattgctctgctcccgctctcagacaccttgagttccttggtttggtccacgtcccatgaacatgcagcagagctagttagcatggatgaggaaaaatttgtggatgccgttaactctgccttttggagtgatgctgaccacacggacttcatcgacacagctggtgccatgctgcagtatgctgtcagccttctgaagcccactaaggtctcggctcgccagctgcccccaagcgtagccagggtggatgccaaaagccgagttctgtttcctcttgggttgggacatgctgctgagtacgtcaggcctcgggtggcgctcattggggatgcagcccacagagtccatccgcttgcaggacagggtgtcaacatgggctttggggatatctccagcttggcccatcacctcagtacggcagccttcaatgggaaggacttaggttccgtgagccacctcacaggttatgaaacagaaagacagcgtcacaacactgctcttctggctgctacagacttactaaaaaggctctattctaccagtgcctccccgcttgtgttgctcaggacgtggggcttgcaggccacaaatgcagtgtctccactcaaagaacagattatggcctttgcaagcaaatgagtactcctctcctaaagaaagattacgttgatgaaaaagaacatcctgcccaggacccatcatacatattttcaagatcttatttaatttaataaacttactttacattaaaattctctttttcttctttgcttaatgggcctgtggcacccaaataatgaatgataatttgctgtgaggagcgtatattagccagaccaaaggaaaaaacttcgaaggaagacttacaatttggttgaaaagagctttttattactaaaaaacccacaaggtgctgtctcactcatttccagttaatcatttctaaagagaaaatttacattttgtttttgttttaatgttggtcataaatttatacagttgttttttgatagaggtaagaattagactcgatgcatttttgttagaattgctgtttaaatgttaacatcagaatgcaaattaaatataaattgctttaacctttgttacaggtatactggactttctgaaaggaaaaccaggtctcattaatgctagttattactttatcacagcaccagatttccattttatttatggttcctctctgggacaccactgtcggtttaataaaacaataaataattcattgcacagatccgaagacctcaggaaccagatcacaagggaaaccgattagcagcagaatttgttcatgtttggtggcagactggtggccaactggagggaggggagttttactgtgggtttttgaagaggtctcgtcacaagaccagagatgcctcttgaagagatttttaggttgtaggtttgcttactctaaagaacatcttgcccagaagtctgatttgagatgaaatgaagagaaacagtctgcttttgaaccaagtaaggtattcttgggaataatttttagagccatgagaaatctattcttacaggggtgcttttcaggcaaatgcagaaaatttaaaagagtctagaacaaaaaagtgacaatgtcacaaccttgctggaatctcaggaaaaagaattaaagatggcagctgctgtgaaaagctgtgtgactcctggcggagactgcagggacaaggtcatctttcacaaaaaatggaaaggtggcctagatgaggaggacacagactctccagaagttatgcaaacaaaatcaggcaagatgaagaattttaaggcacacctccattggcccacagagagtgttcttcatatgacaatgatgttaaacaccatctgtcacgtaccaggccatgtcctaagtattttaaatatgttaacacatctacaaagaggaaactattagaatctgtaggacctcttaagcccaaagggtctactgcaggcaggatgggcgttacagaaaaaaataaaaactctcattccaaattgctcctaagatggacaaattggttacttctccagaaggtctaatcaaggttaacaaaataggtaagttcgtggagttagaatgcatcttccctggagttcagaggtatttgggatgaccaaaggagtctgctggacagtatgtgtgttttacaaaatggcccccacagtgattaaagaccagagacttatatctctgcatttgtcaagctggaacagtctttagtgaacacagcttacctcttttaaaactgctggtttctactgaaggaaacatggatgacatttagtgttctgtgactggtctggcaccctacttttgttgacaaagatgggaaggggtctaaaagtcatgtcacttataaaagaacttgggaggaacttttttcaaaagatccaaagattttggaaggagagattagagcagaactaagaccacttagaagataggtagatttcagctcaatataaggaatttttttttaatatcagtgcagttccaaatggaataagctgtttgaacatggcttagcagaagctgaatgacaacctgttagaaattctagggaattctgcactgagtacaacattggattatttctttgggctgtttccaactcaagattctgttatttcattataagcattttgaggaaggcagttggtataaaggtgaccttagtaataaaagtcagtgtgaagtctaaagaaattccacaatgaatttaaagacaagaattttagggacaaggatacagaaatttgcctagtaacttgcacacagcagatggtaaatatttattgactcaatggagtaatgttaaaaataaggtttcccatggactgtgtgagggccaggcatacttaacatcctttgtgagagagaggatggaaacggagtctactgtgaaagccacaagttttggggaaatacactcctgcaaagaagctggaggttaacaaccaaggcaaaggggccagaccacagggagatcttccaggtccaagagcactgcagggcagatgagaagcagggatgattatgttgaaagtgcaagataa

SEQ ID NO: 367417 - DNA, 4309 bp, Homo sapiens
gtaagaaagagtgcctctgacagagttcactgagaacttcaatgtctttttttgacattgagttatctctgtggcttctgtcatttattagctcagaccacagcattaattactgatttttttaatcttaaatgacaagacactgctgtcctgggaccttgctttaggtttagttatggctttttcctcagcctatgtggcccacctttctaattttttttcctctcttttgacctccccagaccgagtgacggttctctacaggagcaaagccattcgctatacctggccttgtccatttcctatggccgactccagcccttgggttcatattaccctaggtgatggcagcaccttccagaccaaattgttggtagttgaagattcttattttgctaggggtcttgtatatctacatcttatcctagattctagggactctggttttcgatttaagctatagtttaattttaggcaaaacttttggttatgaggaccagtacctattcaggccagctcaagtggagatggtctcatcgtaaatcctgtacagggagcaatctcatgggccgtcttaggttgtgaaataacagatagctgggcctcacaggacaggcaccagagtgttgggaatggaggctgttctttccctctgaggagtctgtggtcattgatctcttgcctctcatttttctcctttctgctcacaagcttccctttttgcatggtagccattcctaaccctacatcagaactattcagctccagtgtgtgccccatactgaaactttccttattgctctctagttcaaatatcaggagggcctggctgagtttaactcatggctggcacctgttcagtcatgtccagctttggctctgttggctgaggctgatgtgacagtgcaggggctccacctctaggggctgtgagtgaagcaggcctgatggaattatcctgccacacaacaatcagagctggaggaaactttagggagcagagaaaaacttctgaagcagtttatgaagaggctggaagacttagcaggctcatgtgtccatgcagataggtgcagatggtcacaactccggagtacggcaggctgttggaatccagaatgtgagctggaactatgaccagtctgctgttgtggctactctgcatttatcagaggccacagaaaacaacgtagcctggcagagatttcttccctctgggcctattgctctgctcccgctctcagacaccttgagttccttggtttggtccacgtcccatgaacatgcagcagagctagttagcatggatgaggaaaaatttgtggatgccgttaactctgccttttggagtgatgctgaccacacggacttcatcgacacagctggtgccatgctgcagtatgctgtcagccttctgaagcccactaaggtctcggctcgccagctgcccccaagcgtagccagggtggatgccaaaagccgagttctgtttcctcttgggttgggacatgctgctgagtacgtcaggcctcgggtggcgctcattggggatgcagcccacagagtccatccgcttgcaggacagggtgtcaacatgggctttggggatatctccagcttggcccatcacctcagtacggcagccttcaatgggaaggacttaggttccgtgagccacctcacaggttatgaaacagaaagacagcgtcacaacactgctcttctggctgctacagacttactaaaaaggctctattctaccagtgcctccccgcttgtgttgctcaggacgtggggcttgcaggccacaaatgcagtgtctccactcaaagaacagattatggcctttgcaagcaaatgagtactcctctcctaaagaaagattacgttgatgaaaaagaacatcctgcccaggacccatcatacatattttcaagatcttatttaatttaataaacttactttacattaaaattctctttttcttctttgcttaatgggcctgtggcacccaaataatgaatgataatttgctgtgaggagcgtatattagccagaccaaaggaaaaaacttcgaaggaagacttacaatttggttgaaaagagctttttattactaaaaaacccacaaggtgctgtctcactcatttccagttaatcatttctaaagagaaaatttacattttgtttttgttttaatgttggtcataaatttatacagttgttttttgatagaggtaagaattagactcgatgcatttttgttagaattgctgtttaaatgttaacatcagaatgcaaattaaatataaattgctttaacctttgttacaggtatactggactttctgaaaggaaaaccaggtctcattaatgctagttattactttatcacagcaccagatttccattttatttatggttcctctctgggacaccactgtcggtttaataaaacaataaataattcattgcacagatccgaagacctcaggaaccagatcacaagggaaaccgattagcagcagaatttgttcatgtttggtggcagactggtggccaactggagggaggggagttttactgtgggtttttgaagaggtctcgtcacaagaccagagatgcctcttgaagagatttttaggttgtaggtttgcttactctaaagaacatcttgcccagaagtctgatttgagatgaaatgaagagaaacagtctgcttttgaaccaagtaaggtattcttgggaataatttttagagccatgagaaatctattcttacaggggtgcttttcaggcaaatgcagaaaatttaaaagagtctagaacaaaaaagtgacaatgtcacaaccttgctggaatctcaggaaaaagaattaaagatggcagctgctgtgaaaagctgtgtgactcctggcggagactgcagggacaaggtcatctttcacaaaaaatggaaaggtggcctagatgaggaggacacagactctccagaagttatgcaaacaaaatcaggcaagatgaagaattttaaggcacacctccattggcccacagagagtgttcttcatatgacaatgatgttaaacaccatctgtcacgtaccaggccatgtcctaagtattttaaatatgttaacacatctacaaagaggaaactattagaatctgtaggacctcttaagcccaaagggtctactgcaggcaggatgggcgttacagaaaaaaataaaaactctcattccaaattgctcctaagatggacaaattggttacttctccagaaggtctaatcaaggttaacaaaataggtaagttcgtggagttagaatgcatcttccctggagttcagaggtatttgggatgaccaaaggagtctgctggacagtatgtgtgttttacaaaatggcccccacagtgattaaagaccagagacttatatctctgcatttgtcaagctggaacagtctttagtgaacacagcttacctcttttaaaactgctggtttctactgaaggaaacatggatgacatttagtgttctgtgactggtctggcaccctacttttgttgacaaagatgggaaggggtctaaaagtcatgtcacttataaaagaacttgggaggaacttttttcaaaagatccaaagattttggaaggagagattagagcagaactaagaccacttagaagataggtagatttcagctcaatataaggaatttttttttaatatcagtgcagttccaaatggaataagctgtttgaacatggcttagcagaagctgaatgacaacctgttagaaattctagggaattctgcactgagtacaacattggattatttctttgggctgtttccaactcaagattctgttatttcattataagcattttgaggaaggcagttggtataaaggtgaccttagtaataaaagtcagtgtgaagtctaaagaaattccacaatgaatttaaagacaagaattttagggacaaggatacagaaatttgcctagtaacttgcacacagcagatggtaaatatttattgactcaatggagtaatgttaaaaataaggtttcccatggactgtgtgagggccaggcatacttaacatcctttgtgagagagaggatggaaacggagtctactgtgaaagccacaagttttggggaaatacactcctgcaaagaagctggaggttaacaaccaaggcaaaggggccagaccacagggagatcttccaggtccaagagcactgcagggcagatgagaagcagggatgattatgttgaaagtgcaagataa

SEQ ID NO: 367418 - DNA, 4575 bp, Homo sapiens
cgggacgggattggagtgctctgctccggacgcactacgtaggtgggcctgcgggagttctgagtgcgacggcgcaggtctgcaccatggcggcccggcttgtcagccgatgcggggctgtgcgtgcagctccccacagcggcccgctggtgtcctggcgcaggtggtccggcgcctcaacagacaccgtgtatgacgtggtggtgtcgggtggaggcctggtgggcgctgccatggcctgtgccttgggatatgatattcactttcatgacaagaaaatcctgttgctcgaagcaggtccaaagaaagtactggagaaattgtcagaaacttacagcaacagggtcagctccatttcccctggctctgcaacgcttctcagtagtgtgggacgcctgctcagaggccctgataatgtttgataaggataatttagatgacatgggctatatcgtggagaatgatgtcatcatgcatgctctcactaagcagttggaggctgtgtctgaccgagtgacggttctctacaggagcaaagccattcgctatacctggccttgtccatttcctatggccgactccagcccttgggttcatattaccctaggtgatggcagcaccttccagaccaaattgttggtagttgaagattcttattttgctaggggtcttgtatatctacatcttatcctagattctagggactctggttttcgatttaagctatagtttaattttaggcaaaacttttggttatgaggaccagtacctattcaggccagctcaagtggagatggtctcatcgtaaatcctgtacagggagcaatctcatgggccgtcttaggttgtgaaataacagatagctgggcctcacaggacaggcaccagagtgttgggaatggaggctgttctttccctctgaggagtctgtggtcattgatctcttgcctctcatttttctcctttctgctcacaagcttccctttttgcatggtagccattcctaaccctacatcagaactattcagctccagtgtgtgccccatactgaaactttccttattgctctctagttcaaatatcaggagggcctggctgagtttaactcatggctggcacctgttcagtcatgtccagctttggctctgttggctgaggctgatgtgacagtgcaggggctccacctctaggggctgtgagtgaagcaggcctgatggaattatcctgccacacaacaatcagagctggaggaaactttagggagcagagaaaaacttctgaagcagtttatgaagaggctggaagacttagcaggctcatgtgtccatgcagataggtgcagatggtcacaactccggagtacggcaggctgttggaatccagaatgtgagctggaactatgaccagtctgctgttgtggctactctgcatttatcagaggccacagaaaacaacgtagcctggcagagatttcttccctctgggcctattgctctgctcccgctctcagacaccttgagttccttggtttggtccacgtcccatgaacatgcagcagagctagttagcatggatgaggaaaaatttgtggatgccgttaactctgccttttggagtgatgctgaccacacggacttcatcgacacagctggtgccatgctgcagtatgctgtcagccttctgaagcccactaaggtctcggctcgccagctgcccccaagcgtagccagggtggatgccaaaagccgagttctgtttcctcttgggttgggacatgctgctgagtacgtcaggcctcgggtggcgctcattggggatgcagcccacagagtccatccgcttgcaggacagggtgtcaacatgggctttggggatatctccagcttggcccatcacctcagtacggcagccttcaatgggaaggacttaggttccgtgagccacctcacaggttatgaaacagaaagacagcgtcacaacactgctcttctggctgctacagacttactaaaaaggctctattctaccagtgcctccccgcttgtgttgctcaggacgtggggcttgcaggccacaaatgcagtgtctccactcaaagaacagattatggcctttgcaagcaaatgagtactcctctcctaaagaaagattacgttgatgaaaaagaacatcctgcccaggacccatcatacatattttcaagatcttatttaatttaataaacttactttacattaaaattctctttttcttctttgcttaatgggcctgtggcacccaaataatgaatgataatttgctgtgaggagcgtatattagccagaccaaaggaaaaaacttcgaaggaagacttacaatttggttgaaaagagctttttattactaaaaaacccacaaggtgctgtctcactcatttccagttaatcatttctaaagagaaaatttacattttgtttttgttttaatgttggtcataaatttatacagttgttttttgatagaggtaagaattagactcgatgcatttttgttagaattgctgtttaaatgttaacatcagaatgcaaattaaatataaattgctttaacctttgttacaggtatactggactttctgaaaggaaaaccaggtctcattaatgctagttattactttatcacagcaccagatttccattttatttatggttcctctctgggacaccactgtcggtttaataaaacaataaataattcattgcacagatccgaagacctcaggaaccagatcacaagggaaaccgattagcagcagaatttgttcatgtttggtggcagactggtggccaactggagggaggggagttttactgtgggtttttgaagaggtctcgtcacaagaccagagatgcctcttgaagagatttttaggttgtaggtttgcttactctaaagaacatcttgcccagaagtctgatttgagatgaaatgaagagaaacagtctgcttttgaaccaagtaaggtattcttgggaataatttttagagccatgagaaatctattcttacaggggtgcttttcaggcaaatgcagaaaatttaaaagagtctagaacaaaaaagtgacaatgtcacaaccttgctggaatctcaggaaaaagaattaaagatggcagctgctgtgaaaagctgtgtgactcctggcggagactgcagggacaaggtcatctttcacaaaaaatggaaaggtggcctagatgaggaggacacagactctccagaagttatgcaaacaaaatcaggcaagatgaagaattttaaggcacacctccattggcccacagagagtgttcttcatatgacaatgatgttaaacaccatctgtcacgtaccaggccatgtcctaagtattttaaatatgttaacacatctacaaagaggaaactattagaatctgtaggacctcttaagcccaaagggtctactgcaggcaggatgggcgttacagaaaaaaataaaaactctcattccaaattgctcctaagatggacaaattggttacttctccagaaggtctaatcaaggttaacaaaataggtaagttcgtggagttagaatgcatcttccctggagttcagaggtatttgggatgaccaaaggagtctgctggacagtatgtgtgttttacaaaatggcccccacagtgattaaagaccagagacttatatctctgcatttgtcaagctggaacagtctttagtgaacacagcttacctcttttaaaactgctggtttctactgaaggaaacatggatgacatttagtgttctgtgactggtctggcaccctacttttgttgacaaagatgggaaggggtctaaaagtcatgtcacttataaaagaacttgggaggaacttttttcaaaagatccaaagattttggaaggagagattagagcagaactaagaccacttagaagataggtagatttcagctcaatataaggaatttttttttaatatcagtgcagttccaaatggaataagctgtttgaacatggcttagcagaagctgaatgacaacctgttagaaattctagggaattctgcactgagtacaacattggattatttctttgggctgtttccaactcaagattctgttatttcattataagcattttgaggaaggcagttggtataaaggtgaccttagtaataaaagtcagtgtgaagtctaaagaaattccacaatgaatttaaagacaagaattttagggacaaggatacagaaatttgcctagtaacttgcacacagcagatggtaaatatttattgactcaatggagtaatgttaaaaataaggtttcccatggactgtgtgagggccaggcatacttaacatcctttgtgagagagaggatggaaacggagtctactgtgaaagccacaagttttggggaaatacactcctgcaaagaagctggaggttaacaaccaaggcaaaggggccagaccacagggagatcttccaggtccaagagcactgcagggcagatgagaagcagggatgattatgttgaaagtgcaagataa

SEQ ID NO: 367419 - DNA, 1995 bp, Homo sapiens
cgggacgggattggagtgctctgctccggacgcactacgtaggtgggcctgcgggagttctgagtgcgacggcgcaggtctgcaccatggcggcccggcttgtcagccgatgcggggctgtgcgtgcagctccccacagcggcccgctggtgtcctggcgcaggtggtccggcgcctcaacagacaccgtgtatgacgtggtggtgtcgggtggaggcctggtgggcgctgccatggcctgtgccttgggatatgatattcactttcatgacaagaaaatcctgttgctcgaagcaggtccaaagaaagtactggagaaattgtcagaaacttacagcaacagggtcagctccatttcccctggctctgcaacgcttctcagtagttttggtgcctgggaccatatctgcaacatgagatacagagcctttcggcgaatgcaggtgtgggacgcctgctcagaggccctgataatgtttgataaggataatttagatgacatgggctatatcgtggagaatgatgtcatcatgcatgctctcactaagcagttggaggctgtgtctgaccgagtgacggttctctacaggagcaaagccattcgctatacctggccttgtccatttcctatggccgactccagcccttgggttcatattaccctaggtgatggcagcaccttccagaccaaattgttgataggtgcagatggtcacaactccggagtacggcaggctgttggaatccagaatgtgagctggaactatgaccagtctgctgttgtggctactctgcatttatcagaggccacagaaaacaacgtagcctggcagagatttcttccctctgggcctattgctctgctcccgctctcagacaccttgagttccttggtttggtccacgtcccatgaacatgcagcagagctagttagcatggatgaggaaaaatttgtggatgccgttaactctgccttttggagtgatgctgaccacacggacttcatcgacacagctggtgccatgctgcagtatgctgtcagccttctgaagcccactaaggtctcggctcgccagctgcccccaagcgtagccagggtggatgccaaaagccgagttctgtttcctcttgggttgggacatgctgctgagtacgtcaggcctcgggtggcgctcattggggatgcagcccacagagtccatccgcttgcaggacagggtgtcaacatgggctttggggatatctccagcttggcccatcacctcagtacggcagccttcaatgggaaggacttaggttccgtgagccacctcacaggttatgaaacagaaagacagcgtcacaacactgctcttctggctgctacagacttactaaaaaggctctattctaccagtgcctccccgcttgtgttgctcaggacgtggggcttgcaggccacaaatgcagtgtctccactcaaagaacagattatggcctttgcaagcaaatgagtactcctctcctaaagaaagattacgttgatgaaaaagaacatcctgcccaggacccatcatacatattttcaagatcttatttaatttaataaacttactttacattaaaaaaaaaaaaaaaaaaaaaaaaaaaagggggggggggctaagaaatttccccgggggggcccaattttggcggtcacccccgctttctttgggctcccacggggtccccctatggggagcgcgtatataaataacgcattggccacaggcgccgcgggtttcaaaccccgctcgttggccgggcggaaaacccggctccccctggcactcctcggggaagggacccttaactctgtgggcgttggcgccatctgtggcaccacctcccctcagagaatctatcgcgccgagggcaaatataccctctcacccgctcttcaccgggtacccaccgcccattatgtcttggcgcttgaaactttgggcacgcgcctctattctcacactcttc

SEQ ID NO: 367420 - DNA, 3230 bp, Homo sapiens
ttagcctaagctttggttacaaacaaggtttctttattgaatttttaattccctgctactcacatttcaccttgtttgtcttgtggctgatgctgctcagtggagtgatgctgaccacacggacttcatcgacacagctggtgccatgctgcagtatgctgtcagccttctgaagcccactaaggtctcggctcgccagctgcccccaagcgtagccagggtggatgccaaaagccgagttctgtttcctcttgggttgggacatgctgctgagtacgtcaggcctcgggtggcgctcattggggatgcagcccacagagtccatccgcttgcaggacagggtgtcaacatgggctttggggatatctccagcttggcccatcacctcagtacggcagccttcaatgggaaggacttaggtaaggattcagatactatggggaagtatccagaggtcatatagttaggcaagatcagggcccacagtagcaagagggagtggacataaaatatatctggcttgctaggagatggaagaaaaccttattattggattagggatttaatctttcctctgcccttcaggttccgtgagccacctcacaggttatgaaacagaaagacagcgtcacaacactgctcttctggctgctacagacttactaaaaaggctctattctaccagtgcctccccgcttgtgttgctcaggacgtggggcttgcaggccacaaatgcagtgtctccactcaaagaacagattatggcctttgcaagcaaatgagtactcctctcctaaagaaagattacgttgatgaaaaagaacatcctgcccaggacccatcatacatattttcaagatcttatttaatttaataaacttactttacattaaaattctctttttcttctttgcttaatgggcctgtggcacccaaataatgaatgataatttgctgtgaggagcgtatattagccagaccaaaggaaaaaacttcgaaggaagacttacaatttggttgaaaagagctttttattactaaaaaacccacaaggtgctgtctcactcatttccagttaatcatttctaaagagaaaatttacattttgtttttgttttaatgttggtcataaatttatacagttgttttttgatagaggtaagaattagactcgatgcatttttgttagaattgctgtttaaatgttaacatcagaatgcaaattaaatataaattgctttaacctttgttacaggtatactggactttctgaaaggaaaaccaggtctcattaatgctagttattactttatcacagcaccagatttccattttatttatggttcctctctgggacaccactgtcggtttaataaaacaataaataattcattgcacagatccgaagacctcaggaaccagatcacaagggaaaccgattagcagcagaatttgttcatgtttggtggcagactggtggccaactggagggaggggagttttactgtgggtttttgaagaggtctcgtcacaagaccagagatgcctcttgaagagatttttaggttgtaggtttgcttactctaaagaacatcttgcccagaagtctgatttgagatgaaatgaagagaaacagtctgcttttgaaccaagtaaggtattcttgggaataatttttagagccatgagaaatctattcttacaggggtgcttttcaggcaaatgcagaaaatttaaaagagtctagaacaaaaaagtgacaatgtcacaaccttgctggaatctcaggaaaaagaattaaagatggcagctgctgtgaaaagctgtgtgactcctggcggagactgcagggacaaggtcatctttcacaaaaaatggaaaggtggcctagatgaggaggacacagactctccagaagttatgcaaacaaaatcaggcaagatgaagaattttaaggcacacctccattggcccacagagagtgttcttcatatgacaatgatgttaaacaccatctgtcacgtaccaggccatgtcctaagtattttaaatatgttaacacatctacaaagaggaaactattagaatctgtaggacctcttaagcccaaagggtctactgcaggcaggatgggcgttacagaaaaaaataaaaactctcattccaaattgctcctaagatggacaaattggttacttctccagaaggtctaatcaaggttaacaaaataggtaagttcgtggagttagaatgcatcttccctggagttcagaggtatttgggatgaccaaaggagtctgctggacagtatgtgtgttttacaaaatggcccccacagtgattaaagaccagagacttatatctctgcatttgtcaagctggaacagtctttagtgaacacagcttacctcttttaaaactgctggtttctactgaaggaaacatggatgacatttagtgttctgtgactggtctggcaccctacttttgttgacaaagatgggaaggggtctaaaagtcatgtcacttataaaagaacttgggaggaacttttttcaaaagatccaaagattttggaaggagagattagagcagaactaagaccacttagaagataggtagatttcagctcaatataaggaatttttttttaatatcagtgcagttccaaatggaataagctgtttgaacatggcttagcagaagctgaatgacaacctgttagaaattctagggaattctgcactgagtacaacattggattatttctttgggctgtttccaactcaagattctgttatttcattataagcattttgaggaaggcagttggtataaaggtgaccttagtaataaaagtcagtgtgaagtctaaagaaattccacaatgaatttaaagacaagaattttagggacaaggatacagaaatttgcctagtaacttgcacacagcagatggtaaatatttattgactcaatggagtaatgttaaaaataaggtttcccatggactgtgtgagggccaggcatacttaacatcctttgtgagagagaggatggaaacggagtctactgtgaaagccacaagttttggggaaatacactcctgcaaagaagctggaggttaacaaccaaggcaaaggggccagaccacagggagatcttccaggtccaagagcactgcagggcagatgagaagcagggatgattatgttgaaagtgcaagataa

SEQ ID NO: 367421 - DNA, 2530 bp, Homo sapiens
ttctgtcttgttgtctttcacccgtcgggggcgcgttttattcgctttgctgggctccgtgtggtaagtccccgcttttgcctctgacgtcccttctggggttgtctcaaccccgtcggtgtccccgcccgccggtttttatattggggagaaaccaccgcctgtctatgccccgggtttctctctggggaccgcttaggcccacggtcaccttaccctactgggccgccccgcgccccaaccgaaggtgtttaaaaacttttccggggcccgggcggcccccaaattttttttttttttttttttttttaatttggttgaaaagagctttttattactaaaaaacccacaaggtgctgtctcactcatttccagttaatcatttctaaagagaaaatttacattttgtttttgttttaatgttggtcataaatttatacagttgttttttgatagaggtaagaattagactcgatgcatttttgttagaattgctgtttaaatgttaacatcagaatgcaaattaaatataaattgctttaacctttgttacaggtatactggactttctgaaaggaaaaccaggtctcattaatgctagttattactttatcacagcaccagatttccattttatttatggttcctctctgggacaccactgtcggtttaataaaacaataaataattcattgcacagatccgaagacctcaggaaccagatcacaagggaaaccgattagcagcagaatttgttcatgtttggtggcagactggtggccaactggagggaggggagttttactgtgggtttttgaagaggtctcgtcacaagaccagagatgcctcttgaagagatttttaggttgtaggtttgcttactctaaagaacatcttgcccagaagtctgatttgagatgaaatgaagagaaacagtctgcttttgaaccaagtaaggtattcttgggaataatttttagagccatgagaaatctattcttacaggggtgcttttcaggcaaatgcagaaaatttaaaagagtctagaacaaaaaagtgacaatgtcacaaccttgctggaatctcaggaaaaagaattaaagatggcagctgctgtgaaaagctgtgtgactcctggcggagactgcagggacaaggtcatctttcacaaaaaatggaaaggtggcctagatgaggaggacacagactctccagaagttatgcaaacaaaatcaggcaagatgaagaattttaaggcacacctccattggcccacagagagtgttcttcatatgacaatgatgttaaacaccatctgtcacgtaccaggccatgtcctaagtattttaaatatgttaacacatctacaaagaggaaactattagaatctgtaggacctcttaagcccaaagggtctactgcaggcaggatgggcgttacagaaaaaaataaaaactctcattccaaattgctcctaagatggacaaattggttacttctccagaaggtctaatcaaggttaacaaaataggtaagttcgtggagttagaatgcatcttccctggagttcagaggtatttgggatgaccaaaggagtctgctggacagtatgtgtgttttacaaaatggcccccacagtgattaaagaccagagacttatatctctgcatttgtcaagctggaacagtctttagtgaacacagcttacctcttttaaaactgctggtttctactgaaggaaacatggatgacatttagtgttctgtgactggtctggcaccctacttttgttgacaaagatgggaaggggtctaaaagtcatgtcacttataaaagaacttgggaggaacttttttcaaaagatccaaagattttggaaggagagattagagcagaactaagaccacttagaagataggtagatttcagctcaatataaggaatttttttttaatatcagtgcagttccaaatggaataagctgtttgaacatggcttagcagaagctgaatgacaacctgttagaaattctagggaattctgcactgagtacaacattggattatttctttgggctgtttccaactcaagattctgttatttcattataagcattttgaggaaggcagttggtataaaggtgaccttagtaataaaagtcagtgtgaagtctaaagaaattccacaatgaatttaaagacaagaattttagggacaaggatacagaaatttgcctagtaacttgcacacagcagatggtaaatatttattgactcaatggagtaatgttaaaaataaggtttcccatggactgtgtgagggccaggcatacttaacatcctttgtgagagagaggatggaaacggagtctactgtgaaagccacaagttttggggaaatacactcctgcaaagaagctggaggttaacaaccaaggcaaaggggccagaccacagggagatcttccaggtccaagagcactgcagggcagatgagaagcagggatgattatgttgaaagtgcaagataa

SEQ ID NO: 367422 - DNA, 404 bp, Homo sapiens
agaagtggagagtattattgaagaacactgaaaacaacctcttacgtaacaggatggagggacaagggggagcccaggtccttgtgaagtcactctggtctatagatcctttcttttgtaggttttggtgcctgggaccatatctgcaacatgagatacagagcctttcggcgaatgcaggtgcccctttatcttttcaattttgtcaagatgtcttggtctgtcttaagatatcggagtccactttctccaagtgttctgtgaatgtaggaggaatcagacaaggttcacattcagtccgaggaagtggggagaagcattcccaggagaattttcttctcattttatattttcctaccagagaggctgacaaattgtgattttctgctctgtcacttgggaaa

SEQ ID NO: 367423 - DNA, 1969 bp, Homo sapiens
ctctttttccttcccgccgtgccccgcggccgggccggggcagccgggaagcgggtggggtggtgtgttacccagtagctcctgggacatcgctcgggtacgctccacgccgtcgcagccactgctgtggtcgccggtcggccgaggggccgcgatactggttgcccgcggtgtaagcagaattcgacgtgtatcgctgccgtcaagatggaggggcctttgtccgtgttcggtgaccgcagcactggggaaacgatccgctcccaaaacgttatggctgcagcttcgattgccaatattgtaaaaagttctcttggtccagttggcttggataaaatgttggtggatgatattggtgatgtaaccattactaacgatggtgcaaccatcctgaagttactggaggtagaacatcctgcagctaaagttctttgtgagctggctgatctgcaagacaaagaagttggagatggaactacttcagtggttattattgcagcagaactcctaaaaaatgcagatgaattagtcaaacagaaaattcatcccacatcagttattagtggctatcgacttgcttgcaaggaagcagtgcgttatatcaatgaaaacctaattgttaacacagatgaactgggaagagattgcctgattaatgctgctaagacatccatgtcttccaaaatcattggaataaatggtgatttctttgctaacatggtagtagatgctgtacttgctattaaatacacagacataagaggccagccacgctatccagtcaactctgttaatattttgaaagcccatgggagaagtcaaatggagagtatgctcatcagtggctatgcactcaactgtgtggtgggatcccagggcatgcccaagagaatcgtaaatgcaaaaattgcttgccttgacttcagcctgcaaaaaacaaaaatgaagcttggtgtacaggtggtcattacagaccctgaaaaactggaccaaattagacagagagaatcagatatcaccaaggagagaattcagaagatcctggcaactggtgccaatgttattctaaccactggtggaattgatgatatgtgtctgaagtattttgtggaggctggtgctatggcagttagaagagttttaaaaagggaccttaaacgcattgccaaagcttctggagcaactattctgtcaaccctggccaatttggaaggtgaagaaacttttgaagctgcaatgttgggacaggcagaagaagtggtacaggagagaatttgtgatgatgagctgatcttaatcaaaaatactaaggctcgtacgtctgcatcgattatcttacgtggggcaaatgatttcatgtgtgatgagatggagcgctctttacatgatgcactttgtgtagtgaagagagttttggagtcaaaatctgtggttcccggtgggggtgctgtagaagcagccctttccatataccttgaaaactatgcaaccagcatggggtctcgggaacagcttgcgattgcagagtttgcaagatcacttcttgttattcccaatacactagcagttaatgctgcccaggactccacagatctggttgcaaaattaagagcttttcataatgaggcccaggttaacccagaacgtaaaaatctaaaatggattggtcttgatttgagcaatggtaaacctcgagacaacaaacaagcaggggtgtttgaaccaaccatagttaaagttaagagtttgaaatttgcaacagaagctgcaatcaccattcttcgaattgatgatcttattaaattacatccagaaagtaaagatgataaacatggaagttatgaagatgctgttcactctggagcccttaatgattgatctgatgttccttttatttataacaatgttaaatgcaattgtcttgtaccttgagttgagtattacacattaaagtaaagtacaagctgta

SEQ ID NO: 367424 - DNA, 556 bp, Homo sapiens
agcgggcctcccgggctcgcacgtgcgggccacgcctcgcacccccttttgtttcagggcgaccccctgagtgtccatgttaaacgccaggttttattttaggaccatttaccagaaaaagagtaggtccatccgcgcgccctcggatgagcccggtgccctgtccgcccgcagctgcagtcgaggtcgggcgtccggcgtccagccgtatccgggttgacagcttcttacagtagagttagcccaggaaacgccactcgagtgcattgaccccaggagacggcagcgctaacttagcagagcgtttgctgtcaggcctttggatacctacagagcttactgtttcttgatagattcctaatttttttcgtaaacaaatctgaaagtcaccaccttccccgttgactaccgatttctctcctcacagataaagagagttttaatgagcaaaaaacttgcagaatctgaaggaaaaggctggtatagctgtacgaagtggcagagcatgaaattggtggttattactttttttttttttccccgccatcagattcca

SEQ ID NO: 367425 - DNA, 2425 bp, Homo sapiens
ctctttttccttcccgccgtgccccgcggccgggccggggcagccgggaagcgggtggggtggtgtgttacccagtagctcctgggacatcgctcgggtacgctccacgccgtcgcagccactgctgtggtcgccggtcggccgaggggccgcgatactggttgcccgcggtgtaagcagaattcgacgtgtatcgctgccgtcaagatggaggggcctttgtccgtgttcggtgaccgcagcactggggaaacgatccgctcccaaaacgttatggctgcagcttcgattgccaatattgtaaaaagttctcttggtccagttggcttggataaaatgttggtggatgatattggtgatgtaaccattactaacgatggtgcaaccatcctgaagttactggaggtagaacatcctgcagctaaagttctttgtgagctggctgatctgcaagacaaagaagttggagatggaactacttcagtggttattattgcagcagaactcctaaaaaatgcagatgaattagtcaaacagaaaattcatcccacatcagttattagtggctatcgacttgcttgcaaggaagcagtgcgttatatcaatgaaaacctaattgttaacacagatgaactgggaagagattgcctgattaatgctgctaagacatccatgtcttccaaaatcattggaataaatggtgatttctttgctaacatggtagtagatgctgtacttgctattaaatacacagacataagaggccagccacgctatccagtcaactctgttaatattttgaaagcccatgggagaagtcaaatggagagtatgctcatcagtggctatgcactcaactgtgtggtgggatcccagggcatgcccaagagaatcgtaaatgcaaaaattgcttgccttgacttcagcctgcaaaaaacaaaaatgaagcttggtgtacaggtggtcattacagaccctgaaaaactggaccaaattagacagagagaatcagatatcaccaaggagagaattcagaagatcctggcaactggtgccaatgttattctaaccactggtggaattgatgatatgtgtctgaagtattttgtggaggctggtgctatggcagttagaagagttttaaaaagggaccttaaacgcattgccaaagcttctggagcaactattctgtcaaccctggccaatttggaaggtgaagaaacttttgaagctgcaatgttgggacaggcagaagaagtggtacaggagagaatttgtgatgatgagctgatcttaatcaaaaatactaaggctcgtacgtctgcatcgattatcttacgtggggcaaatgatttcatgtgtgatgagatggagcgctctttacatgatgcactttgtgtagtgaagagagttttggagtcaaaatctgtggttcccggtgggggtgctgtagaagcagccctttccatataccttgaaaactatgcaaccagcatggggtctcgggaacagcttgcgattgcagagtttgcaagatcacttcttgttattcccaatacactagcagttaatgctgcccaggactccacagatctggttgcaaaattaagagcttttcataatgaggcccaggttaacccagaacgtaaaaatctaaaatggattggtcttgatttgagcaatggtaaacctcgagacaacaaacaagcaggggtgtttgaaccaaccatagttaaagttaagagtttgaaatttgcaacagaagctgcaatcaccattcttcgaattgatgatcttattaaattacatccagaaagtaaagatgataaacatggaagttatgaagatgctgttcactctggagcccttaatgattgatctgatgttccttttatttataacaatgttaaatgcaattgtcttgtaccttgagttgagtattacacattaaagtaaagtacaagctgtaaacttgggtttttgtgatgtaggaaatggtttccatctgtactttggtcctctgatttcacatattgcaacctagtactttattagtttaaaaagaaattgaggttgttcaaagtttaagcaattcattctctctgaacacacattgctattcccatcccacccccaatgcacagggctgcaacaccacgacttctgcccattctctccagtgtgtgtaacagggtcacaagaattcgacagccagatgctccaagagggtggcccaaggctatagcccctccttcaatattgacctagcgggggagaaaagatttagattgtttattcttctgtggacacagtttaaaatcttaaacttgtctttttcctcttaatgtatcagcatgctaccctttcaaactcaaattttcattttaactgcttaggaataaatttacacctttgtgaaaattca

SEQ ID NO: 367426 - DNA, 2793 bp, Homo sapiens
ctctttttccttcccgccgtgccccgcggccgggccggggcagccgggaagcgggtggggtggtgtgttacccagtagctcctgggacatcgctcgggtacgctccacgccgtcgcagccactgctgtggtcgccggtcggccgaggggccgcgatactggttgcccgcggtgtaagcagaattcgacgtgtatcgctgccgtcaagatggaggggcctttgtccgtgttcggtgaccgcagcactggggaaacgatccgctcccaaaacgttatggctgcagcttcgattgccaatattgtaaaaagttctcttggtccagttggcttggataaaatgttggtggatgatattggtgatgtaaccattactaacgatggtgcaaccatcctgaagttactggaggtagaacatcctgcagctaaagttctttgtgagctggctgatctgcaagacaaagaagttggagatggaactacttcagtggttattattgcagcagaactcctaaaaaatgcagatgaattagtcaaacagaaaattcatcccacatcagttattagtggctatcgacttgcttgcaaggaagcagtgcgttatatcaatgaaaacctaattgttaacacagatgaactgggaagagattgcctgattaatgctgctaagacatccatgtcttccaaaatcattggaataaatggtgatttctttgctaacatggtagtagatgctgtacttgctattaaatacacagacataagaggccagccacgctatccagtcaactctgttaatattttgaaagcccatgggagaagtcaaatggagagtatgctcatcagtggctatgcactcaactgtgtggtgggatcccagggcatgcccaagagaatcgtaaatgcaaaaattgcttgccttgacttcagcctgcaaaaaacaaaaatgaagcttggtgtacaggtggtcattacagaccctgaaaaactggaccaaattagacagagagaatcagatatcaccaaggagagaattcagaagatcctggcaactggtgccaatgttattctaaccactggtggaattgatgatatgtgtctgaagtattttgtggaggctggtgctatggcagttagaagagttttaaaaagggaccttaaacgcattgccaaagcttctggaggtatgtcttgtgctggctgtcacataaaatacttttattatccctgatcctatcaaaggtctttttacattggaatattgacagaaaacagctcaaaaacatttatattctcttaatgctttgtgctaccaacacatttatagagccatttttcatgtaactggagaaattttgttggaaatttgtgaactgaatttgttcatttctaaaatgacagttccatcttaggataaaaggagttaccgtgtgctgcctaactaaattctaaacttgtaatatagcacttttatcacaaatgctactgagtccaaggatattaaaatcatgaaagagcaatattcacagatcctttgtaactctcttattagcaactattctgtcaaccctggccaatttggaaggtgaagaaacttttgaagctgcaatgttgggacaggcagaagaagtggtacaggagagaatttgtgatgatgagctgatcttaatcaaaaatactaaggctcgtacgtctgcatcgattatcttacgtggggcaaatgatttcatgtgtgatgagatggagcgctctttacatgatgcactttgtgtagtgaagagagttttggagtcaaaatctgtggttcccggtgggggtgctgtagaagcagccctttccatataccttgaaaactatgcaaccagcatggggtctcgggaacagcttgcgattgcagagtttgcaagatcacttcttgttattcccaatacactagcagttaatgctgcccaggactccacagatctggttgcaaaattaagagcttttcataatgaggcccaggttaacccagaacgtaaaaatctaaaatggattggtcttgatttgagcaatggtaaacctcgagacaacaaacaagcaggggtgtttgaaccaaccatagttaaagttaagagtttgaaatttgcaacagaagctgcaatcaccattcttcgaattgatgatcttattaaattacatccagaaagtaaagatgataaacatggaagttatgaagatgctgttcactctggagcccttaatgattgatctgatgttccttttatttataacaatgttaaatgcaattgtcttgtaccttgagttgagtattacacattaaagtaaagtacaagctgtaaacttgggtttttgtgatgtaggaaatggtttccatctgtactttggtcctctgatttcacatattgcaacctagtactttattagtttaaaaagaaattgaggttgttcaaagtttaagcaattcattctctctgaacacacattgctattcccatcccacccccaatgcacagggctgcaacaccacgacttctgcccattctctccagtgtgtgtaacagggtcacaagaattcgacagccagatgctccaagagggtggcccaaggctatagcccctccttcaatattgacctagcgggggagaaaagatttagattgtttattcttctgtggacacagtttaaaatcttaaacttgtctttttcctcttaatgtatcagcatgctaccctttcaaactcaaattttcattttaactgcttaggaataaatttacacctttgtgaaaattca

SEQ ID NO: 367427 - DNA, 2507 bp, Homo sapiens
ctctttttccttcccgccgtgccccgcggccgggccggggcagccgggaagcgggtggggtggtgtgttacccagtagctcctgggacatcgctcgggtacgctccacgccgtcgcagccactgctgtggtcgccggtcggccgaggggccgcgatactggttgcccgcggtgtaagcagaattcgacgtgtatcgctgccgtcaagatggaggggcctttgtccgtgttcggtgaccgcagcactggggaaacgatccgctcccaaaacgttatggctgcagcttcgattgccaatattgtaaaaagttctcttggtccagttggcttggataaaatgttggtggatgatattggtgatgtaaccattactaacgatggtgcaaccatcctgaagttactggaggtagaacatcctgcagctaaagttctttgtgagctggctgatctgcaagacaaagaagttggagatggaactacttcagtggttattattgcagcagaactcctaaaaaatgcagatgaattagtcaaacagaaaattcatcccacatcagttattagtggctatcgacttgcttgcaaggaagcagtgcgttatatcaatgaaaacctaattgttaacacagatgaactgggaagagattgcctgattaatgctgctaagacatccatgtcttccaaaatcattggaatgtatccttgtggttgtcagataaaatttagactttttaaagcataagactttgagatgggcatggtggtatgtgcctgtagtcccagctactaaggaggctgaggtaggagtattaattgaacccaggagtgccagtccaatgtgggcaacatagcaagaccctgtctcgggagtgggtgcgtgtgtgcgcatgtgttgcgcgcacgcgtgcgtagtagcagcagtatcaattttgtgcaataaaattttgaataaccaattttatgcaaattgatatcaatagagaggagtaatgctgtattgaaattacctgttgccttccctgcttttttagggtgaaaaggtaataaaaagcatgtctaaaagtgatatgaattgcagatagtgataatgttgtaacattttggtgacaagtaatgcttgcttctttaatagattagattactaaaaggaagtcccttgaaattacccttgatttttcacgtgtgtaccctttgtccattccaaacctgttactgtccttaacttttggcgtagaaatggtgatttctttgctaacatggtagtagatgctgtacttgctattaaatacacagacataagaggccagccacgctatccagtcaactctgttaatattttgaaagcccatgggagaagtcaaatggagagtatgctcatcagtggctatgcactcaactgtgtggtgggatcccagggcatgcccaagagaatcgtaaatgcaaaaattgcttgccttgacttcagcctgcaaaaaacaaaaatgaagcttggtgtacaggtggtcattacagaccctgaaaaactggaccaaattagacagagagaatcagatatcaccaaggagagaattcagaagatcctggcaactggtgccaatgttattctaaccactggtggaattgatgatatgtgtctgaagtattttgtggaggctggtgctatggcagttagaagagttttaaaaagggaccttaaacgcattgccaaagcttctggagcaactattctgtcaaccctggccaatttggaaggtgaagaaacttttgaagctgcaatgttgggacaggcagaagaagtggtacaggagagaatttgtgatgatgagctgatcttaatcaaaaatactaaggctcgtacgtctgcatcgattatcttacgtggggcaaatgatttcatgtgtgatgagatggagcgctctttacatgatgcactttgtgtagtgaagagagttttggagtcaaaatctgtggttcccggtgggggtgctgtagaagcagccctttccatataccttgaaaactatgcaaccagcatggggtctcgggaacagcttgcgattgcagagtttgcaagatcacttcttgttattcccaatacactagcagttaatgctgcccaggactccacagatctggttgcaaaattaagagcttttcataatgaggcccaggttaacccagaacgtaaaaatctaaaatggattggtcttgatttgagcaatggtaaacctcgagacaacaaacaagcaggggtgtttgaaccaaccatagttaaagttaagagtttgaaatttgcaacagaagctgcaatcaccattcttcgaattgatgatcttattaaattacatccagaaagtaaagatgataaacatggaagttatgaagatgctgttcactctggagcccttaatgattgatctgatgttccttttatttataacaatgttaaatgcaattgtcttgtaccttgagttgagtattacacattaaagtaaagtacaagctgta

SEQ ID NO: 367428 - DNA, 1883 bp, Homo sapiens
ctctttttccttcccgccgtgccccgcggccgggccggggcagccgggaagcgggtggggtggtgtgttacccagtagctcctgggacatcgctcgggtacgctccacgccgtcgcagccactgctgtggtcgccggtcggccgaggggccgcgatactggttgcccgcggtgtaagcagaattcgacgtgtatcgctgccgtcaagatggaggggcctttgtccgtgttcggtgaccgcagcactggggaaacgatccgctcccaaaacggatgtaaccattactaacgatggtgcaaccatcctgaagttactggaggtagaacatcctgcagctaaagttctttgtgagctggctgatctgcaagacaaagaagttggagatggaactacttcagtggttattattgcagcagaactcctaaaaaatgcagatgaattagtcaaacagaaaattcatcccacatcagttattagtggctatcgacttgcttgcaaggaagcagtgcgttatatcaatgaaaacctaattgttaacacagatgaactgggaagagattgcctgattaatgctgctaagacatccatgtcttccaaaatcattggaataaatggtgatttctttgctaacatggtagtagatgctgtacttgctattaaatacacagacataagaggccagccacgctatccagtcaactctgttaatattttgaaagcccatgggagaagtcaaatggagagtatgctcatcagtggctatgcactcaactgtgtggtgggatcccagggcatgcccaagagaatcgtaaatgcaaaaattgcttgccttgacttcagcctgcaaaaaacaaaaatgaagcttggtgtacaggtggtcattacagaccctgaaaaactggaccaaattagacagagagaatcagatatcaccaaggagagaattcagaagatcctggcaactggtgccaatgttattctaaccactggtggaattgatgatatgtgtctgaagtattttgtggaggctggtgctatggcagttagaagagttttaaaaagggaccttaaacgcattgccaaagcttctggagcaactattctgtcaaccctggccaatttggaaggtgaagaaacttttgaagctgcaatgttgggacaggcagaagaagtggtacaggagagaatttgtgatgatgagctgatcttaatcaaaaatactaaggctcgtacgtctgcatcgattatcttacgtggggcaaatgatttcatgtgtgatgagatggagcgctctttacatgatgcactttgtgtagtgaagagagttttggagtcaaaatctgtggttcccggtgggggtgctgtagaagcagccctttccatataccttgaaaactatgcaaccagcatggggtctcgggaacagcttgcgattgcagagtttgcaagatcacttcttgttattcccaatacactagcagttaatgctgcccaggactccacagatctggttgcaaaattaagagcttttcataatgaggcccaggttaacccagaacgtaaaaatctaaaatggattggtcttgatttgagcaatggtaaacctcgagacaacaaacaagcaggggtgtttgaaccaaccatagttaaagttaagagtttgaaatttgcaacagaagctgcaatcaccattcttcgaattgatgatcttattaaattacatccagaaagtaaagatgataaacatggaagttatgaagatgctgttcactctggagcccttaatgattgatctgatgttccttttatttataacaatgttaaatgcaattgtcttgtaccttgagttgagtattacacattaaagtaaagtacaagctgta

SEQ ID NO: 367429 - DNA, 2056 bp, Homo sapiens
ctctttttccttcccgccgtgccccgcggccgggccggggcagccgggaagcgggtggggtggtgtgttacccagtagctcctgggacatcgctcgggtacgctccacgccgtcgcagccactgctgtggtcgccggtcggccgaggggccgcgatactggttgcccgcggtgtaagcagaattcgacgtgtatcgctgccgtcaagatggaggggcctttgtccgtgttcggtgaccgcagcactggggaaacgatccgctcccaaaacgataaagagagttttaatgagcaaaaaacttgcagaatctgaaggaaaaggctggtatagctgtacgaagtggcagagcatgaaattgttatggctgcagcttcgattgccaatattgtaaaaagttctcttggtccagttggcttggataaaatgttggtggatgatattggtgatgtaaccattactaacgatggtgcaaccatcctgaagttactggaggtagaacatcctgcagctaaagttctttgtgagctggctgatctgcaagacaaagaagttggagatggaactacttcagtggttattattgcagcagaactcctaaaaaatgcagatgaattagtcaaacagaaaattcatcccacatcagttattagtggctatcgacttgcttgcaaggaagcagtgcgttatatcaatgaaaacctaattgttaacacagatgaactgggaagagattgcctgattaatgctgctaagacatccatgtcttccaaaatcattggaataaatggtgatttctttgctaacatggtagtagatgctgtacttgctattaaatacacagacataagaggccagccacgctatccagtcaactctgttaatattttgaaagcccatgggagaagtcaaatggagagtatgctcatcagtggctatgcactcaactgtgtggtgggatcccagggcatgcccaagagaatcgtaaatgcaaaaattgcttgccttgacttcagcctgcaaaaaacaaaaatgaagcttggtgtacaggtggtcattacagaccctgaaaaactggaccaaattagacagagagaatcagatatcaccaaggagagaattcagaagatcctggcaactggtgccaatgttattctaaccactggtggaattgatgatatgtgtctgaagtattttgtggaggctggtgctatggcagttagaagagttttaaaaagggaccttaaacgcattgccaaagcttctggagcaactattctgtcaaccctggccaatttggaaggtgaagaaacttttgaagctgcaatgttgggacaggcagaagaagtggtacaggagagaatttgtgatgatgagctgatcttaatcaaaaatactaaggctcgtacgtctgcatcgattatcttacgtggggcaaatgatttcatgtgtgatgagatggagcgctctttacatgatgcactttgtgtagtgaagagagttttggagtcaaaatctgtggttcccggtgggggtgctgtagaagcagccctttccatataccttgaaaactatgcaaccagcatggggtctcgggaacagcttgcgattgcagagtttgcaagatcacttcttgttattcccaatacactagcagttaatgctgcccaggactccacagatctggttgcaaaattaagagcttttcataatgaggcccaggttaacccagaacgtaaaaatctaaaatggattggtcttgatttgagcaatggtaaacctcgagacaacaaacaagcaggggtgtttgaaccaaccatagttaaagttaagagtttgaaatttgcaacagaagctgcaatcaccattcttcgaattgatgatcttattaaattacatccagaaagtaaagatgataaacatggaagttatgaagatgctgttcactctggagcccttaatgattgatctgatgttccttttatttataacaatgttaaatgcaattgtcttgtaccttgagttgagtattacacattaaagtaaagtacaagctgta

SEQ ID NO: 367430 - DNA, 2212 bp, Homo sapiens
agcgggcctcccgggctcgcacgtgcgggccacgcctcgcacccccttttgtttcagggcgaccccctgagtgtccatgttaaacgccaggttttattttaggaccatttaccagaaaaagagtaggtccatccgcgcgccctcggatgagcccggtgccctgtccgcccgcagctgcagtcgaggtcgggcgtccggcgtccagccgtatccgggttgacagcttcttacagtagagttagcccaggaaacgccactcgagtgcattgaccccaggagacggcagcgctaacttagcagagcgtttgctgtcaggcctttggatacctacagagcttactgtttcttgatagattcctaatttttttcgtaaacaaatctgaaagtcaccaccttccccgttgactaccgatttctctcctcacagataaagagagttttaatgagcaaaaaacttgcagaatctgaaggaaaaggctggtatagctgtacgaagtggcagagcatgaaattgttatggctgcagcttcgattgccaatattgtaaaaagttctcttggtccagttggcttggataaaatgttggtggatgatattggtgatgtaaccattactaacgatggtgcaaccatcctgaagttactggaggtagaacatcctgcagctaaagttctttgtgagctggctgatctgcaagacaaagaagttggagatggaactacttcagtggttattattgcagcagaactcctaaaaaatgcagatgaattagtcaaacagaaaattcatcccacatcagttattagtggctatcgacttgcttgcaaggaagcagtgcgttatatcaatgaaaacctaattgttaacacagatgaactgggaagagattgcctgattaatgctgctaagacatccatgtcttccaaaatcattggaataaatggtgatttctttgctaacatggtagtagatgctgtacttgctattaaatacacagacataagaggccagccacgctatccagtcaactctgttaatattttgaaagcccatgggagaagtcaaatggagagtatgctcatcagtggctatgcactcaactgtgtggtgggatcccagggcatgcccaagagaatcgtaaatgcaaaaattgcttgccttgacttcagcctgcaaaaaacaaaaatgaagcttggtgtacaggtggtcattacagaccctgaaaaactggaccaaattagacagagagaatcagatatcaccaaggagagaattcagaagatcctggcaactggtgccaatgttattctaaccactggtggaattgatgatatgtgtctgaagtattttgtggaggctggtgctatggcagttagaagagttttaaaaagggaccttaaacgcattgccaaagcttctggagcaactattctgtcaaccctggccaatttggaaggtgaagaaacttttgaagctgcaatgttgggacaggcagaagaagtggtacaggagagaatttgtgatgatgagctgatcttaatcaaaaatactaaggctcgtacgtctgcatcgattatcttacgtggggcaaatgatttcatgtgtgatgagatggagcgctctttacatgatgcactttgtgtagtgaagagagttttggagtcaaaatctgtggttcccggtgggggtgctgtagaagcagccctttccatataccttgaaaactatgcaaccagcatggggtctcgggaacagcttgcgattgcagagtttgcaagatcacttcttgttattcccaatacactagcagttaatgctgcccaggactccacagatctggttgcaaaattaagagcttttcataatgaggcccaggttaacccagaacgtaaaaatctaaaatggattggtcttgatttgagcaatggtaaacctcgagacaacaaacaagcaggggtgtttgaaccaaccatagttaaagttaagagtttgaaatttgcaacagaagctgcaatcaccattcttcgaattgatgatcttattaaattacatccagaaagtaaagatgataaacatggaagttatgaagatgctgttcactctggagcccttaatgattgatctgatgttccttttatttataacaatgttaaatgcaattgtcttgtaccttgagttgagtattacacattaaagtaaagtacaagctgta

SEQ ID NO: 367431 - DNA, 1915 bp, Homo sapiens
ctctttttccttcccgccgtgccccgcggccgggccggggcagccgggaagcgggtggggtggtgtgttacccagtagctcctgggacatcgctcgggtacgctccacgccgtcgcagccactgctgtggtcgccggtcggccgaggggccgcgatactggttgcccgcggtgtaagcagaattcgacgtgtatcgctgccgtcaagatggaggggcctttgtccgtgttcggtgaccgcagcactggggaaacgatccgctcccaaaacgttatggctgcagcttcgattgccaatattgtaaaaagttctcttggtccagttggcttggatatcctgaagttactggaggtagaacatcctgcagctaaagttctttgtgagctggctgatctgcaagacaaagaagttggagatggaactacttcagtggttattattgcagcagaactcctaaaaaatgcagatgaattagtcaaacagaaaattcatcccacatcagttattagtggctatcgacttgcttgcaaggaagcagtgcgttatatcaatgaaaacctaattgttaacacagatgaactgggaagagattgcctgattaatgctgctaagacatccatgtcttccaaaatcattggaataaatggtgatttctttgctaacatggtagtagatgctgtacttgctattaaatacacagacataagaggccagccacgctatccagtcaactctgttaatattttgaaagcccatgggagaagtcaaatggagagtatgctcatcagtggctatgcactcaactgtgtggtgggatcccagggcatgcccaagagaatcgtaaatgcaaaaattgcttgccttgacttcagcctgcaaaaaacaaaaatgaagcttggtgtacaggtggtcattacagaccctgaaaaactggaccaaattagacagagagaatcagatatcaccaaggagagaattcagaagatcctggcaactggtgccaatgttattctaaccactggtggaattgatgatatgtgtctgaagtattttgtggaggctggtgctatggcagttagaagagttttaaaaagggaccttaaacgcattgccaaagcttctggagcaactattctgtcaaccctggccaatttggaaggtgaagaaacttttgaagctgcaatgttgggacaggcagaagaagtggtacaggagagaatttgtgatgatgagctgatcttaatcaaaaatactaaggctcgtacgtctgcatcgattatcttacgtggggcaaatgatttcatgtgtgatgagatggagcgctctttacatgatgcactttgtgtagtgaagagagttttggagtcaaaatctgtggttcccggtgggggtgctgtagaagcagccctttccatataccttgaaaactatgcaaccagcatggggtctcgggaacagcttgcgattgcagagtttgcaagatcacttcttgttattcccaatacactagcagttaatgctgcccaggactccacagatctggttgcaaaattaagagcttttcataatgaggcccaggttaacccagaacgtaaaaatctaaaatggattggtcttgatttgagcaatggtaaacctcgagacaacaaacaagcaggggtgtttgaaccaaccatagttaaagttaagagtttgaaatttgcaacagaagctgcaatcaccattcttcgaattgatgatcttattaaattacatccagaaagtaaagatgataaacatggaagttatgaagatgctgttcactctggagcccttaatgattgatctgatgttccttttatttataacaatgttaaatgcaattgtcttgtaccttgagttgagtattacacattaaagtaaagtacaagctgta

SEQ ID NO: 367432 - DNA, 2371 bp, Homo sapiens
ctctttttccttcccgccgtgccccgcggccgggccggggcagccgggaagcgggtggggtggtgtgttacccagtagctcctgggacatcgctcgggtacgctccacgccgtcgcagccactgctgtggtcgccggtcggccgaggggccgcgatactggttgcccgcggtgtaagcagaattcgacgtgtatcgctgccgtcaagatggaggggcctttgtccgtgttcggtgaccgcagcactggggaaacgatccgctcccaaaacgttatggctgcagcttcgattgccaatattgtaaaaagttctcttggtccagttggcttggataaaatgttggtggatgatattggtgatgtaaccattactaacgatggtgcaaccatcctgaagttactggaggtagaacatcctgcagctaaagttctttgtgagctggctgatctgcaagacaaagaagttggagatggaactacttcagtggttattattgcagcagaactcctaaaaaatgcagatgaattagtcaaacagaaaattcatcccacatcagttattagtggctatcgacttgcttgcaaggaagcagtgcgttatatcaatgaaaacctaattgttaacacagatgaactgggaagagattgcctgattaatgctgctaagacatccatgtcttccaaaatcattggaataaatggtgatttctttgctaacatggtagtagatgctgtacttgctattaaatacacagacataagaggccagccacgctatccagtcaactctgttaatattttgaaagcccatgggagaagtcaaatggagagtatgctcatcagtggctatgcactcaactgtgtggtgggatcccagggcatgcccaagagaatcgtaaatgcaaaaattgcttgccttgacttcagcctgcaaaaaacaaaaatgaagcttggtgtacaggtggtcattacagaccctgaaaaactggaccaaattagacagagagaatcagatatcaccaaggagagaattcagaagatcctggcaactggtgccaatgttattctaaccactggtggaattgatgatatgtgtctgaagtattttgtggaggctggtgctatggcagttagaagagttttaaaaagggaccttaaacgcattgccaaagcttctggagcaactattctgtcaaccctggccaatttggaaggtgaagaaacttttgaagctgcaatgttgggacaggcagaagaagtggtacaggagagaatttgtgatgatgagctgatcttaatcaaaaatactaaggctcgtacgtctgcatcgattatcttacgtggggcaaatgatttcatgtgtgatgagatggagcgctctttacatgatgcactttgtgtagtgaagagagttttggagtcaaaatctgtggttcccggtgggggtgctgtagaagcagccctttccatatactttgcaagatcacttcttgttattcccaatacactagcagttaatgctgcccaggactccacagatctggttgcaaaattaagagcttttcataatgaggcccaggttaacccagaacgtaaaaatctaaaatggattggtcttgatttgagcaatggtaaacctcgagacaacaaacaagcaggggtgtttgaaccaaccatagttaaagttaagagtttgaaatttgcaacagaagctgcaatcaccattcttcgaattgatgatcttattaaattacatccagaaagtaaagatgataaacatggaagttatgaagatgctgttcactctggagcccttaatgattgatctgatgttccttttatttataacaatgttaaatgcaattgtcttgtaccttgagttgagtattacacattaaagtaaagtacaagctgtaaacttgggtttttgtgatgtaggaaatggtttccatctgtactttggtcctctgatttcacatattgcaacctagtactttattagtttaaaaagaaattgaggttgttcaaagtttaagcaattcattctctctgaacacacattgctattcccatcccacccccaatgcacagggctgcaacaccacgacttctgcccattctctccagtgtgtgtaacagggtcacaagaattcgacagccagatgctccaagagggtggcccaaggctatagcccctccttcaatattgacctagcgggggagaaaagatttagattgtttattcttctgtggacacagtttaaaatcttaaacttgtctttttcctcttaatgtatcagcatgctaccctttcaaactcaaattttcattttaactgcttaggaataaatttacacctttgtgaaaattca

SEQ ID NO: 367433 - DNA, 1861 bp, Homo sapiens
ctctttttccttcccgccgtgccccgcggccgggccggggcagccgggaagcgggtggggtggtgtgttacccagtagctcctgggacatcgctcgggtacgctccacgccgtcgcagccactgctgtggtcgccggtcggccgaggggccgcgatactggttgcccgcggtgtaagcagaattcgacgtgtatcgctgccgtcaagatggaggggcctttgtccgtgttcggtgaccgcagcactggggaaacgatccgctcccaaaacgttatggctgcagcttcgattgccaatattgtaaaaagttctcttggtccagttggcttggataaaatgttggtggatgatattggtgatgtaaccattactaacgatggtgcaaccatcctgaagttactggaggtagaacatcctgcagctaaagttctttgtgagctggctgatctgcaagacaaagaagttggagatggaactacttcagtggttattattgcagcagaactcctaaaaaatgcagatgaattagtcaaacagaaaattcatcccacatcagttattagtggctatcgacttgcttgcaaggaagcagtgcgttatatcaatgaaaacctaattgttaacacagatgaactgggaagagattgcctgattaatgctgctaagacatccatgtcttccaaaatcattggaataaatggtgatttctttgctaacatggtagtagatgctgtacttgctattaaatacacagacataagaggccagccacgctatccagtcaactctgttaatattttgaaagcccatgggagaagtcaaatggagagtatgctcatcagtggctatgcactcaactgtgtggtgggatcccagggcatgcccaagagaatcgtaaatgcaaaaattgcttgccttgacttcagcctgcaaaaaacaaaaatgaagcttggtgtacaggtggtcattacagaccctgaaaaactggaccaaattagacagagagaatcagatatcaccaaggagagaattcagaagatcctggcaactggtgccaatgttattctaaccactggtggaattgatgatatgtgtctgaagtattttgtggaggctggtgctatggcagttagaagagttttaaaaagggaccttaaacgcattgccaaagcttctggaggtatgtcttgtgctggctgtcacataaaatacttttattatccctgatcctatcaaaggtctttttacattggaatattgacagaaaacagctcaaaaacatttatattctcttaatgctttgtgctaccaacacatttatagagccatttttcatgtaactggagaaattttgttggaaatttgtgaactgaatttgttcatttctaaaatgacagttccatcttaggataaaaggagttaccgtgtgctgcctaactaaattctaaacttgtaatatagcacttttatcacaaatgctactgagtccaaggatattaaaatcatgaaagagcaatattcacagatcctttgtaactctcttattagcaactattctgtcaaccctggccaatttggaaggtgaagaaacttttgaagctgcaatgttgggacaggcagaagaagtggtacaggagagaatttgtgatgatgagctgatcttaatcaaaaagtaagagccactttctaaaattgtaaagttataccgattttgttaagtaaaagtaggttttcttcccatttatttgctgcttgtagtctcacagtgatacgagcagttatacgcatgggataaaataacattgggccactgtaaattgagatgaagtaaccattttcatctcttctgcagggactagac

SEQ ID NO: 367434 - DNA, 1167 bp, Homo sapiens
ctctttttccttcccgccgtgccccgcggccgggccggggcagccgggaagcgggtggggtggtgtgttacccagtagctcctgggacatcgctcgggtacgctccacgccgtcgcagccactgctgtggtcgccggtcggccgaggggccgcgatactggttgcccgcggtgtaagcagaattcgacgtgtatcgctgccgtcaagatggaggggcctttgtccgtgttcggtgaccgcagcactggggaaacgatccgctcccaaaacgttatggctgcagcttcgattgccaatattgtaaaaagttctcttggtccagttggcttggataaaatgttggtggatgatattggtgatgtaaccattactaacgatggtgcaaccatcctgaagttactggaggtagaacatcctgcagctaaagttctttgtgagctggctgatctgcaagacaaagaagttggagatggaactacttcagtggttattattgcagcagaactcctaaaaaatgcagatgaattagtcaaacagaaaattcatcccacatcagttattagtggctatcgacttgcttgcaaggaagcagtgcgttatatcaatgaaaacctaattgttaacacagatgaactgggaagagattgcctgattaatgctgctaagacatccatgtcttccaaaatcattggaataaatggtgatttctttgctaacatggtagtagatgctgtacttgctattaaatacacagacataagaggccagccacgctatccagtcaactctgttaatattttgaaagcccatgggagaagtcaaatggagagtatgctcatcagtggctatgcactcaactgtgtggtgggatcccagggcatgcccaagagaatcgtaaatgcaaaaattgcttgccttgacttcagcctgcaaaaaacaaaaatgaagcttggtgtacaggtggtcattacagaccctgaaaaactggaccaaattagacagaggtatgttgagagattatttttggccttttaagtgtgagtgtcttggaggactttaacatttttagccaagtcaaactattttacttccagaaaaattagcctggtggtgtttttagagggatttggggttatacaacctatatgaaaatcggcctttttgtgg

SEQ ID NO: 367435 - DNA, 1992 bp, Homo sapiens
ttcaaatttgggttggggagagctaagtggtaatttttaattccttcaaattttccatgaattggactaatttaaattctggtcagagataacaaaggataatacaatttgatctatgattatcttgtgataaatacttaatggaagttaaattatttttaaaaatcacagaaggtaactcaggttacaaaaatactttgcagagaatcagatatcaccaaggagagaattcagaagatcctggcaactggtgccaatgttattctaaccactggtggaattgatgatatgtgtctgaagtattttgtggaggctggtgctatggcagttagaagagttttaaaaagggaccttaaacgcattgccaaagcttctggaggtatgtcttgtgctggctgtcacataaaatacttttattatccctgatcctatcaaaggtctttttacattggaatattgacagaaaacagctcaaaaacatttatattctcttaatgctttgtgctaccaacacatttatagagccatttttcatgtaactggagaaattttgttggaaatttgtgaactgaatttgttcatttctaaaatgacagttccatcttaggataaaaggagttaccgtgtgctgcctaactaaattctaaacttgtaatatagcacttttatcacaaatgctactgagtccaaggatattaaaatcatgaaagagcaatattcacagatcctttgtaactctcttattagcaactattctgtcaaccctggccaatttggaaggtgaagaaacttttgaagctgcaatgttgggacaggcagaagaagtggtacaggagagaatttgtgatgatgagctgatcttaatcaaaaatactaaggctcgtacgtctgcatcgattatcttacgtggggcaaatgatttcatgtgtgatgagatggagcgctctttacatgatgcactttgtgtagtgaagagagttttggagtcaaaatctgtggttcccggtgggggtgctgtagaagcagccctttccatataccttgaaaactatgcaaccagcatggggtctcgggaacagcttgcgattgcagagtttgcaagatcacttcttgttattcccaatacactagcagttaatgctgcccaggactccacagatctggttgcaaaattaagagcttttcataatgaggcccaggttaacccagaacgtaaaaatctaaaatggattggtcttgatttgagcaatggtaaacctcgagacaacaaacaagcaggggtgtttgaaccaaccatagttaaagttaagagtttgaaatttgcaacagaagctgcaatcaccattcttcgaattgatgatcttattaaattacatccagaaagtaaagatgataaacatggaagttatgaagatgctgttcactctggagcccttaatgattgatctgatgttccttttatttataacaatgttaaatgcaattgtcttgtaccttgagttgagtattacacattaaagtaaagtacaagctgtaaacttgggtttttgtgatgtaggaaatggtttccatctgtactttggtcctctgatttcacatattgcaacctagtactttattagtttaaaaagaaattgaggttgttcaaagtttaagcaattcattctctctgaacacacattgctattcccatcccacccccaatgcacagggctgcaacaccacgacttctgcccattctctccagtgtgtgtaacagggtcacaagaattcgacagccagatgctccaagagggtggcccaaggctatagcccctccttcaatattgacctagcgggggagaaaagatttagattgtttattcttctgtggacacagtttaaaatcttaaacttgtctttttcctcttaatgtatcagcatgctaccctttcaaactcaaattttcattttaactgcttaggaataaatttacacctttgtgaaaattca

SEQ ID NO: 367436 - DNA, 1225 bp, Homo sapiens
tgtatagtatatctaaatatcctgtgtaggcaggacttaagggaactttatgtagacttattttattaaaatgccattttttttgagaaattgatggtcttggctactaaggctcgtacgtctgcatcgattatcttacgtggggcaaatgatttcatgtgtgatgagatggagcgctctttacatgatgcactttgtgtagtgaagagagttttggagtcaaaatctgtggttcccggtgggggtgctgtagaagcagccctttccatataccttgaaaactatgcaaccagcatggggtctcgggaacagcttgcgattgcagagtttgcaagatcacttcttgttattcccaatacactagcagttaatgctgcccaggactccacagatctggttgcaaaattaagagcttttcataatgaggcccaggttaacccagaacgtaaaaatctaaaatggattggtcttgatttgagcaatggtaaacctcgagacaacaaacaagcaggggtgtttgaaccaaccatagttaaagttaagagtttgaaatttgcaacagaagctgcaatcaccattcttcgaattgatgatcttattaaattacatccagaaagtaaagatgataaacatggaagttatgaagatgctgttcactctggagcccttaatgattgatctgatgttccttttatttataacaatgttaaatgcaattgtcttgtaccttgagttgagtattacacattaaagtaaagtacaagctgtaaacttgggtttttgtgatgtaggaaatggtttccatctgtactttggtcctctgatttcacatattgcaacctagtactttattagtttaaaaagaaattgaggttgttcaaagtttaagcaattcattctctctgaacacacattgctattcccatcccacccccaatgcacagggctgcaacaccacgacttctgcccattctctccagtgtgtgtaacagggtcacaagaattcgacagccagatgctccaagagggtggcccaaggctatagcccctccttcaatattgacctagcgggggagaaaagatttagattgtttattcttctgtggacacagtttaaaatcttaaacttgtctttttcctcttaatgtatcagcatgctaccctttcaaactcaaattttcattttaactgcttaggaataaatttacacctttgtgaaaattca

SEQ ID NO: 367437 - DNA, 425 bp, Homo sapiens
ttttgaaagcccatgggagaagtcaaatggagagtatgctcatcagtggctatgcactcaactgtgtggtgggatcccagggtaaggtttgggatttggtttatagaatgagattgctacagattaaaactagcttttcttttggctgggcgcggtggctcatgcctgtaatcccagcactttgggaggctgagtcaggtggatcacgagggcaggagtttgagagcagcctgtccaatatggtgaaacctcatctctactaaaaaatacaaaaattagctgggcatggtggcacctgcctgtagtcccagctacttgggaggctgaggaaggagaatcactggaacctgggaggcggagattgcagtgagccaagatcacaccactgcactccagcctgggctacagagtgagactccgtctca

SEQ ID NO: 367438 - DNA, 233 bp, Homo sapiens
ttaagggaactttatgtagacttattttattaaaatgccattttttttgagaaattgatggtcttggcaaaaaaaaatttttaaaaatgctattacaagaattgtacttttgttttgaacagtactaaggctcgtacgtctgcatcgattatcttacgtggggcaaatgatttcatgtgtgatgagatggagcgctctttacatgatgcactttgtgtagtgaagagagtttt

SEQ ID NO: 367439 - DNA, 480 bp, Homo sapiens
gttattcccaatacactagcagttaatgctgcccaggactccacagatctggttgcaaaattaagagcttttcataatgaggcccaggttaacccagaacgtaaaaatctaaaatggtaagcatggtttcccgctctttgttaacctctgcagaacaggttgcattaaaaaggatagtagtcaattacatgtcagcaaacataagtaacagacttgtcaaatacttaacatgaaaaacttcacagcaagcatttgttgttcagtcactgtaattcaagggataatgactaattattagcactggtgtgtcttcgttaactgtgattgctaatctctccctgcttcttttggtagaaagactacctacaagatctctagtctgatttaaaaatcaaccttaatacttgaatgaaatgctggagttaataggccacctaatgaaattgtaagcggccgttaaataattctttcttaattgca

SEQ ID NO: 367440 - DNA, 424 bp, Homo sapiens
tcccttttgtgaagtcacctaattttcttcttttcctaggggtctcgggaacagcttgcgattgcagagtttgcaagatcacttcttgttattcccaatacactagcagttaatgctgcccaggactccacagatctggttgcaaaattaagagcttttcataatgaggcccaggttaacccagaacgtaaaaatctaaaatggtaagcatggtttcccgctctttgttaacctctgcagaacaggttgcattaaaaaggatagtagtcaattacatgtcagcaaacataagtaacagacttgtcaaatacttaacatgaaaaacttcacagcaagcatttgttgttcagtcactgtaattcaagggataatgactaattattagcactggtgtgtcttcgttaactgtgattgctaatctctc

SEQ ID NO: 367441 - DNA, 1300 bp, Homo sapiens
ctctttttccttcccgccgtgccccgcggccgggccggggcagccgggaagcgggtggggtggtgtgttacccagtagctcctgggacatcgctcgggtacgctccacgccgtcgcagccactgctgtggtcgccggtcggccgaggggccgcgatactggttgcccgcggtgtaagcagaattcgacgtgtatcgctgccgtcaagatggaggggcctttgtccgtgttcggtgaccgcagcactggggaaacgatccgctcccaaaacgttatggctgcagcttcgattgccaatattgtaaaaagttctcttggtccagttggcttggatacacaactgattgggtggactgactacttgcgtgactgtagcgccatacctacacgactggctgccaacccactcacatgacaggtaacctgcgacacgtacgacaccctacctgccacgccacacacgatcacgacagacgacgcctgggcatggactcgtagcaaggaccaaacgacccgaccggacgccgaggacacctacactacacgacgcgagactaactacgcccgcacgcaactaccatacacaacaactgcacgactgaccatacgtcaaaacccggacaaagcccatcgccgacaataccggacacaccacgagcgccactcgcacctgcaatgcgcaggacacagcaggacgacgacgacactcccccagacaacaacctccaagagggcaccaacgagctagaacatggagcaagcagcatagacatggagtgacaggggggcatcacgcaccgatccccgtggatcctatccacaaacaagccaactcgggcacataacaaggggatgaagcaacagtaaggctcccgccctggcgacagaacgacatgccgtgcacaccgcagacgagacacaaggacaagcacgacccacacgagccagagcccggagcccaccgcaagcagcgcggacgaacatcgaggcggaaaccgaccgcgcgacacgcgcccagggggcaccacaagtccaccaagggggcacacagccagcaccgaccgccgggagaacctatgcacagaccacacgggcagggaggggacaccccgggggagcgtcccagagcaccacgtgaagagcgcaacactgggcggaccgagcacacagcggaggaacaacaacgcgaaccgacatcgtcgcggcgcacagagcacccacagcgggcccgaaccccgcgaccacaggagtcacccgagacagacaccacgccgaggaggacaccaaccgcaggaccacga

SEQ ID NO: 367442 - DNA, 1417 bp, Homo sapiens
taagcgtttttctcccccacacttttaaacagggaagcagtgcgttatatcaatgaaaacctaattgttaacacagatgaactgggaagagattgcctgattaatgctgctaagacatccatgtcttccaaaatcattggaataaatggtgatttctttgctaacatggtagtagatgctgtacttgctattaaatacacagacataagaggccagccacgctatccagtcaactctgttaatattttgaaagcccatgggagaagtcaaatggagagtatgctcatcagtggctatgcactcaactgtgtggtgggatcccagggcatgcccaagagaatcgtaaatgcaaaaattgcttgccttgacttcagcctgcaaaaaacaaaaatgaagcttggtgtacaggtggtcattacagaccctgaaaaactggaccaaattagacagagagaatcagatatcaccaaggagagaattcagaagatcctggcaactggtgccaatgttattctaaccactggtggaattgatgatatgtgtctgaagtattttgtggaggctggtgctatggcagttagaagagttttaaaaagggaccttaaacgcattgccaaagcttctggagcaactattctgtcaaccctggccaatttggaaggtgaagaaacttttgaagctgcaatgttgggacaggcagaagaagtggtacaggagagaatttgtgatgatgagctgatcttaatcaaaaatactaaggctcgtacgtctgcatcgattatcttacgtggggcaaatgatttcatgtgtgatgagatggagcgctctttacatgatgcactttgtgtagtgaagagagttttggagtcaaaatctgtggttcccggtgggggtgctgtagaagcagccctttccatataccttgaaaactatgcaaccagcatggggtctcgggaacagcttgcgattgcagagtttgcaagatcacttcttgttattcccaatacactagcagttaatgctgcccaggactccacagatctggttgcaaaattaagagcttttcataatgaggcccaggttaacccagaacgtaaaaatctaaaatggattggtcttgatttgagcaatggtaaacctcgagacaacaaacaagcaggggtgtttgaaccaaccatagttaaagttaagagtttgaaatttgcaacagaagctgcaatcaccattcttcgaattgatgatcttattaaattacatccagaaagtaaagatgataaacatggaagttatgaagatgctgttcactctggagcccttaatgattgatctgatgttccttttatttataacaatgttaaatgcaattgtcttgtaccttgagttgagtattacacattaaagtaaagtacaagctgta

SEQ ID NO: 367443 - DNA, 1363 bp, Homo sapiens
ctctttttccttcccgccgtgccccgcggccgggccggggcagccgggaagcgggtggggtggtgtgttacccagtagctcctgggacatcgctcgggtacgctccacgccgtcgcagccactgctgtggtcgccggtcggccgaggggccgcgatactggttgcccgcggtgtaagcagaattcgacgtgtatcgctgccgtcaagatggaggggcctttgtccgtgttcggtgaccgcagcactggggaaacgatccgctcccaaaacggcatgcccaagagaatcgtaaatgcaaaaattgcttgccttgacttcagcctgcaaaaaacaaaaatgaagcttggtgtacaggtggtcattacagaccctgaaaaactggaccaaattagacagagagaatcagatatcaccaaggagagaattcagaagatcctggcaactggtgccaatgttattctaaccactggtggaattgatgatatgtgtctgaagtattttgtggaggctggtgctatggcagttagaagagttttaaaaagggaccttaaacgcattgccaaagcttctggagcaactattctgtcaaccctggccaatttggaaggtgaagaaacttttgaagctgcaatgttgggacaggcagaagaagtggtacaggagagaatttgtgatgatgagctgatcttaatcaaaaatactaaggctcgtacgtctgcatcgattatcttacgtggggcaaatgatttcatgtgtgatgagatggagcgctctttacatgatgcactttgtgtagtgaagagagttttggagtcaaaatctgtggttcccggtgggggtgctgtagaagcagccctttccatataccttgaaaactatgcaaccagcatggggtctcgggaacagcttgcgattgcagagtttgcaagatcacttcttgttattcccaatacactagcagttaatgctgcccaggactccacagatctggttgcaaaattaagagcttttcataatgaggcccaggttaacccagaacgtaaaaatctaaaatggattggtcttgatttgagcaatggtaaacctcgagacaacaaacaagcaggggtgtttgaaccaaccatagttaaagttaagagtttgaaatttgcaacagaagctgcaatcaccattcttcgaattgatgatcttattaaattacatccagaaagtaaagatgataaacatggaagttatgaagatgctgttcactctggagcccttaatgattgatctgatgttccttttatttataacaatgttaaatgcaattgtcttgtaccttgagttgagtattacacattaaagtaaagtacaagctgta

SEQ ID NO: 367444 - DNA, 1039 bp, Homo sapiens
cagagaccccatgctggttgcatagttttcaaggtatatggaaagggctgcttctacagcacccccaccgggaaccacagattttgactccaaaactatgcaaccagcatggggtctcgggaacagcttgcgattgcagagtttgcaagatcacttcttgttattcccaatacactagcagttaatgctgcccaggactccacagatctggttgcaaaattaagagcttttcataatgaggcccaggttaacccagaacgtaaaaatctaaaatggattggtcttgatttgagcaatggtaaacctcgagacaacaaacaagcaggggtgtttgaaccaaccatagttaaagttaagagtttgaaatttgcaacagaagctgcaatcaccattcttcgaattgatgatcttattaaattacatccagaaagtaaagatgataaacatggaagttatgaagatgctgttcactctggagcccttaatgattgatctgatgttccttttatttataacaatgttaaatgcaattgtcttgtaccttgagttgagtattacacattaaagtaaagtacaagctgtaaacttgggtttttgtgatgtaggaaatggtttccatctgtactttggtcctctgatttcacatattgcaacctagtactttattagtttaaaaagaaattgaggttgttcaaagtttaagcaattcattctctctgaacacacattgctattcccatcccacccccaatgcacagggctgcaacaccacgacttctgcccattctctccagtgtgtgtaacagggtcacaagaattcgacagccagatgctccaagagggtggcccaaggctatagcccctccttcaatattgacctagcgggggagaaaagatttagattgtttattcttctgtggacacagtttaaaatcttaaacttgtctttttcctcttaatgtatcagcatgctaccctttcaaactcaaattttcattttaactgcttaggaataaatttacacctttgtgaaaattca

SEQ ID NO: 367445 - DNA, 1803 bp, Homo sapiens
actttacgcaggcgcgttaggtcctagtcgctatgcgtgtgcttgtgggtggcgggacaggcttcattgggacagccctaacccagctgctgaatgccagaggccacgaagtgacgttggtctcccgaaagcccgggcccggccggatcacgtgggatgagctcgctgcatcggggctgccgagctgcgatgccgccgtcaacctggccggagagaacatcctcaaccctctccgaagatggaatgaaaccttccaaaaagaggttctcggcagccgcctagagaccacccaattgctggctaaagccatcaccaaagccccacaaccccccaaggcctgggtcttagtcacaggtgtagcttactaccagcccagtctgactgcggagtatgatgaagacagcccaggaggggactttgactttttctccaacctcgtaaccaaatgggaagctgcagccaggcttcctggagattctacacgccaggtggtggtgcgctcaggggttgtgctgggccgtgggggtggtgccatgggccacatgctgctgccctttcgcctgggcctggggggccccatcggctcaggccaccaattcttcccctggatacacatcggggacctggcaggaatcctgacccatgcccttgaagcaaaccacgtgcacggggtcctgaatggagtggctccatcctccgccactaatgctgagtttgcccagaccttcggtgctgccctgggccgccgagccttcatccctctccccagcgctgtggtgcaagctgtctttgggcgacagcgtgccatcatgctgctggagggccagaaggtgatcccacggcgaacactggccactggctaccagtattccttcccagagctaggggctgccttaaaggaaattgtagcctaagtaggtcatggcaagggcctgaggcctgttcctcacaggcttccaggttaggcactgtgaataggctcagctcctctagagagctgaagccatctggttcttagattcctctcccagtcctctttcccattgttctgttgctccaccttattgtctcaaggccgtaatctcatcaggttgggacattaatcttttcaactccttgtaagatttcccggtttggtttctctacatgtcctgcagctgccccacttctcctttacgctgtgtagagaatgctctgcagtttaggcaataaaaataaattgtctcactaaccttggctcatctctttggcctagattctcctgggatttacttcaaggaatgtcaccctagatgattcttccccaaagacggggttttgaaagttataatgggcagtctctctcatcaccgtttcccttcttggtccttcagttgccaaaagaacttgtcacaagtttgggacatcaggttatgataaagatagacactagaagagagaatgatgatccatttccaatgggccctgtagtcaccctggatgctgtcagagtgccattaggatgccagtagaggaagaggtaaggcccaggtgtaggatagccttcagtctgtgtcaccaaatggcaagtgcattactaaccacacagtggtcccagtttatcaggctgcagcagaacaaagtcaacatccctgtctataagaagcttaggacttgcctctcatctgactggggccactcagtcaaccagggcccttagcacaaaagggcagaagacacttttggtctactgcacacccaccatcactgaaagtgaaaatggcaagaaaccaatcaagaagtataaacaaccctatcaggaaa

SEQ ID NO: 367446 - DNA, 2104 bp, Homo sapiens
actttacgcaggcgcgttaggtcctagtcgctatgcgtgtgcttgtgggtgagggagggcagaaagggagagtgctgggcgggcttagtcggagattgaggactgggaatccgcttccgggagggcactgtctagtgcacaggcaacctggccttcgcctcctagcccgagaagccgaatctccctaatccctgtgacctgtgtcacctctgcatcgcgaggagggggataagtggggagaagtctggtgtcagatgggatggcgccggaagagggtgccacagcggggacggaaggcgcccccaccccaactccacgggaatataaacaatttgtattttccgatcaggtggcgggacaggcttcattgggacagccctaacccagctgctgaatgccagaggccacgaagtgacgttggtctcccgaaagcccgggcccggccggatcacgtgggatgagctcgctgcatcggggctgccgagctgcgatgccgccgtcaacctggccggagagaacatcctcaaccctctccgaagatggaatgaaaccttccaaaaagaggttctcggcagccgcctagagaccacccaattgctggctaaagccatcaccaaagccccacaaccccccaaggcctgggtcttagtcacaggtgtagcttactaccagcccagtctgactgcggagtatgatgaagacagcccaggaggggactttgactttttctccaacctcgtaaccaaatgggaagctgcagccaggcttcctggagattctacacgccaggtggtggtgcgctcaggggttgtgctgggccgtgggggtggtgccatgggccacatgctgctgccctttcgcctgggcctggggggccccatcggctcaggccaccaattcttcccctggatacacatcggggacctggcaggaatcctgacccatgcccttgaagcaaaccacgtgcacggggtcctgaatggagtggctccatcctccgccactaatgctgagtttgcccagaccttcggtgctgccctgggccgccgagccttcatccctctccccagcgctgtggtgcaagctgtctttgggcgacagcgtgccatcatgctgctggagggccagaaggtgatcccacggcgaacactggccactggctaccagtattccttcccagagctaggggctgccttaaaggaaattgtagcctaagtaggtcatggcaagggcctgaggcctgttcctcacaggcttccaggttaggcactgtgaataggctcagctcctctagagagctgaagccatctggttcttagattcctctcccagtcctctttcccattgttctgttgctccaccttattgtctcaaggccgtaatctcatcaggttgggacattaatcttttcaactccttgtaagatttcccggtttggtttctctacatgtcctgcagctgccccacttctcctttacgctgtgtagagaatgctctgcagtttaggcaataaaaataaattgtctcactaaccttggctcatctctttggcctagattctcctgggatttacttcaaggaatgtcaccctagatgattcttccccaaagacggggttttgaaagttataatgggcagtctctctcatcaccgtttcccttcttggtccttcagttgccaaaagaacttgtcacaagtttgggacatcaggttatgataaagatagacactagaagagagaatgatgatccatttccaatgggccctgtagtcaccctggatgctgtcagagtgccattaggatgccagtagaggaagaggtaaggcccaggtgtaggatagccttcagtctgtgtcaccaaatggcaagtgcattactaaccacacagtggtcccagtttatcaggctgcagcagaacaaagtcaacatccctgtctataagaagcttaggacttgcctctcatctgactggggccactcagtcaaccagggcccttagcacaaaagggcagaagacacttttggtctactgcacacccaccatcactgaaagtgaaaatggcaagaaaccaatcaagaagtataaacaaccctatcaggaaa

SEQ ID NO: 367447 - DNA, 2507 bp, Homo sapiens
actttacgcaggcgcgttaggtcctagtcgctatgcgtgtgcttgtgggtgagggagggcagaaagggagagtgctgggcgggcttagtcggagattgaggactgggaatccgcttccgggagggcactgtctagtgcacaggcaacctggccttcgcctcctagcccgagaagccgaatctccctaatccctgtgacctgtgtcacctctgcatcgcgaggagggggataagtggggagaagtctggtgtcagatgggatggcgccggaagagggtgccacagcggggacggaaggcgcccccaccccaactccacgggaatataaacaatttgtattttccgatcaggtggcgggacaggcttcattgggacagccctaacccagctgctgaatgccagaggccacgaagtgacgttggtctcccgaaagcccgggcccggccggatcacgtgggtaagtccatcctctggaagcgggtgggagggcagagttgggcggcgcagggcggggcaggggcactgtgtgctttctccgacaggatgagctcgctgcatcggggctgccgagctgcgatgccgccgtcaacctggccggagagaacatcctcaaccctctccgaaggtcagcccgggccctaaagctgatacccactagagcacagggaggacagtgccccactgatgagaacctgtgagctatgggtaatggagctcccagattccgaactaaaccgatatcccagactactcattctgctccactcctccacccccacctgctcctccacccagtcagccaattggcttaagtcctcacgtataactcaggatgcccaagaaatgaatgccctttccctctacaggagacgttgactgtttctcttaagccaaaattcagggctttacaagaaattggtatgaaatagctcccaggaaaagacagagagagggatatgtgcacttatgtatttagtggctttttatttcccatgtttctcctgcaggatgccatcaccaaagccccacaaccccccaaggcctgggtcttagtcacaggtgtagcttactaccagcccagtctgactgcggagtatgatgaagacagcccaggaggggactttgactttttctccaacctcgtaaccaaatgggaagctgcagccaggcttcctggagattctacacgccaggtggtggtgcgctcaggggttgtgctgggccgtgggggtggtgccatgggccacatgctgctgccctttcgcctgggcctggggggccccatcggctcaggccaccaattcttcccctggatacacatcggggacctggcaggaatcctgacccatgcccttgaagcaaaccacgtgcacggggtcctgaatggagtggctccatcctccgccactaatgctgagtttgcccagaccttcggtgctgccctgggccgccgagccttcatccctctccccagcgctgtggtgcaagctgtctttgggcgacagcgtgccatcatgctgctggagggccagaaggtgatcccacggcgaacactggccactggctaccagtattccttcccagagctaggggctgccttaaaggaaattgtagcctaagtaggtcatggcaagggcctgaggcctgttcctcacaggcttccaggttaggcactgtgaataggctcagctcctctagagagctgaagccatctggttcttagattcctctcccagtcctctttcccattgttctgttgctccaccttattgtctcaaggccgtaatctcatcaggttgggacattaatcttttcaactccttgtaagatttcccggtttggtttctctacatgtcctgcagctgccccacttctcctttacgctgtgtagagaatgctctgcagtttaggcaataaaaataaattgtctcactaaccttggctcatctctttggcctagattctcctgggatttacttcaaggaatgtcaccctagatgattcttccccaaagacggggttttgaaagttataatgggcagtctctctcatcaccgtttcccttcttggtccttcagttgccaaaagaacttgtcacaagtttgggacatcaggttatgataaagatagacactagaagagagaatgatgatccatttccaatgggccctgtagtcaccctggatgctgtcagagtgccattaggatgccagtagaggaagaggtaaggcccaggtgtaggatagccttcagtctgtgtcaccaaatggcaagtgcattactaaccacacagtggtcccagtttatcaggctgcagcagaacaaagtcaacatccctgtctataagaagcttaggacttgcctctcatctgactggggccactcagtcaaccagggcccttagcacaaaagggcagaagacacttttggtctactgcacacccaccatcactgaaagtgaaaatggcaagaaaccaatcaagaagtataaacaaccctatcaggaaa

SEQ ID NO: 367448 - DNA, 2021 bp, Homo sapiens
actttacgcaggcgcgttaggtcctagtcgctatgcgtgtgcttgtgggtgagggagggcagaaagggagagtgctgggcgggcttagtcggagattgaggactgggaatccgcttccgggagggcactgtctagtgcacaggcaacctggccttcgcctcctagcccgagaagccgaatctccctaatccctgtgacctgtgtcacctctgcatcgcgaggagggggataagtggggagaagtctggtgtcagatgggatggcgccggaagagggtgccacagcggggacggaaggcgcccccaccccaactccacgggaatataaacaatttgtattttccgatcaggtggcgggacaggcttcattgggacagccctaacccagctgctgaatgccagaggccacgaagtgacgttggtctcccgaaagcccgggcccggccggatcacgtggatggaatgaaaccttccaaaaagaggttctcggcagccgcctagagaccacccaattgctggctaaagccatcaccaaagccccacaaccccccaaggcctgggtcttagtcacaggtgtagcttactaccagcccagtctgactgcggagtatgatgaagacagcccaggaggggactttgactttttctccaacctcgtaaccaaatgggaagctgcagccaggcttcctggagattctacacgccaggtggtggtgcgctcaggggttgtgctgggccgtgggggtggtgccatgggccacatgctgctgccctttcgcctgggcctggggggccccatcggctcaggccaccaattcttcccctggatacacatcggggacctggcaggaatcctgacccatgcccttgaagcaaaccacgtgcacggggtcctgaatggagtggctccatcctccgccactaatgctgagtttgcccagaccttcggtgctgccctgggccgccgagccttcatccctctccccagcgctgtggtgcaagctgtctttgggcgacagcgtgccatcatgctgctggagggccagaaggtgatcccacggcgaacactggccactggctaccagtattccttcccagagctaggggctgccttaaaggaaattgtagcctaagtaggtcatggcaagggcctgaggcctgttcctcacaggcttccaggttaggcactgtgaataggctcagctcctctagagagctgaagccatctggttcttagattcctctcccagtcctctttcccattgttctgttgctccaccttattgtctcaaggccgtaatctcatcaggttgggacattaatcttttcaactccttgtaagatttcccggtttggtttctctacatgtcctgcagctgccccacttctcctttacgctgtgtagagaatgctctgcagtttaggcaataaaaataaattgtctcactaaccttggctcatctctttggcctagattctcctgggatttacttcaaggaatgtcaccctagatgattcttccccaaagacggggttttgaaagttataatgggcagtctctctcatcaccgtttcccttcttggtccttcagttgccaaaagaacttgtcacaagtttgggacatcaggttatgataaagatagacactagaagagagaatgatgatccatttccaatgggccctgtagtcaccctggatgctgtcagagtgccattaggatgccagtagaggaagaggtaaggcccaggtgtaggatagccttcagtctgtgtcaccaaatggcaagtgcattactaaccacacagtggtcccagtttatcaggctgcagcagaacaaagtcaacatccctgtctataagaagcttaggacttgcctctcatctgactggggccactcagtcaaccagggcccttagcacaaaagggcagaagacacttttggtctactgcacacccaccatcactgaaagtgaaaatggcaagaaaccaatcaagaagtataaacaaccctatcaggaaa

SEQ ID NO: 367449 - DNA, 2313 bp, Homo sapiens
cgagaagggtcacgcacaggattgcgacctcgattggaacgcgcttcccgaaagggcatgcgcagagaggtcgtagtcgcgtctgaggtggcgggacaggcttcattgggacagccctaacccagctgctgaatgccagaggccacgaagtgacgttggtctcccgaaagcccgggcccggccggatcacgtgggtaagtccatcctctggaagcgggtgggagggcagagttgggcggcgcagggcggggcaggggcactgtgtgctttctccgacaggatgagctcgctgcatcggggctgccgagctgcgatgccgccgtcaacctggccggagagaacatcctcaaccctctccgaaggtcagcccgggccctaaagctgatacccactagagcacagggaggacagtgccccactgatgagaacctgtgagctatgggtaatggagctcccagattccgaactaaaccgatatcccagactactcattctgctccactcctccacccccacctgctcctccacccagtcagccaattggcttaagtcctcacgtataactcaggatgcccaagaaatgaatgccctttccctctacaggagacgttgactgtttctcttaagccaaaattcagggctttacaagaaattggtatgaaatagctcccaggaaaagacagagagagggatatgtgcacttatgtatttagtggctttttatttcccatgtttctcctgcaggatgatggaatgaaaccttccaaaaagaggttctcggcagccgcctagagaccacccaattgctggctaaagccatcaccaaagccccacaaccccccaaggcctgggtcttagtcacaggtgtagcttactaccagcccagtctgactgcggagtatgatgaagacagcccaggaggggactttgactttttctccaacctcgtaaccaaatgggaagctgcagccaggcttcctggagattctacacgccaggtggtggtgcgctcaggggttgtgctgggccgtgggggtggtgccatgggccacatgctgctgccctttcgcctgggcctggggggccccatcggctcaggccaccaattcttcccctggatacacatcggggacctggcaggaatcctgacccatgcccttgaagcaaaccacgtgcacggggtcctgaatggagtggctccatcctccgccactaatgctgagtttgcccagaccttcggtgctgccctgggccgccgagccttcatccctctccccagcgctgtggtgcaagctgtctttgggcgacagcgtgccatcatgctgctggagggccagaaggtgatcccacggcgaacactggccactggctaccagtattccttcccagagctaggggctgccttaaaggaaattgtagcctaagtaggtcatggcaagggcctgaggcctgttcctcacaggcttccaggttaggcactgtgaataggctcagctcctctagagagctgaagccatctggttcttagattcctctcccagtcctctttcccattgttctgttgctccaccttattgtctcaaggccgtaatctcatcaggttgggacattaatcttttcaactccttgtaagatttcccggtttggtttctctacatgtcctgcagctgccccacttctcctttacgctgtgtagagaatgctctgcagtttaggcaataaaaataaattgtctcactaaccttggctcatctctttggcctagattctcctgggatttacttcaaggaatgtcaccctagatgattcttccccaaagacggggttttgaaagttataatgggcagtctctctcatcaccgtttcccttcttggtccttcagttgccaaaagaacttgtcacaagtttgggacatcaggttatgataaagatagacactagaagagagaatgatgatccatttccaatgggccctgtagtcaccctggatgctgtcagagtgccattaggatgccagtagaggaagaggtaaggcccaggtgtaggatagccttcagtctgtgtcaccaaatggcaagtgcattactaaccacacagtggtcccagtttatcaggctgcagcagaacaaagtcaacatccctgtctataagaagcttaggacttgcctctcatctgactggggccactcagtcaaccagggcccttagcacaaaagggcagaagacacttttggtctactgcacacccaccatcactgaaagtgaaaatggcaagaaaccaatcaagaagtataaacaaccctatcaggaaa

SEQ ID NO: 367450 - DNA, 1982 bp, Homo sapiens
actttacgcaggcgcgttaggtcctagtcgctatgcgtgtgcttgtgggtgagggagggcagaaagggagagtgctgggcgggcttagtcggagattgaggactgggaatccgcttccgggagggcactgtctagtgcacaggcaacctggccttcgcctcctagcccgagaagccgaatctccctaatccctgtgacctgtgtcacctctgcatcgcgaggagggggataagtggggagaagtctggtgtcagatgggatggcgccggaagagggtgccacagcggggacggaaggcgcccccaccccaactccacgggaatataaacaatttgtattttccgatcaggtggcgggacaggcttcattgggacagccctaacccagctgctgaatgccagaggccacgaagtgacgttggtctcccgaaagcccgggcccggccggatcacgtgggatgagctcgctgcatcggggctgccgagctgcgatgccgccgtcaacctggccggagagaacatcctcaaccctctccgaagcttactaccagcccagtctgactgcggagtatgatgaagacagcccaggaggggactttgactttttctccaacctcgtaaccaaatgggaagctgcagccaggcttcctggagattctacacgccaggtggtggtgcgctcaggggttgtgctgggccgtgggggtggtgccatgggccacatgctgctgccctttcgcctgggcctggggggccccatcggctcaggccaccaattcttcccctggatacacatcggggacctggcaggaatcctgacccatgcccttgaagcaaaccacgtgcacggggtcctgaatggagtggctccatcctccgccactaatgctgagtttgcccagaccttcggtgctgccctgggccgccgagccttcatccctctccccagcgctgtggtgcaagctgtctttgggcgacagcgtgccatcatgctgctggagggccagaaggtgatcccacggcgaacactggccactggctaccagtattccttcccagagctaggggctgccttaaaggaaattgtagcctaagtaggtcatggcaagggcctgaggcctgttcctcacaggcttccaggttaggcactgtgaataggctcagctcctctagagagctgaagccatctggttcttagattcctctcccagtcctctttcccattgttctgttgctccaccttattgtctcaaggccgtaatctcatcaggttgggacattaatcttttcaactccttgtaagatttcccggtttggtttctctacatgtcctgcagctgccccacttctcctttacgctgtgtagagaatgctctgcagtttaggcaataaaaataaattgtctcactaaccttggctcatctctttggcctagattctcctgggatttacttcaaggaatgtcaccctagatgattcttccccaaagacggggttttgaaagttataatgggcagtctctctcatcaccgtttcccttcttggtccttcagttgccaaaagaacttgtcacaagtttgggacatcaggttatgataaagatagacactagaagagagaatgatgatccatttccaatgggccctgtagtcaccctggatgctgtcagagtgccattaggatgccagtagaggaagaggtaaggcccaggtgtaggatagccttcagtctgtgtcaccaaatggcaagtgcattactaaccacacagtggtcccagtttatcaggctgcagcagaacaaagtcaacatccctgtctataagaagcttaggacttgcctctcatctgactggggccactcagtcaaccagggcccttagcacaaaagggcagaagacacttttggtctactgcacacccaccatcactgaaagtgaaaatggcaagaaaccaatcaagaagtataaacaaccctatcaggaaa

SEQ ID NO: 367451 - DNA, 1720 bp, Homo sapiens
cgagaagggtcacgcacaggattgcgacctcgattggaacgcgcttcccgaaagggcatgcgcagagaggtcgtagtcgcgtctgaggtggcgggacaggcttcattgggacagccctaacccagctgctgaatgccagaggccacgaagtgacgttggtctcccgaaagcccgggcccggccggatcacgtgggatgagctcgctgcatcggggctgccgagctgcgatgccgccgtcaacctggccggagagaacatcctcaaccctctccgaagcttactaccagcccagtctgactgcggagtatgatgaagacagcccaggaggggactttgactttttctccaacctcgtaaccaaatgggaagctgcagccaggcttcctggagattctacacgccaggtggtggtgcgctcaggggttgtgctgggccgtgggggtggtgccatgggccacatgctgctgccctttcgcctgggcctggggggccccatcggctcaggccaccaattcttcccctggatacacatcggggacctggcaggaatcctgacccatgcccttgaagcaaaccacgtgcacggggtcctgaatggagtggctccatcctccgccactaatgctgagtttgcccagaccttcggtgctgccctgggccgccgagccttcatccctctccccagcgctgtggtgcaagctgtctttgggcgacagcgtgccatcatgctgctggagggccagaaggtgatcccacggcgaacactggccactggctaccagtattccttcccagagctaggggctgccttaaaggaaattgtagcctaagtaggtcatggcaagggcctgaggcctgttcctcacaggcttccaggttaggcactgtgaataggctcagctcctctagagagctgaagccatctggttcttagattcctctcccagtcctctttcccattgttctgttgctccaccttattgtctcaaggccgtaatctcatcaggttgggacattaatcttttcaactccttgtaagatttcccggtttggtttctctacatgtcctgcagctgccccacttctcctttacgctgtgtagagaatgctctgcagtttaggcaataaaaataaattgtctcactaaccttggctcatctctttggcctagattctcctgggatttacttcaaggaatgtcaccctagatgattcttccccaaagacggggttttgaaagttataatgggcagtctctctcatcaccgtttcccttcttggtccttcagttgccaaaagaacttgtcacaagtttgggacatcaggttatgataaagatagacactagaagagagaatgatgatccatttccaatgggccctgtagtcaccctggatgctgtcagagtgccattaggatgccagtagaggaagaggtaaggcccaggtgtaggatagccttcagtctgtgtcaccaaatggcaagtgcattactaaccacacagtggtcccagtttatcaggctgcagcagaacaaagtcaacatccctgtctataagaagcttaggacttgcctctcatctgactggggccactcagtcaaccagggcccttagcacaaaagggcagaagacacttttggtctactgcacacccaccatcactgaaagtgaaaatggcaagaaaccaatcaagaagtataaacaaccctatcaggaaa

SEQ ID NO: 367452 - DNA, 2491 bp, Homo sapiens
actttacgcaggcgcgttaggtcctagtcgctatgcgtgtgcttgtgggtgagggagggcagaaagggagagtgctgggcgggcttagtcggagattgaggactgggaatccgcttccgggagggcactgtctagtgcacaggcaacctggccttcgcctcctagcccgagaagccgaatctccctaatccctgtgacctgtgtcacctctgcatcgcgaggagggggataagtggggagaagtctggtgtcagatgggatggcgccggaagagggtgccacagcggggacggaaggcgcccccaccccaactccacgggaatataaacaatttgtattttccgatcaggtggcgggacaggcttcattgggacagccctaacccagctgctgaatgccagaggccacgaagtgacgttggtctcccgaaagcccgggcccggccggatcacgtgggtaagtccatcctctggaagcgggtgggagggcagagttgggcggcgcagggcggggcaggggcactgtgtgctttctccgacaggatgagctcgctgcatcggggctgccgagctgcgatgccgccgtcaacctggccggagagaacatcctcaaccctctccgaaggtcagcccgggccctaaagctgatacccactagagcacagggaggacagtgccccactgatgagaacctgtgagctatgggtaatggagctcccagattccgaactaaaccgatatcccagactactcattctgctccactcctccacccccacctgctcctccacccagtcagccaattggcttaagtcctcacgtataactcaggatgcccaagaaatgaatgccctttccctctacaggagacgttgactgtttctcttaagccaaaattcagggctttacaagaaattggtatgaaatagctcccaggaaaagacagagagagggatatgtgcacttatgtatttagtggctttttatttcccatgtttctcctgcaggatgatggaatgaaaccttccaaaaagaggttctcggcagccgcctagagaccacccaattgctggctaaagccatcaccaaagccccacaaccccccaaggcctgggtcttagtcacaggtgtagcttactaccagcccagtctgactgcggagtatgatgaagacagcccaggaggggactttgactttttctccaacctcgtaaccaaatgggaagctgcagccaggcttcctggagattctacacgccaggtggtggtgcgctcaggccaccaattcttcccctggatacacatcggggacctggcaggaatcctgacccatgcccttgaagcaaaccacgtgcacggggtcctgaatggagtggctccatcctccgccactaatgctgagtttgcccagaccttcggtgctgccctgggccgccgagccttcatccctctccccagcgctgtggtgcaagctgtctttgggcgacagcgtgccatcatgctgctggagggccagaaggtgatcccacggcgaacactggccactggctaccagtattccttcccagagctaggggctgccttaaaggaaattgtagcctaagtaggtcatggcaagggcctgaggcctgttcctcacaggcttccaggttaggcactgtgaataggctcagctcctctagagagctgaagccatctggttcttagattcctctcccagtcctctttcccattgttctgttgctccaccttattgtctcaaggccgtaatctcatcaggttgggacattaatcttttcaactccttgtaagatttcccggtttggtttctctacatgtcctgcagctgccccacttctcctttacgctgtgtagagaatgctctgcagtttaggcaataaaaataaattgtctcactaaccttggctcatctctttggcctagattctcctgggatttacttcaaggaatgtcaccctagatgattcttccccaaagacggggttttgaaagttataatgggcagtctctctcatcaccgtttcccttcttggtccttcagttgccaaaagaacttgtcacaagtttgggacatcaggttatgataaagatagacactagaagagagaatgatgatccatttccaatgggccctgtagtcaccctggatgctgtcagagtgccattaggatgccagtagaggaagaggtaaggcccaggtgtaggatagccttcagtctgtgtcaccaaatggcaagtgcattactaaccacacagtggtcccagtttatcaggctgcagcagaacaaagtcaacatccctgtctataagaagcttaggacttgcctctcatctgactggggccactcagtcaaccagggcccttagcacaaaagggcagaagacacttttggtctactgcacacccaccatcactgaaagtgaaaatggcaagaaaccaatcaagaagtataaacaaccctatcaggaaa

SEQ ID NO: 367453 - DNA, 1380 bp, Homo sapiens
aaagatccttcaggtctctacttcaaaggggaagctgagccagctcggagatcatacacgccagggtggtggtgcgctcaggggttgtgctgggccgtgggggtggtgccatgggccacatgctgctgccctttcgcctgggcctggggggccccatcggctcaggccaccaattcttcccctggatacacatcggggacctggcaggaatcctgacccatgcccttgaagcaaaccacgtgcacggggtcctgaatggagtggctccatcctccgccactaatgctgagtttgcccagaccttcggtgctgccctgggccgccgagccttcatccctctccccagcgctgtggtgcaagctgtctttgggcgacagcgtgccatcatgctgctggagggccagaaggtgatcccacggcgaacactggccactggctaccagtattccttcccagagctaggggctgccttaaaggaaattgtagcctaagtaggtcatggcaagggcctgaggcctgttcctcacaggcttccaggttaggcactgtgaataggctcagctcctctagagagctgaagccatctggttcttagattcctctcccagtcctctttcccattgttctgttgctccaccttattgtctcaaggccgtaatctcatcaggttgggacattaatcttttcaactccttgtaagatttcccggtttggtttctctacatgtcctgcagctgccccacttctcctttacgctgtgtagagaatgctctgcagtttaggcaataaaaataaattgtctcactaaccttggctcatctctttggcctagattctcctgggatttacttcaaggaatgtcaccctagatgattcttccccaaagacggggttttgaaagttataatgggcagtctctctcatcaccgtttcccttcttggtccttcagttgccaaaagaacttgtcacaagtttgggacatcaggttatgataaagatagacactagaagagagaatgatgatccatttccaatgggccctgtagtcaccctggatgctgtcagagtgccattaggatgccagtagaggaagaggtaaggcccaggtgtaggatagccttcagtctgtgtcaccaaatggcaagtgcattactaaccacacagtggtcccagtttatcaggctgcagcagaacaaagtcaacatccctgtctataagaagcttaggacttgcctctcatctgactggggccactcagtcaaccagggcccttagcacaaaagggcagaagacacttttggtctactgcacacccaccatcactgaaagtgaaaatggcaagaaaccaatcaagaagtataaacaaccctatcaggaaa

SEQ ID NO: 367454 - DNA, 2286 bp, Homo sapiens
actttacgcaggcgcgttaggtcctagtcgctatgcgtgtgcttgtgggtgagggagggcagaaagggagagtgctgggcgggcttagtcggagattgaggactgggaatccgcttccgggagggcactgtctagtgcacaggcaacctggccttcgcctcctagcccgagaagccgaatctccctaatccctgtgacctgtgtcacctctgcatcgcgaggagggggataagtggggagaagtctggtgtcagatgggatggcgccggaagagggtgccacagcggggacggaaggcgcccccaccccaactccacgggaatataaacaatttgtattttccgatcaggtggcgggacaggcttcattgggacagccctaacccagctgctgaatgccagaggccacgaagtgacgttggtctcccgaaagcccgggcccggccggatcacgtgggtaagtccatcctctggaagcgggtgggagggcagagttgggcggcgcagggcggggcaggggcactgtgtgctttctccgacaggatgagctcgctgcatcggggctgccgagctgcgatgccgccgtcaacctggccggagagaacatcctcaaccctctccgaaggtcagcccgggccctaaagctgatacccactagagcacagggaggacagtgccccactgatgagaacctgtgagctatgggtaatggagctcccagattccgaactaaaccgatatcccagactactcattctgctccactcctccacccccacctgctcctccacccagtcagccaattggcttaagtcctcacgtataactcaggatgcccaagaaatgaatgccctttccctctacaggagacgttgactgtttctcttaagccaaaattcagggctttacaagaaattggtatgaaatagctcccaggaaaagacagagagagggatatgtgcacttatgtatttagtggctttttatttcccatgtttctcctgcaggatgatggaatgaaaccttccaaaaagaggttctcggcagccgcctagagaccacccaattgctggctaaagccatcaccaaagccccacaaccccccaaggcctgggtcttagtcacaggtgtagcttactaccagcccagtctgactgcggagtatgatgaagacagcccaggaggggactttgactttttctccaacctcgtaaccaaatgggaagctgcagccaggcttcctggagattctacacgccaggtggtggtgcgctcaggtgagaaacgggcctgggtatcagacagggttggaatgtcttctctgggctggggaagtgatgggattaggagagctgagattacaattacagagtgagaggatgccaccacttctagccaacctgcagatgagaaggtgtgaggtcttaaagacagccatactgctcacttctgttacagagccaagtcagcatggggagagtgaggaaggggaaacagaaaccaggaggagcagtgggctccttcaaggctgagaagacccctgtaccttccctctttcctgctctaggggttgtgctgggccgtgggggtggtgccatgggccacatgctgctgccctttcgcctgggcctggggggccccatcggctcaggccaccaattcttcccctggatacacatcggggacctggcaggaatcctgacccatgcccttgaagcaaaccacgtgcacggggtcctgaatggagtggctccatcctccgccactaatgctgagtttgcccagaccttcggtgctgccctgggccgccgagccttcatccctctccccagcgctgtggtgcaagctgtctttgggcgacagcgtgccatcatgctgctggagggccagaaggtgatcccacggcgaacactggccactggctaccagtattccttcccagagctaggggctgccttaaaggaaattgtagcctaagtaggtcatggcaagggcctgaggcctgttcctcacaggcttccaggttaggcactgtgaataggctcagctcctctagagagctgaagccatctggttcttagattcctctcccagtcctctttcccattgttctgttgctccaccttattgtctcaaggccgtaatctcatcaggttgggacattaatcttttcaactccttgtaagatttcccggtttggtttctctacatgtcctgcagctgccccacttctcctttacgctgtgtagagaatgctctgcagtttaggcaataaaaataaattgtc

SEQ ID NO: 367455 - DNA, 1110 bp, Homo sapiens
actttacgcaggcgcgttaggtcctagtcgctatgcgtgtgcttgtgggtgagggagggcagaaagggagagtgctgggcgggcttagtcggagattgaggactgggaatccgcttccgggagggcactgtctagtgcacaggcaacctggccttcgcctcctagcccgagaagccgaatctccctaatccctgtgacctgtgtcacctctgcatcgcgaggagggggataagtggggagaagtctggtgtcagatgggatggcgccggaagagggtgccacagcggggacggaaggcgcccccaccccaactccacgggaatataaacaatttgtattttccgatcaggtggcgggacaggcttcattgggacagccctaacccagctgctgaatgccagaggccacgaagtgacgttggtctcccgaaagcccgggcccggccggatcacgtgggatgagctcgctgcatcggggctgccgagctgcgatgccgccgtcaacctggccggagagaacatcctcaaccctctccgaaggtcagcccgggccctaaagctgatacccactagagcacagggaggacagtgccccactgatgagaacctgtgagctaccatcaccaaagccccacaaccccccaaggcctgggtcttagtcacaggtgtagcttactaccagcccagtctgactgcggagtatgatgaagacagcccaggaggggactttgactttttctccaacctcgtaaccaaatgggaagctgcagccaggcttcctggagattctacacgccaggtggtggtgcgctcaggggttgtgctgggccgtgggggtggtgccatgggccacatgctgctgccctttcgcctgggcctggggggccccatcggctcaggccaccaattcttcccctggatacacatcggggacctggcaggaatcctgacccatgcccttgaagcaaaccacgtgcacggggtcctgaatggagtggctccatcctccgccactaatgctgagtttgccatacctggggtgcctggccggcagcttatcctcttccacgcgtgagcagctgctttgcgaaacgaccacatgctcgggggc

SEQ ID NO: 367456 - DNA, 1525 bp, Homo sapiens
actttacgcaggcgcgttaggtcctagtcgctatgcgtgtgcttgtgggtgagggagggcagaaagggagagtgctgggcgggcttagtcggagattgaggactgggaatccgcttccgggagggcactgtctagtgcacaggcaacctggccttcgcctcctagcccgagaagccgaatctccctaatccctgtgacctgtgtcacctctgcatcgcgaggagggggataagtggggagaagtctggtgtcagatgggatggcgccggaagagggtgccacagcggggacggaaggcgcccccaccccaactccacgggaatataaacaatttgtattttccgatcaggtggcgggacaggcttcattgggacagccctaacccagctgctgaatgccagaggccacgaagtgacgttggtctcccgaaagcccgggcccggccggatcacgtgggatgagctcgctgcatcggggctgccgagctgcgatgccgccgtcaacctggccggagagaacatcctcaaccctctccgaagatggaatgaaaccttccaaaaagaggttctcggcagccgcctagagaccacccaattgctggctaaagccatcaccaaagccccacaaccccccaaggcctgggtcttagtcacaggtgtagcttactaccagcccagtctgactgcggagtatgatgaagacagcccaggaggggactttgactttttctccaacctcgtaaccaaatgggaagctgcagccaggcttcctggagattctacacgccaggtggtggtgcgctcaggggttgtgctgggccgtgggggtggtgccatgggccacatgctgctgccctttcgcctgggcctggggggccccatcggctcaggccaccaattcttcccctggatacacatcggggacctggcaggaatcctgacccatgcccttgaagcaaaccacgtgcacggggtcctgaatggagtggctccatcctccgccactaatgctgagtttgcccagaccttcggtgctgccctgggccgccgagccttcatccctctccccagcgctgtggtgcaagctgtctttgggcgacagcgtgccatcatgctgctggagggccagaaggtgatcccacggcgaacactggccactggctaccagtattccttcccagagctaggggctgccttaaaggaaattgtagcctaagtaggtcatggcaagggcctgaggcctgttcctcacaggcttccaggttaggcactgtgaataggctcagctcctctagagagctgaagccatctggttcttagattcctctcccagtcctctttcccattgttctgttgctccaccttattgtctcaaggccgtaatctcatcaggttgggacattaatcttttcaactccttgtaagatttcccggtttggtttctctacatgtcctgcagctgccccacttctcctttacgctgtgtagagaatgctctgcagtttaggcaataaaaataaattgtc

SEQ ID NO: 367457 - DNA, 2575 bp, Homo sapiens
actttacgcaggcgcgttaggtcctagtcgctatgcgtgtgcttgtgggtgagggagggcagaaagggagagtgctgggcgggcttagtcggagattgaggactgggaatccgcttccgggagggcactgtctagtgcacaggcaacctggccttcgcctcctagcccgagaagccgaatctccctaatccctgtgacctgtgtcacctctgcatcgcgaggagggggataagtggggagaagtctggtgtcagatgggatggcgccggaagagggtgccacagcggggacggaaggcgcccccaccccaactccacgggaatataaacaatttgtattttccgatcaggtggcgggacaggcttcattgggacagccctaacccagctgctgaatgccagaggccacgaagtgacgttggtctcccgaaagcccgggcccggccggatcacgtgggtaagtccatcctctggaagcgggtgggagggcagagttgggcggcgcagggcggggcaggggcactgtgtgctttctccgacaggatgagctcgctgcatcggggctgccgagctgcgatgccgccgtcaacctggccggagagaacatcctcaaccctctccgaaggtcagcccgggccctaaagctgatacccactagagcacagggaggacagtgccccactgatgagaacctgtgagctatgggtaatggagctcccagattccgaactaaaccgatatcccagactactcattctgctccactcctccacccccacctgctcctccacccagtcagccaattggcttaagtcctcacgtataactcaggatgcccaagaaatgaatgccctttccctctacaggagacgttgactgtttctcttaagccaaaattcagggctttacaagaaattggtatgaaatagctcccaggaaaagacagagagagggatatgtgcacttatgtatttagtggctttttatttcccatgtttctcctgcaggatgatggaatgaaaccttccaaaaagaggttctcggcagccgcctagagaccacccaattgctggctaaagccatcaccaaagccccacaaccccccaaggcctgggtcttagtcacaggtgtagcttactaccagcccagtctgactgcggagtatgatgaagacagcccaggaggggactttgactttttctccaacctcgtaaccaaatgggaagctgcagccaggcttcctggagattctacacgccaggtggtggtgcgctcaggggttgtgctgggccgtgggggtggtgccatgggccacatgctgctgccctttcgcctgggcctggggggccccatcggctcaggccaccaattcttcccctggatacacatcggggacctggcaggaatcctgacccatgcccttgaagcaaaccacgtgcacggggtcctgaatggagtggctccatcctccgccactaatgctgagtttgcccagaccttcggtgctgccctgggccgccgagccttcatccctctccccagcgctgtggtgcaagctgtctttgggcgacagcgtgccatcatgctgctggagggccagaaggtgatcccacggcgaacactggccactggctaccagtattccttcccagagctaggggctgccttaaaggaaattgtagcctaagtaggtcatggcaagggcctgaggcctgttcctcacaggcttccaggttaggcactgtgaataggctcagctcctctagagagctgaagccatctggttcttagattcctctcccagtcctctttcccattgttctgttgctccaccttattgtctcaaggccgtaatctcatcaggttgggacattaatcttttcaactccttgtaagatttcccggtttggtttctctacatgtcctgcagctgccccacttctcctttacgctgtgtagagaatgctctgcagtttaggcaataaaaataaattgtctcactaaccttggctcatctctttggcctagattctcctgggatttacttcaaggaatgtcaccctagatgattcttccccaaagacggggttttgaaagttataatgggcagtctctctcatcaccgtttcccttcttggtccttcagttgccaaaagaacttgtcacaagtttgggacatcaggttatgataaagatagacactagaagagagaatgatgatccatttccaatgggccctgtagtcaccctggatgctgtcagagtgccattaggatgccagtagaggaagaggtaaggcccaggtgtaggatagccttcagtctgtgtcaccaaatggcaagtgcattactaaccacacagtggtcccagtttatcaggctgcagcagaacaaagtcaacatccctgtctataagaagcttaggacttgcctctcatctgactggggccactcagtcaaccagggcccttagcacaaaagggcagaagacacttttggtctactgcacacccaccatcactgaaagtgaaaatggcaagaaaccaatcaagaagtataaacaaccctatcaggaaa

SEQ ID NO: 367458 - DNA, 2865 bp, Homo sapiens
actttacgcaggcgcgttaggtcctagtcgctatgcgtgtgcttgtgggtgagggagggcagaaagggagagtgctgggcgggcttagtcggagattgaggactgggaatccgcttccgggagggcactgtctagtgcacaggcaacctggccttcgcctcctagcccgagaagccgaatctccctaatccctgtgacctgtgtcacctctgcatcgcgaggagggggataagtggggagaagtctggtgtcagatgggatggcgccggaagagggtgccacagcggggacggaaggcgcccccaccccaactccacgggaatataaacaatttgtattttccgatcaggtggcgggacaggcttcattgggacagccctaacccagctgctgaatgccagaggccacgaagtgacgttggtctcccgaaagcccgggcccggccggatcacgtgggtaagtccatcctctggaagcgggtgggagggcagagttgggcggcgcagggcggggcaggggcactgtgtgctttctccgacaggatgagctcgctgcatcggggctgccgagctgcgatgccgccgtcaacctggccggagagaacatcctcaaccctctccgaaggtcagcccgggccctaaagctgatacccactagagcacagggaggacagtgccccactgatgagaacctgtgagctatgggtaatggagctcccagattccgaactaaaccgatatcccagactactcattctgctccactcctccacccccacctgctcctccacccagtcagccaattggcttaagtcctcacgtataactcaggatgcccaagaaatgaatgccctttccctctacaggagacgttgactgtttctcttaagccaaaattcagggctttacaagaaattggtatgaaatagctcccaggaaaagacagagagagggatatgtgcacttatgtatttagtggctttttatttcccatgtttctcctgcaggatgatggaatgaaaccttccaaaaagaggttctcggcagccgcctagagaccacccaattgctggctaaagccatcaccaaagccccacaaccccccaaggcctgggtcttagtcacaggtgtagcttactaccagcccagtctgactgcggagtatgatgaagacagcccaggaggggactttgactttttctccaacctcgtaaccaaatgggaagctgcagccaggcttcctggagattctacacgccaggtggtggtgcgctcaggtgagaaacgggcctgggtatcagacagggttggaatgtcttctctgggctggggaagtgatgggattaggagagctgagattacaattacagagtgagaggatgccaccacttctagccaacctgcagatgagaaggtgtgaggtcttaaagacagccatactgctcacttctgttacagagccaagtcagcatggggagagtgaggaaggggaaacagaaaccaggaggagcagtgggctccttcaaggctgagaagacccctgtaccttccctctttcctgctctaggggttgtgctgggccgtgggggtggtgccatgggccacatgctgctgccctttcgcctgggcctggggggccccatcggctcaggccaccaattcttcccctggatacacatcggggacctggcaggaatcctgacccatgcccttgaagcaaaccacgtgcacggggtcctgaatggagtggctccatcctccgccactaatgctgagtttgcccagaccttcggtgctgccctgggccgccgagccttcatccctctccccagcgctgtggtgcaagctgtctttgggcgacagcgtgccatcatgctgctggagggccagaaggtgatcccacggcgaacactggccactggctaccagtattccttcccagagctaggggctgccttaaaggaaattgtagcctaagtaggtcatggcaagggcctgaggcctgttcctcacaggcttccaggttaggcactgtgaataggctcagctcctctagagagctgaagccatctggttcttagattcctctcccagtcctctttcccattgttctgttgctccaccttattgtctcaaggccgtaatctcatcaggttgggacattaatcttttcaactccttgtaagatttcccggtttggtttctctacatgtcctgcagctgccccacttctcctttacgctgtgtagagaatgctctgcagtttaggcaataaaaataaattgtctcactaaccttggctcatctctttggcctagattctcctgggatttacttcaaggaatgtcaccctagatgattcttccccaaagacggggttttgaaagttataatgggcagtctctctcatcaccgtttcccttcttggtccttcagttgccaaaagaacttgtcacaagtttgggacatcaggttatgataaagatagacactagaagagagaatgatgatccatttccaatgggccctgtagtcaccctggatgctgtcagagtgccattaggatgccagtagaggaagaggtaaggcccaggtgtaggatagccttcagtctgtgtcaccaaatggcaagtgcattactaaccacacagtggtcccagtttatcaggctgcagcagaacaaagtcaacatccctgtctataagaagcttaggacttgcctctcatctgactggggccactcagtcaaccagggcccttagcacaaaagggcagaagacacttttggtctactgcacacccaccatcactgaaagtgaaaatggcaagaaaccaatcaagaagtataaacaaccctatcaggaaa

SEQ ID NO: 367459 - DNA, 2189 bp, Homo sapiens
actttacgcaggcgcgttaggtcctagtcgctatgcgtgtgcttgtgggtgagggagggcagaaagggagagtgctgggcgggcttagtcggagattgaggactgggaatccgcttccgggagggcactgtctagtgcacaggcaacctggccttcgcctcctagcccgagaagccgaatctccctaatccctgtgacctgtgtcacctctgcatcgcgaggagggggataagtggggagaagtctggtgtcagatgggatggcgccggaagagggtgccacagcggggacggaaggcgcccccaccccaactccacgggaatataaacaatttgtattttccgatcaggtggcgggacaggcttcattgggacagccctaacccagctgctgaatgccagaggccacgaagtgacgttggtctcccgaaagcccgggcccggccggatcacgtgggtaagtccatcctctggaagcgggtgggagggcagagttgggcggcgcagggcggggcaggggcactgtgtgctttctccgacaggatgagctcgctgcatcggggctgccgagctgcgatgccgccgtcaacctggccggagagaacatcctcaaccctctccgaagatggaatgaaaccttccaaaaagaggttctcggcagccgcctagagaccacccaattgctggctaaagccatcaccaaagccccacaaccccccaaggcctgggtcttagtcacaggtgtagcttactaccagcccagtctgactgcggagtatgatgaagacagcccaggaggggactttgactttttctccaacctcgtaaccaaatgggaagctgcagccaggcttcctggagattctacacgccaggtggtggtgcgctcaggggttgtgctgggccgtgggggtggtgccatgggccacatgctgctgccctttcgcctgggcctggggggccccatcggctcaggccaccaattcttcccctggatacacatcggggacctggcaggaatcctgacccatgcccttgaagcaaaccacgtgcacggggtcctgaatggagtggctccatcctccgccactaatgctgagtttgcccagaccttcggtgctgccctgggccgccgagccttcatccctctccccagcgctgtggtgcaagctgtctttgggcgacagcgtgccatcatgctgctggagggccagaaggtgatcccacggcgaacactggccactggctaccagtattccttcccagagctaggggctgccttaaaggaaattgtagcctaagtaggtcatggcaagggcctgaggcctgttcctcacaggcttccaggttaggcactgtgaataggctcagctcctctagagagctgaagccatctggttcttagattcctctcccagtcctctttcccattgttctgttgctccaccttattgtctcaaggccgtaatctcatcaggttgggacattaatcttttcaactccttgtaagatttcccggtttggtttctctacatgtcctgcagctgccccacttctcctttacgctgtgtagagaatgctctgcagtttaggcaataaaaataaattgtctcactaaccttggctcatctctttggcctagattctcctgggatttacttcaaggaatgtcaccctagatgattcttccccaaagacggggttttgaaagttataatgggcagtctctctcatcaccgtttcccttcttggtccttcagttgccaaaagaacttgtcacaagtttgggacatcaggttatgataaagatagacactagaagagagaatgatgatccatttccaatgggccctgtagtcaccctggatgctgtcagagtgccattaggatgccagtagaggaagaggtaaggcccaggtgtaggatagccttcagtctgtgtcaccaaatggcaagtgcattactaaccacacagtggtcccagtttatcaggctgcagcagaacaaagtcaacatccctgtctataagaagcttaggacttgcctctcatctgactggggccactcagtcaaccagggcccttagcacaaaagggcagaagacacttttggtctactgcacacccaccatcactgaaagtgaaaatggcaagaaaccaatcaagaagtataaacaaccctatcaggaaa

SEQ ID NO: 367460 - DNA, 2181 bp, Homo sapiens
actttacgcaggcgcgttaggtcctagtcgctatgcgtgtgcttgtgggtgagggagggcagaaagggagagtgctgggcgggcttagtcggagattgaggactgggaatccgcttccgggagggcactgtctagtgcacaggcaacctggccttcgcctcctagcccgagaagccgaatctccctaatccctgtgacctgtgtcacctctgcatcgcgaggagggggataagtggggagaagtctggtgtcagatgggatggcgccggaagagggtgccacagcggggacggaaggcgcccccaccccaactccacgggaatataaacaatttgtattttccgatcaggtggcgggacaggcttcattgggacagccctaacccagctgctgaatgccagaggccacgaagtgacgttggtctcccgaaagcccgggcccggccggatcacgtgggatgagctcgctgcatcggggctgccgagctgcgatgccgccgtcaacctggccggagagaacatcctcaaccctctccgaaggtcagcccgggccctaaagctgatacccactagagcacagggaggacagtgccccactgatgagaacctgtgagctaatggaatgaaaccttccaaaaagaggttctcggcagccgcctagagaccacccaattgctggctaaagccatcaccaaagccccacaaccccccaaggcctgggtcttagtcacaggtgtagcttactaccagcccagtctgactgcggagtatgatgaagacagcccaggaggggactttgactttttctccaacctcgtaaccaaatgggaagctgcagccaggcttcctggagattctacacgccaggtggtggtgcgctcaggggttgtgctgggccgtgggggtggtgccatgggccacatgctgctgccctttcgcctgggcctggggggccccatcggctcaggccaccaattcttcccctggatacacatcggggacctggcaggaatcctgacccatgcccttgaagcaaaccacgtgcacggggtcctgaatggagtggctccatcctccgccactaatgctgagtttgcccagaccttcggtgctgccctgggccgccgagccttcatccctctccccagcgctgtggtgcaagctgtctttgggcgacagcgtgccatcatgctgctggagggccagaaggtgatcccacggcgaacactggccactggctaccagtattccttcccagagctaggggctgccttaaaggaaattgtagcctaagtaggtcatggcaagggcctgaggcctgttcctcacaggcttccaggttaggcactgtgaataggctcagctcctctagagagctgaagccatctggttcttagattcctctcccagtcctctttcccattgttctgttgctccaccttattgtctcaaggccgtaatctcatcaggttgggacattaatcttttcaactccttgtaagatttcccggtttggtttctctacatgtcctgcagctgccccacttctcctttacgctgtgtagagaatgctctgcagtttaggcaataaaaataaattgtctcactaaccttggctcatctctttggcctagattctcctgggatttacttcaaggaatgtcaccctagatgattcttccccaaagacggggttttgaaagttataatgggcagtctctctcatcaccgtttcccttcttggtccttcagttgccaaaagaacttgtcacaagtttgggacatcaggttatgataaagatagacactagaagagagaatgatgatccatttccaatgggccctgtagtcaccctggatgctgtcagagtgccattaggatgccagtagaggaagaggtaaggcccaggtgtaggatagccttcagtctgtgtcaccaaatggcaagtgcattactaaccacacagtggtcccagtttatcaggctgcagcagaacaaagtcaacatccctgtctataagaagcttaggacttgcctctcatctgactggggccactcagtcaaccagggcccttagcacaaaagggcagaagacacttttggtctactgcacacccaccatcactgaaagtgaaaatggcaagaaaccaatcaagaagtataaacaaccctatcaggaaa

SEQ ID NO: 367461 - DNA, 2266 bp, Homo sapiens
actttacgcaggcgcgttaggtcctagtcgctatgcgtgtgcttgtgggtgagggagggcagaaagggagagtgctgggcgggcttagtcggagattgaggactgggaatccgcttccgggagggcactgtctagtgcacaggcaacctggccttcgcctcctagcccgagaagccgaatctccctaatccctgtgacctgtgtcacctctgcatcgcgaggagggggataagtggggagaagtctggtgtcagatgggatggcgccggaagagggtgccacagcggggacggaaggcgcccccaccccaactccacgggaatataaacaatttgtattttccgatcaggtggcgggacaggcttcattgggacagccctaacccagctgctgaatgccagaggccacgaagtgacgttggtctcccgaaagcccgggcccggccggatcacgtgggtaagtccatcctctggaagcgggtgggagggcagagttgggcggcgcagggcggggcaggggcactgtgtgctttctccgacaggatgagctcgctgcatcggggctgccgagctgcgatgccgccgtcaacctggccggagagaacatcctcaaccctctccgaaggtcagcccgggccctaaagctgatacccactagagcacagggaggacagtgccccactgatgagaacctgtgagctaatggaatgaaaccttccaaaaagaggttctcggcagccgcctagagaccacccaattgctggctaaagccatcaccaaagccccacaaccccccaaggcctgggtcttagtcacaggtgtagcttactaccagcccagtctgactgcggagtatgatgaagacagcccaggaggggactttgactttttctccaacctcgtaaccaaatgggaagctgcagccaggcttcctggagattctacacgccaggtggtggtgcgctcaggggttgtgctgggccgtgggggtggtgccatgggccacatgctgctgccctttcgcctgggcctggggggccccatcggctcaggccaccaattcttcccctggatacacatcggggacctggcaggaatcctgacccatgcccttgaagcaaaccacgtgcacggggtcctgaatggagtggctccatcctccgccactaatgctgagtttgcccagaccttcggtgctgccctgggccgccgagccttcatccctctccccagcgctgtggtgcaagctgtctttgggcgacagcgtgccatcatgctgctggagggccagaaggtgatcccacggcgaacactggccactggctaccagtattccttcccagagctaggggctgccttaaaggaaattgtagcctaagtaggtcatggcaagggcctgaggcctgttcctcacaggcttccaggttaggcactgtgaataggctcagctcctctagagagctgaagccatctggttcttagattcctctcccagtcctctttcccattgttctgttgctccaccttattgtctcaaggccgtaatctcatcaggttgggacattaatcttttcaactccttgtaagatttcccggtttggtttctctacatgtcctgcagctgccccacttctcctttacgctgtgtagagaatgctctgcagtttaggcaataaaaataaattgtctcactaaccttggctcatctctttggcctagattctcctgggatttacttcaaggaatgtcaccctagatgattcttccccaaagacggggttttgaaagttataatgggcagtctctctcatcaccgtttcccttcttggtccttcagttgccaaaagaacttgtcacaagtttgggacatcaggttatgataaagatagacactagaagagagaatgatgatccatttccaatgggccctgtagtcaccctggatgctgtcagagtgccattaggatgccagtagaggaagaggtaaggcccaggtgtaggatagccttcagtctgtgtcaccaaatggcaagtgcattactaaccacacagtggtcccagtttatcaggctgcagcagaacaaagtcaacatccctgtctataagaagcttaggacttgcctctcatctgactggggccactcagtcaaccagggcccttagcacaaaagggcagaagacacttttggtctactgcacacccaccatcactgaaagtgaaaatggcaagaaaccaatcaagaagtataaacaaccctatcaggaaa

SEQ ID NO: 367462 - DNA, 2059 bp, Homo sapiens
actttacgcaggcgcgttaggtcctagtcgctatgcgtgtgcttgtgggtgagggagggcagaaagggagagtgctgggcgggcttagtcggagattgaggactgggaatccgcttccgggagggcactgtctagtgcacaggcaacctggccttcgcctcctagcccgagaagccgaatctccctaatccctgtgacctgtgtcacctctgcatcgcgaggagggggataagtggggagaagtctggtgtcagatgggatggcgccggaagagggtgccacagcggggacggaaggcgcccccaccccaactccacgggaatataaacaatttgtattttccgatcaggtggcgggacaggcttcattgggacagccctaacccagctgctgaatgccagaggccacgaagtgacgttggtctcccgaaagcccgggcccggccggatcacgtgggatgagctcgctgcatcggggctgccgagctgcgatgccgccgtcaacctggccggagagaacatcctcaaccctctccgaaggtcagcccgggccctaaagctgatacccactagagcacagggaggacagtgccccactgatgagaacctgtgagctacttactaccagcccagtctgactgcggagtatgatgaagacagcccaggaggggactttgactttttctccaacctcgtaaccaaatgggaagctgcagccaggcttcctggagattctacacgccaggtggtggtgcgctcaggggttgtgctgggccgtgggggtggtgccatgggccacatgctgctgccctttcgcctgggcctggggggccccatcggctcaggccaccaattcttcccctggatacacatcggggacctggcaggaatcctgacccatgcccttgaagcaaaccacgtgcacggggtcctgaatggagtggctccatcctccgccactaatgctgagtttgcccagaccttcggtgctgccctgggccgccgagccttcatccctctccccagcgctgtggtgcaagctgtctttgggcgacagcgtgccatcatgctgctggagggccagaaggtgatcccacggcgaacactggccactggctaccagtattccttcccagagctaggggctgccttaaaggaaattgtagcctaagtaggtcatggcaagggcctgaggcctgttcctcacaggcttccaggttaggcactgtgaataggctcagctcctctagagagctgaagccatctggttcttagattcctctcccagtcctctttcccattgttctgttgctccaccttattgtctcaaggccgtaatctcatcaggttgggacattaatcttttcaactccttgtaagatttcccggtttggtttctctacatgtcctgcagctgccccacttctcctttacgctgtgtagagaatgctctgcagtttaggcaataaaaataaattgtctcactaaccttggctcatctctttggcctagattctcctgggatttacttcaaggaatgtcaccctagatgattcttccccaaagacggggttttgaaagttataatgggcagtctctctcatcaccgtttcccttcttggtccttcagttgccaaaagaacttgtcacaagtttgggacatcaggttatgataaagatagacactagaagagagaatgatgatccatttccaatgggccctgtagtcaccctggatgctgtcagagtgccattaggatgccagtagaggaagaggtaaggcccaggtgtaggatagccttcagtctgtgtcaccaaatggcaagtgcattactaaccacacagtggtcccagtttatcaggctgcagcagaacaaagtcaacatccctgtctataagaagcttaggacttgcctctcatctgactggggccactcagtcaaccagggcccttagcacaaaagggcagaagacacttttggtctactgcacacccaccatcactgaaagtgaaaatggcaagaaaccaatcaagaagtataaacaaccctatcaggaaa

SEQ ID NO: 367463 - DNA, 1441 bp, Homo sapiens
actttacgcaggcgcgttaggtcctagtcgctatgcgtgtgcttgtgggtgagggagggcagaaagggagagtgctgggcgggcttagtcggagattgaggactgggaatccgcttccgggagggcactgtctagtgcacaggcaacctggccttcgcctcctagcccgagaagccgaatctccctaatccctgtgacctgtgtcacctctgcatcgcgaggagggggataagtggggagaagtctggtgtcagatgggatggcgccggaagagggtgccacagcggggacggaaggcgcccccaccccaactccacgggaatataaacaatttgtattttccgatcaggtggcgggacaggcttcattgggacagccctaacccagctgctgaatgccagaggccacgaagtgacgttggtctcccgaaagcccgggcccggccggatcacgtgggtaagtccatcctctggaagcgggtgggagggcagagttgggcggcgcagggcggggcaggggcactgtgtgctttctccgacaggatgagctcgctgcatcggggctgccgagctgcgatgccgccgtcaacctggccggagagaacatcctcaaccctctccgaagcttactaccagcccagtctgactgcggagtatgatgaagacagcccaggaggggactttgactttttctccaacctcgtaaccaaatgggaagctgcagccaggcttcctggagattctacacgccaggtggtggtgcgctcaggggttgtgctgggccgtgggggtggtgccatgggccacatgctgctgccctttcgcctgggcctggggggccccatcggctcaggccaccaattcttcccctggatacacatcggggacctggcaggaatcctgacccatgcccttgaagcaaaccacgtgcacggggtcctgaatggagtggctccatcctccgccactaatgctgagtttgcccagcgctgtggtgcaagctgtctttgggcgacagcgtgccatcatgctgctggagggccagaaggtgatcccacggcgaacactggccactggctaccagtattccttcccagagctaggggctgccttaaaggaaattgtagcctaagtaggtcatggcaagggcctgaggcctgttcctcacaggcttccaggttaggcactgtgaataggctcagctcctctagagagctgaagccatctggttcttagattcctctcccagtcctctttcccattgttctgttgctccaccttattgtctcaaggccgtaatctcatcaggttgggacattaatcttttcaactccttgtaagatttcccggtttggtttctctacatgtcctgcagctgccccacttctcctttacgctgtgtagagaatgctctgcagtttaggcaataaaaataaattgtc

SEQ ID NO: 367464 - DNA, 308 bp, Homo sapiens
atgaaaccttccaaaaagaggttctcggcagccgcctagagaccacccaattgctggctaaagccatcaccaaagccccacaaccccccaaggcctgggtcttagtcacaggtgtaggtacgccccccaaatcaccagccccttatattcgccaggggaacggggtaactcagacctctgtagctatgcacacaccagagcactggtcttttccaggcaaaatgacttcctaggcccttgatccatgcatgtttctcctaacctttgtgtactttcactaagaaattgagaccctgaaaaaacagtgg

SEQ ID NO: 367465 - DNA, 819 bp, Homo sapiens
agcggcttgcttcataaaaagagggacaagtggctggtgctgtggacagagaagctttatttttagtatgagacaacctctattttctttcaggagagggaagttggattatcaattcttttgtaaatgtgtatggtgatatttgctccgctttttgcaatctttgcatttgcaacatgcggtggctattctggaggcctgcggctgagtgtggactgcgtcaacaagacagaaagtaacctcagcatcgacatagcgtttgcctacccattcaggttgcaccaggtgacgtttgaggtgcccacctgcgagggaaaggaacggcagaagctggcattgattggtgactcctcgtcttcagcagagttcttcgtcactgttgctgtcttcgccttcctctactctttggctgccactgtcgtttacattttcttccagaacaaataccgggaaaacaaccggggcccactcattcagaaggttcagagtgtgggttgaaatccagagctcaattcataatcaccatgcaagaggcccaagatcctgatagccaatgtgctacagaagttagagaggtggagataggacttcattgtcactgtagtcttttcgttcttgtggttggtgggttcatcagcttgggcaaaaggactgtctgacgtcaaagttgcaacggatcccaaggaagtattgctactaatgtcagcttgcaaacagccatccaacaaatgcatggctatccacagccctgttatgtcaagcttaaacacttctgtgctttctgaaattcaatctgcgaaggcacttaagaagagagaa

SEQ ID NO: 367466 - DNA, 1348 bp, Homo sapiens
agcggcttgcttcataaaaagagggacaagtggctggtgctgtggacagagaagctttatttttagtatgagacaacctctattttctttcaggagagggaagttggattatcaattcttttgtaaatgtgtatggtgatatttgctccgctttttgcaatctttgcatttgcaacatgcggtggctattctggaggcctgcggctgagtgtggactgcgtcaacaagacagaaagtaacctcagcatcgacatagcgtttgcctacccattcaggttgcaccaggtgacgtttgaggtgcccacctgcgagggaaaggaacggcagaagctggcattgattggtgactcctcgtcttcagcagagttcttcgtcactgttgctgtcttcgccttcctctactctttggctgccactgtcgtttacattttcttccagaacaaataccgggaaaacaaccggggcccactcattgacttcattgtcactgtagtcttttcgttcttgtggttggtgggttcatcagcttgggcaaaaggactgtctgacgtcaaagttgcaacggatcccaaggaagtattgctactaatgtcagcttgcaaacagccatccaacaaatgcatggctatccacagccctgttatgtcaagcttaaacacttctgtggtctttggattcttgaactttattctctgggctggaaacatatggtttgttttcaaggagaccggctggcattcttcgggacagagatatctttcagatccaatggagaagcactccagcagctataatcaaggtggttacaaccaagacagctatggatcaagcagtgggtacagtcagcaggcgagtttggggccaacctcagatgagtttggccaacagcctactggccccacttcctttaccaatcagatttaacagagtagcatttgcattcttctgcagtcgcctcaccatcttccatttcagtggcagaagaattttttaagggtttcaatcaattattaatgcagagagtattgaatgtaaatcagagctctctagtcttcattaaggcagcaagtcctgggttgtgaaaaatgatacttagagatgaggcgacatgaggagatatattattcatcatagatggctaattggagagtaccttgttatatatacagatactttcatggtcattttgtatgtatgttaaagtagtagaagtattttgtagcttaaagtctctagtatgtaatatgcataaagtaaatcaaatagcgttgagttttcttatgcattttgatgtgaaagatgttataataatttctagaagacaatttggtgtatcacaacatgcatg

SEQ ID NO: 367467 - DNA, 1506 bp, Homo sapiens
ccctcgctgactcgcttcgcttccccgacgcgctgggttcccggagcgcagagcccagcgttagcgggtgggctccccgaggccccctgccctcgccgggctgctccagggtgtcgctcctctggctgctcccgaaggggcttctggccctgaggacggtggtgccaagcgaacttcatttttaaaaagaactggtggatgagaagagcgagcgagggcgagctatggaccctgtgagtcagctggcctctgcgggcaccttccgggtgctgaaggagccccttgccttcctgcgagccctggaattgctttttgcaatctttgcatttgcaacatgcggtggctattctggaggcctgcggctgagtgtggactgcgtcaacaagacagaaagtaacctcagcatcgacatagcgtttgcctacccattcaggttgcaccaggtgacgtttgaggtgcccacctgcgagggaaaggaacggcagaagctggcattgattggtgactcctcgtcttcagcagagttcttcgtcactgttgctgtcttcgccttcctctactctttggctgccactgtcgtttacattttcttccagaacaaataccgggaaaacaaccggggcccactcattgacttcattgtcactgtagtcttttcgttcttgtggttggtgggttcatcagcttgggcaaaaggactgtctgacgtcaaagttgcaacggatcccaaggaagtattgctactaatgtcagcttgcaaacagccatccaacaaatgcatggctatccacagccctgttatgtcaagcttaaacacttctgtggtctttggattcttgaactttattctctgggctggaaacatatggtttgttttcaaggagaccggctggcattcttcgggacagagatatctttcagatccaatggagaagcactccagcagctataatcaaggtggttacaaccaagacagctatggatcaagcagtgggtacagtcagcaggcgagtttggggccaacctcagatgagtttggccaacagcctactggccccacttcctttaccaatcagatttaacagagtagcatttgcattcttctgcagtcgcctcaccatcttccatttcagtggcagaagaattttttaagggtttcaatcaattattaatgcagagagtattgaatgtaaatcagagctctctagtcttcattaaggcagcaagtcctgggttgtgaaaaatgatacttagagatgaggcgacatgaggagatatattattcatcatagatggctaattggagagtaccttgttatatatacagatactttcatggtcattttgtatgtatgttaaagtagtagaagtattttgtagcttaaagtctctagtatgtaatatgcataaagtaaatcaaatagcgttgagttttcttatgcattttgatgtgaaagatgttataataatttctagaagacaatttggtgtatcacaacatgcatg

SEQ ID NO: 367468 - DNA, 1459 bp, Homo sapiens
agcggcttgcttcataaaaagagggacaagtggctggtgctgtggacagagaagctttatttttagtatgagacaacctctattttctttcaggagagggaagttggattatcaattcttttgtaaatgtgtatggtgatatttgctccgctttttgcaatctttgcatttgcaacatgcggtggctattctggaggcctgcggctgagtgtggactgcgtcaacaagacagaaagtaacctcagcatcgacatagcgtttgcctacccattcaggttgcaccaggtgacgtttgaggtgcccacctgcgagggaaaggaacggcagaagctggcattgattggtgactcctcgtcttcagcagagttcttcgtcactgttgctgtcttcgccttcctctactctttggctgccactgtcgtttacattttcttccagaacaaataccgggaaaacaaccggggcccactcattcagaaggttcagagtgtgggttgaaatccagagctcaattcataatcaccatgcaagaggcccaagatcctgatagccaatgtgctacagaagttagagaggtggagataggacttcattgtcactgtagtcttttcgttcttgtggttggtgggttcatcagcttgggcaaaaggactgtctgacgtcaaagttgcaacggatcccaaggaagtattgctactaatgtcagcttgcaaacagccatccaacaaatgcatggctatccacagccctgttatgtcaagcttaaacacttctgtggtctttggattcttgaactttattctctgggctggaaacatatggtttgttttcaaggagaccggctggcattcttcgggacagagatatctttcagatccaatggagaagcactccagcagctataatcaaggtggttacaaccaagacagctatggatcaagcagtgggtacagtcagcaggcgagtttggggccaacctcagatgagtttggccaacagcctactggccccacttcctttaccaatcagatttaacagagtagcatttgcattcttctgcagtcgcctcaccatcttccatttcagtggcagaagaattttttaagggtttcaatcaattattaatgcagagagtattgaatgtaaatcagagctctctagtcttcattaaggcagcaagtcctgggttgtgaaaaatgatacttagagatgaggcgacatgaggagatatattattcatcatagatggctaattggagagtaccttgttatatatacagatactttcatggtcattttgtatgtatgttaaagtagtagaagtattttgtagcttaaagtctctagtatgtaatatgcataaagtaaatcaaatagcgttgagttttcttatgcattttgatgtgaaagatgttataataatttctagaagacaatttggtgtatcacaacatgcatg

SEQ ID NO: 367469 - DNA, 1325 bp, Homo sapiens
agcggcttgcttcataaaaagagggacaagtggctggtgctgtggacagagaagctttatttttagtatgagacaacctctattttctttcaggagagggaagttggattatcaattcttttgtaaatgtgtatggtgatatttgctccgctttttgcaatctttgcatttgcaacatgcggtggctattctggaggcctgcggctgagtgtggactgcgtcaacaagacagaaagtaacctcagcatcgacatagcgtttgcctacccattcaggttgcaccaggtgacgtttgaggtgcccacctgcgagggaaaggaacggcagaagctggcattgattggtgactcctcgtcttcagcagagttcttcgtcactgttgctgtcttcgccttcctctactctttggctgccactgtcgtttacattttcttccagaacaaataccgggaaaacaaccggggcccactcattgacttcattgtcactgtagtcttttcgttcttgtggttggtgggttcatcagcttgggcaaaaggactgtctgacgtcaaagttgcaacggatcccaaggaagtattgctactaatgtcagcttgcaaacagccatccaacaaatgcatggctatccacagccctgttatgtcaagcttaaacacttctgtggtctttggattcttgaactttattctctgggctggaaacatatggtttgttttcaaggagaccggctggcattcttcgggacagagatatctttcagatccaatggagaagcactccagcagctataatcaaggtggttacaaccaagacagctatggatcaagcagtgggtacagtcagcaggcgagtttggggccaacctcagatgagtttggccaacagcctactggccccacttcctttaccaatcagatttaacagagtagcatttgcattcttctgcagtcgcctcaccatcttccatttcatttcaatcaattattaatgcagagagtattgaatgtaaatcagagctctctagtcttcattaaggcagcaagtcctgggttgtgaaaaatgatacttagagatgaggcgacatgaggagatatattattcatcatagatggctaattggagagtaccttgttatatatacagatactttcatggtcattttgtatgtatgttaaagtagtagaagtattttgtagcttaaagtctctagtatgtaatatgcataaagtaaatcaaatagcgttgagttttcttatgcattttgatgtgaaagatgttataataatttctagaagacaatttggtgtatcacaacatgcatg

SEQ ID NO: 367470 - DNA, 1388 bp, Homo sapiens
agcggcgtctccaagaagcaaagattcttggttctttgttgctttaagacaatttaggccaggttttccttagacaaggaaattgaaattaaaacagtagctctttttagtttttcaggcaatagagatcaaatttgggagcagtgggtgataacactgaggaatgttatctgagatgacaaattcatgactttttgcaatctttgcatttgcaacatgcggtggctattctggaggcctgcggctgagtgtggactgcgtcaacaagacagaaagtaacctcagcatcgacatagcgtttgcctacccattcaggttgcaccaggtgacgtttgaggtgcccacctgcgagggaaaggaacggcagaagctggcattgattggtgactcctcgtcttcagcagagttcttcgtcactgttgctgtcttcgccttcctctactctttggctgccactgtcgtttacattttcttccagaacaaataccgggaaaacaaccggggcccactcattgacttcattgtcactgtagtcttttcgttcttgtggttggtgggttcatcagcttgggcaaaaggactgtctgacgtcaaagttgcaacggatcccaaggaagtattgctactaatgtcagcttgcaaacagccatccaacaaatgcatggctatccacagccctgttatgtcaagcttaaacacttctgtggtctttggattcttgaactttattctctgggctggaaacatatggtttgttttcaaggagaccggctggcattcttcgggacagagatatctttcagatccaatggagaagcactccagcagctataatcaaggtggttacaaccaagacagctatggatcaagcagtgggtacagtcagcaggcgagtttggggccaacctcagatgagtttggccaacagcctactggccccacttcctttaccaatcagatttaacagagtagcatttgcattcttctgcagtcgcctcaccatcttccatttcagtggcagaagaattttttaagggtttcaatcaattattaatgcagagagtattgaatgtaaatcagagctctctagtcttcattaaggcagcaagtcctgggttgtgaaaaatgatacttagagatgaggcgacatgaggagatatattattcatcatagatggctaattggagagtaccttgttatatatacagatactttcatggtcattttgtatgtatgttaaagtagtagaagtattttgtagcttaaagtctctagtatgtaatatgcataaagtaaatcaaatagcgttgagttttcttatgcattttgatgtgaaagatgttataataatttctagaagacaatttggtgtatcacaacatgcatg

SEQ ID NO: 367471 - DNA, 1294 bp, Homo sapiens
agcggcttgcttcataaaaagagggacaagtggctggtgctgtggacagagaagctttatttttagtatgagacaacctctattttctttcaggagagggaagttggattatcaattcttttgtaaatgtgtatggtgatatttgctccgctttttgcaatctttgcatttgcaacatgcggtggctattctggaggcctgcggctgagtgtggactgcgtcaacaagacagaaagtaacctcagcatcgacatagcgtttgcctacccattcaggttgcaccaggtgacgtttgaggtgcccacctgcgagggaaaggaacggcagaagctggcattgattggtgactcctcgtcttcagcagagttcttcgtcactgttgctgtcttcgccttcctctactctttggctgccactgtcgtttacattttcttccagaacaaataccgggtgtggttggtgggttcatcagcttgggcaaaaggactgtctgacgtcaaagttgcaacggatcccaaggaagtattgctactaatgtcagcttgcaaacagccatccaacaaatgcatggctatccacagccctgttatgtcaagcttaaacacttctgtggtctttggattcttgaactttattctctgggctggaaacatatggtttgttttcaaggagaccggctggcattcttcgggacagagatatctttcagatccaatggagaagcactccagcagctataatcaaggtggttacaaccaagacagctatggatcaagcagtgggtacagtcagcaggcgagtttggggccaacctcagatgagtttggccaacagcctactggccccacttcctttaccaatcagatttaacagagtagcatttgcattcttctgcagtcgcctcaccatcttccatttcagtggcagaagaattttttaagggtttcaatcaattattaatgcagagagtattgaatgtaaatcagagctctctagtcttcattaaggcagcaagtcctgggttgtgaaaaatgatacttagagatgaggcgacatgaggagatatattattcatcatagatggctaattggagagtaccttgttatatatacagatactttcatggtcattttgtatgtatgttaaagtagtagaagtattttgtagcttaaagtctctagtatgtaatatgcataaagtaaatcaaatagcgttgagttttcttatgcattttgatgtgaaagatgttataataatttctagaagacaatttggtgtatcacaacatgcatg

SEQ ID NO: 367472 - DNA, 969 bp, Homo sapiens
cgtagtccagttactttcaggctcggggagtgaaggcctcgttgagagaaggtctcattcggtgttttgggaagagagtcgtgtgggcccaggtctgtctgctatcagctatgccgctgcccgttgcgctgcagacccgcttggccaagagaggcatcctcaaacatctggagcctgaaccagaggaagagatcattgccgaggactatgacgatgatcctgtggactacgaggccaccaggttggagggcctaccaccaagctggtacaaggtgttcgacccttcctgcgggctcccttactactggaatgcagacacagaccttgtatcctggctctccccacatgaccccaactccgtggttaccaaatcggccaagaagctcagaagcagtaatgcagatgctgaagaaaagttggaccggagccatgacaagtcggacaggggccatgacaagtcggaccgcagccatgagaaactagacaggggccacgacaagtcagaccggggccacgacaagtctgacagggatcgagagcgtggctatgacaaggtagacagagagagagagcgagacagggaacgggatcgggaccgcgggtatgacaaggcagaccgggaagagggcaaagaacggcgccaccatcgccgggaggagctggctccctatcccaagagcaagaaggcagtaagccgaaaggatgaagagttagaccccatggaccctagctcatactcagacgccccccggggcacgtggtcaacaggactccccaagcggaatgaggccaagactggcgctgacaccacagcagctgggcccctcttccagcagcggccgtatccatccccaggggctgtgctccgggccaatgcagaggcctcccgaaccaagcagcaggattgaagcttcggcctccctggccctgggttaaaataaaagctttctggtgatcctgcccaccata

SEQ ID NO: 367473 - DNA, 1037 bp, Homo sapiens
cgtagtccagttactttcaggctcggggagtgaaggcctcgttgagagaaggtctcattcggtgttttgggaagagagtcgtgtgggcccaggtatcgtagcggcgacacgagagagacgggcggtgtgacagccttccactacctgcacgagtgtattggtctgtctgctatcagctatgccgctgcccgttgcgctgcagacccgcttggccaagagaggcatcctcaaacatctggagcctgaaccagaggaagagatcattgccgaggactatgacgatgatcctgtggactacgaggccaccaggttggagggcctaccaccaagctggtacaaggtgttcgacccttcctgcgggctcccttactactggaatgcagacacagaccttgtatcctggctctccccacatgaccccaactccgtggttaccaaatcggccaagaagctcagaagcagtaatgcagatgctgaagaaaagttggaccggagccatgacaagtcggacaggggccatgacaagtcggaccgcagccatgagaaactagacaggggccacgacaagtcagaccggggccacgacaagtctgacagggatcgagagcgtggctatgacaaggtagacagagagagagagcgagacagggaacgggatcgggaccgcgggtatgacaaggcagaccgggaagagggcaaagaacggcgccaccatcgccgggaggagctggctccctatcccaagagcaagaaggcagtaagccgaaaggatgaagagttagaccccatggaccctagctcatactcagacgccccccggggcacgtggtcaacaggactccccaagcggaatgaggccaagactggcgctgacaccacagcagctgggcccctcttccagcagcggccgtatccatccccaggggctgtgctccgggccaatgcagaggcctcccgaaccaagcagcaggattgaagcttcggcctccctggccctgggttaaaataaaagctttctggtgatcctgcccaccata

SEQ ID NO: 367474 - DNA, 958 bp, Homo sapiens
  misc_feature (883)..(883): n is a, c, g, or t
  misc_feature (899)..(899): n is a, c, g, or t
ttaggccagtagaggctggggtgaaatcggccgaggcgttgagagaaggtctcattcggtgttttgggaagagagtcgtgtgggcccaggtatcgtagcggcgacacgagagagacgggcggtgtgacagccttccactacctgcacgagtgtattggtctgtctgctatcagctatgccgctgcccgttgcgctgcagacccgcttggccaagagaggcatcctcaaacatctggagcctgaaccagaggaagagatcattgccgaggactatgacgatgatcctgtggactacgaggccaccaggttggagggcctaccaccaagctggtacaaggtgttcgacccttcctgcgggctcccttactactggaatgcagacacagaccttgtatcctggctctccccacatgaccccaactccgtggttaccaaatcggccaagaagctcagaagcagtaatgcagatgctgaagaaaagttggaccggagccatgacaagtcggacaggggccatgacaagtcggaccgcagccatgagaaactagacaggggccacgacaagtcagaccggggccacgacaagtctgacagggatcgagagcgtggctatgacaaggtagacagagagagagagcgagacagggaacgggatcgggaccgcgggtatgacaaggcagaccgggaagagggcaaagaacggcgccaccatcgccgggaggagctggctccctatcccaagagcaagaaggcagtaagccgaaaggatgaagagttagaccccatggaccctagctcatactcagacgccccccgcacgggtcacaggactcccaagggatgaggccagatgggctgaacacagagtgggcctcttcagagnggcgacatcccggggnccggcatgggagcctcgaacagcgggtagagtggccggcggtaaaaaatggggcggccc

SEQ ID NO: 367475 - DNA, 613 bp, Homo sapiens
tttggcctcctaaagtgctgggattacaggcatgagccatcacgcctggccaagatgagtaaattttttgatgaatccctatcaactctgaaaccagatagctttggctaacagtagaactcatcatctgaacccagacacagatttaggtaacctttttttgtaaacctcctaatatagagagttggatttggaatgtgaaagatacttcatattcttcccggcacacacacacacgtgtcttttatgtgtggcttgtgtgaatgtgagtgcgtgtctctaggctctacatgtaggatgaggtcccctggtccttatctgctctcctcatccccaccttgttctaccagaaccagaggaagagatcattgccgaggactatgacgatgatcctgtggactacgaggccaccaggttggagggcctaccaccaagctggtacaaggtgttcgacccttcctggtgagcctgggtgagggggagctaacttctggcttcacccttcctgtgctgaccttggttgtgaggtttagggggacacaagggagggagcctcgggtggagggtgttggcattaggtatctgcaggactcaagttgctgcctgctggggc

SEQ ID NO: 367476 - DNA, 1445 bp, Homo sapiens
cgtagtccagttactttcaggctcggggagtgaaggcctcgttgagagaaggtctcattcggtgttttgggaagagagtcgtgtgggcccaggtatcgtagcggcgacacgagagagacgggcggtgtgacagccttccactacctgcacgagtgtattgtaacgttggggtgggtgcactcttttggagctggaggaagtgctgccctctgctcccccatcccagcgctttggtttctcccacccggcagtcatggggacgctggatgagcccatttctgaagtgcggaggggccgggcttcttaggctgtgggcggagcctgggcctgggagaggaacagggccctggagcacctggtttcggggacagtagggttggtgggagttgcgatgatattgccacctacctcttacatcttttagtgcgtatgttctgtccacccagctactggttcatttgagtagatcggagtcagatgagtacatgtttacgggaggcgcttggttacgggatccagataggaatctttatctgagctgcttgtcagtttgttcgtctgtccctaggtctgtctgctatcagctatgccgctgcccgttgcgctgcagacccgcttggccaagagaggcatcctcaaacatctggagcctgaaccagaggaagagatcattgccgaggactatgacgatgatcctgtggactacgaggccaccaggttggagggcctaccaccaagctggtacaaggtgttcgacccttcctgcgggctcccttactactggaatgcagacacagaccttgtatcctggctctccccacatgaccccaactccgtggttaccaaatcggccaagaagctcagaagcagtaatgcagatgctgaagaaaagttggaccggagccatgacaagtcggacaggggccatgacaagtcggaccgcagccatgagaaactagacaggggccacgacaagtcagaccggggccacgacaagtctgacagggatcgagagcgtggctatgacaaggtagacagagagagagagcgagacagggaacgggatcgggaccgcgggtatgacaaggcagaccgggaagagggcaaagaacggcgccaccatcgccgggaggagctggctccctatcccaagagcaagaaggcagtaagccgaaaggatgaagagttagaccccatggaccctagctcatactcagacgccccccggggcacgtggtcaacaggactccccaagcggaatgaggccaagactggcgctgacaccacagcagctgggcccctcttccagcagcggccgtatccatccccaggggctgtgctccgggccaatgcagaggcctcccgaaccaagcagcaggattgaagcttcggcctccctggccctgggttaaaataaaagctttctggtgatcctgcccaccata

SEQ ID NO: 367477 - DNA, 1300 bp, Homo sapiens
cgtagtccagttactttcaggctcggggagtgaaggcctcgttgagagaaggtctcattcggtgttttgggaagagagtcgtgtgggcccaggtatcgtagcggcgacacgagagagacgggcggtgtgacagccttccactacctgcacgagtgtattgtaacgttggggtgggtgcactcttttggagctggaggaagtgctgccctctgctcccccatcccagcgctttggtttctcccacccggcagtcatggggacgctggatgagcccatttctgaagtgcggaggggccgggcttcttaggctgtgggcggagcctgggcctgggagaggaacagggccctggagcacctggtttcggggacagtagggttggtgggagttgcgatgatattgccacctacctcttacatcttttagtctgtctgctatcagctatgccgctgcccgttgcgctgcagacccgcttggccaagagaggcatcctcaaacatctggagcctgaaccagaggaagagatcattgccgaggactatgacgatgatcctgtggactacgaggccaccaggttggagggcctaccaccaagctggtacaaggtgttcgacccttcctgcgggctcccttactactggaatgcagacacagaccttgtatcctggctctccccacatgaccccaactccgtggttaccaaatcggccaagaagctcagaagcagtaatgcagatgctgaagaaaagttggaccggagccatgacaagtcggacaggggccatgacaagtcggaccgcagccatgagaaactagacaggggccacgacaagtcagaccggggccacgacaagtctgacagggatcgagagcgtggctatgacaaggtagacagagagagagagcgagacagggaacgggatcgggaccgcgggtatgacaaggcagaccgggaagagggcaaagaacggcgccaccatcgccgggaggagctggctccctatcccaagagcaagaaggcagtaagccgaaaggatgaagagttagaccccatggaccctagctcatactcagacgccccccggggcacgtggtcaacaggactccccaagcggaatgaggccaagactggcgctgacaccacagcagctgggcccctcttccagcagcggccgtatccatccccaggggctgtgctccgggccaatgcagaggcctcccgaaccaagcagcaggattgaagcttcggcctccctggccctgggttaaaataaaagctttctggtgatcctgcccaccata

SEQ ID NO: 367478 - DNA, 1251 bp, Homo sapiens
cgtagtccagttactttcaggctcggggagtgaaggcctcgttgagagaaggtctcattcggtgttttgggaagagagtcgtgtgggcccaggtatcgtagcggcgacacgagagagacgggcggtgtgacagccttccactacctgcacgagtgtattggtctgtctgctatcagctatgccgctgcccgttgcgctgcagacccgcttggccaagagaggcatcctcaaacatctggagcctgaaccagaggaagagatcattgccgaggactatgacgatgatcctgtggactacgaggccaccaggttggagggcctaccaccaagctggtacaaggtgttcgacccttcctgcgggctcccttactactggaatgcagacacagaccttgtatcctggctctccccacatgaccccaactccgtggttaccaaatcggccaagaagctcagaagcagtaatgcagatgctgaagaaaagttggaccggagccatgacaagtcggacaggggccatgacaagtcggaccgcagccatgagaaactagacaggggccacgacaagtcagaccggggccacgacaagtctgacagggatcgagagcgtggctatgacaaggtagacagagagagagagcgagacagggaacgggatcgggaccgcgggtatgacaaggcagaccgggaagagggcaaagaacggcgccaccatcgccgggaggagctggctccctatcccaagagcaagaagggtaagctgggcagaatggggctcggtgagaccaacaaggtgcagggtgcactgcgtgaggaagccttccctcaaaaagatgcctggacctggggctagaggagggtgctgtggtacatggcagccaggggcttcatttcttcttgtggggtggggctcagtgatcaggggctcctggtgcctctattgaagactttgccctgccacttccacagcagtaagccgaaaggatgaagagttagaccccatggaccctagctcatactcagacgccccccggggcacgtggtcaacaggactccccaagcggaatgaggccaagactggcgctgacaccacagcagctgggcccctcttccagcagcggccgtatccatccccaggggctgtgctccgggccaatgcagaggcctcccgaaccaagcagcaggattgaagcttcggcctccctggccctgggttaaaataaaagctttctggtgatcctgcccaccata

SEQ ID NO: 367479 - DNA, 1383 bp, Homo sapiens
cgtagtccagttactttcaggctcggggagtgaaggcctcgttgagagaaggtctcattcggtgttttgggaagagagtcgtgtgggcccaggtatcgtagcggcgacacgagagagacgggcggtgtgacagccttccactacctgcacgagtgtattggtctgtctgctatcagctatgccgctgcccgttgcgctgcagacccgcttggccaagagaggcatcctcaaacatctggagcctgaaccagaggaagagatcattgccgaggactatgacgatgatcctgtggactacgaggccaccaggttggagggcctaccaccaagctggtacaaggtgttcgacccttcctgcgggctcccttactactggaatgcagacacagaccttgtatcctggctctccccacatgaccccaactccgtggttaccaaatcggccaagaagctcagaagcagtaatgcagatgctgaagaaaagttggaccggagccatgacaagtcggacaggggccatgacaagtcggaccgcagccatgagaaactagacaggggccacgacaagtcagaccggggccacgacaagtctgacagggatcgagagcgtggctatgacaaggtagacagagagagagagcgagacagggaacgggatcgggaccgcgggtatgacaaggcagaccgggaagagggcaaagaacggcgccaccatcgccgggaggagctggctccctatcccaagagcaagaagggtaagctgggcagaatggggctcggtgagaccaacaaggtgcagggtgcactgcgtgaggaagccttccctcaaaaagatgcctggacctggggctagaggagggtgctgtggtacatggcagccaggggcttcatttcttcttgtggggtggggctcagtgatcaggggctcctggtgcctctattgaagactttgccctgccacttccacagcagtaagccgaaaggatgaagagttagaccccatggaccctagctcatactcagacgccccccggtaagtgacaacccctcttgactcagtacgtggacaccatcctccggcctccttcctccattcctcattgggaccaggtgggctgtgtccgccacatcacccatccccatcccctgactctttcaccggcaggggcacgtggtcaacaggactccccaagcggaatgaggccaagactggcgctgacaccacagcagctgggcccctcttccagcagcggccgtatccatccccaggggctgtgctccgggccaatgcagaggcctcccgaaccaagcagcaggattgaagcttcggcctccctggccctgggttaaaataaaagctttctggtgatcctgcccaccata

SEQ ID NO: 367480 - DNA, 989 bp, Homo sapiens
cgtagtccagttactttcaggctcggggagtgaaggcctcgttgagagaaggtctcattcggtgttttgggaagagagtcgtgtgggcccaggtatcgtagcggcgacacgagagagacgggcggtgtgacagccttccactacctgcacgagtgtattggtctgtctgctatcagctatgccgctgcccgttgcgctgcagacccgcttggccaagagaggcatcctcaaacatctggagcctgaaccagaggaagagatcattgccgaggactatgacgatgatcctgtggactacgaggccaccagcgggctcccttactactggaatgcagacacagaccttgtatcctggctctccccacatgaccccaactccgtggttaccaaatcggccaagaagctcagaagcagtaatgcagatgctgaagaaaagttggaccggagccatgacaagtcggacaggggccatgacaagtcggaccgcagccatgagaaactagacaggggccacgacaagtcagaccggggccacgacaagtctgacagggatcgagagcgtggctatgacaaggtagacagagagagagagcgagacagggaacgggatcgggaccgcgggtatgacaaggcagaccgggaagagggcaaagaacggcgccaccatcgccgggaggagctggctccctatcccaagagcaagaaggcagtaagccgaaaggatgaagagttagaccccatggaccctagctcatactcagacgccccccggggcacgtggtcaacaggactccccaagcggaatgaggccaagactggcgctgacaccacagcagctgggcccctcttccagcagcggccgtatccatccccaggggctgtgctccgggccaatgcagaggcctcccgaaccaagcagcaggattgaagcttcggcctccctggccctgggttaaaataaaagctttctggtgatcctgcccaccata

SEQ ID NO: 367481 - DNA, 1011 bp, Homo sapiens
cgtagtccagttactttcaggctcggggagtgaaggcctcgttgagagaaggtctcattcggtgttttgggaagagagtcgtgtgggcccaggtatcgtagcggcgacacgagagagacgggcggtgtgacagccttccactacctgcacgagtgtattggtctgtctgctatcagctatgccgctgcccgttgcgctgcagacccgcttggccaagagaggcatcctcaaacatctggagcctgaaccagaggaagagatcattgccgaggactatgacgatgatcctgtggactacgaggccaccaggttggagggcctaccaccaagctggtacaaggtgttcgacccttcctgcgggctcccttactactggaatgcagacacagaccttgtatcctggctctccccacatgaccccaactccgtggttaccaaatcggccaagaagctcagaagcagtaatgcagatgctgaagaaaagttggaccggagccatgacaagtcggacaggggccatgacaagtcggaccgcagccatgagaaactagacaggggccacgacaagtcagaccggggccacgacaagtctgacagggatcgagagcgtggctagagacagggaacgggatcgggaccgcgggtatgacaaggcagaccgggaagagggcaaagaacggcgccaccatcgccgggaggagctggctccctatcccaagagcaagaaggcagtaagccgaaaggatgaagagttagaccccatggaccctagctcatactcagacgccccccggggcacgtggtcaacaggactccccaagcggaatgaggccaagactggcgctgacaccacagcagctgggcccctcttccagcagcggccgtatccatccccaggggctgtgctccgggccaatgcagaggcctcccgaaccaagcagcaggattgaagcttcggcctccctggccctgggttaaaataaaagctttctggtgatcctgcccaccata

SEQ ID NO: 367482 - DNA, 897 bp, Homo sapiens
cgtagtccagttactttcaggctcggggagtgaaggcctcgttgagagaaggtctcattcggtgttttgggaagagagtcgtgtgggcccaggtatcgtagcggcgacacgagagagacgggcggtgtgacagccttccactacctgcacgagtgtattggtctgtctgctatcagctatgccgctgcccgttgcgctgcagacccgcttggccaagagaggcatcctcaaacatctggagcctgaaccagaggaagagatcattgccgaggactatgacgatgatcctgtggactacgaggccaccaggttggagggcctaccaccaagctggtacaaggtgttcgacccttcctgcgggctcccttactactggaatgcagacacagaccttgtatcctggctctccccacatgaccccaactccgtggttaccaaatcggccaagaagctcagaagcagtaatgcagatgctgaagaaaagttggaccggagccatgacaagtcggacaggggccatgacaagtcggaccgcagccatgagaaactagacaggggccacgacaagtcagaccggggccacgacaagtctgacagggatcgagagcgtggctacagtaagccgaaaggatgaagagttagaccccatggaccctagctcatactcagacgccccccggggcacgtggtcaacaggactccccaagcggaatgaggccaagactggcgctgacaccacagcagctgggcccctcttccagcagcggccgtatccatccccaggggctgtgctccgggccaatgcagaggcctcccgaaccaagcagcaggattgaagcttcggcctccctggccctgggttaaaataaaagctttctggtgatcctgcccaccata

SEQ ID NO: 367483 - DNA, 369 bp, Homo sapiens
tccgtgttgcgaagatgcttgtgccggagcacagccccttgggatggatacggccgctgctggaagaggggcccagctgctgtggtgcagtaagccgaaaggatgaagagttagaccccatggaccctagctcatactcagacgccccccggggcacgtggtcaacaggactccccaagcggaatgaggccaagactggcgctgacaccacagcagctgggcccctcttccagcagcggccgtatccatccccaggggctgtgctccgggccaatgcagaggcctcccgaaccaagcagcaggattgaagcttcggcctccctggccctgggttaaaataaaagctttctggtgatcctgcccaccata

SEQ ID NO: 367484 - DNA, 953 bp, Homo sapiens
  misc_feature (878)..(878): n is a, c, g, or t
  misc_feature (894)..(894): n is a, c, g, or t
cgtagtccagttactttcaggctcggggagtgaaggcctcgttgagagaaggtctcattcggtgttttgggaagagagtcgtgtgggcccaggtatcgtagcggcgacacgagagagacgggcggtgtgacagccttccactacctgcacgagtgtattggtctgtctgctatcagctatgccgctgcccgttgcgctgcagacccgcttggccaagagaggcatcctcaaacatctggagcctgaaccagaggaagagatcattgccgaggactatgacgatgatcctgtggactacgaggccaccaggttggagggcctaccaccaagctggtacaaggtgttcgacccttcctgcgggctcccttactactggaatgcagacacagaccttgtatcctggctctccccacatgaccccaactccgtggttaccaaatcggccaagaagctcagaagcagtaatgcagatgctgaagaaaagttggaccggagccatgacaagtcggacaggggccatgacaagtcggaccgcagccatgagaaactagacaggggccacgacaagtcagaccggggccacgacaagtctgacagggatcgagagcgtggctatgacaaggtagacagagagagagagcgagacagggaacgggatcgggaccgcgggtatgacaaggcagaccgggaagagggcaaagaacggcgccaccatcgccgggaggagctggctccctatcccaagagcaagaaggcgaaggtgaagagttgaccccatgcaccttagcttcatataaagacgcccccggggcacgggtcacaggactcccaagggatgaggccagatgggctgaacacagagtgggcctcttcagagnggcgacatcccggggnccggcatgggagcctcgaacagcgggtagagtggccggcggtaaaaaatggggcggccc

SEQ ID NO: 367485 - DNA, 684 bp, Homo sapiens
cgtagtccagttactttcaggctcggggagtgaaggcctcgttgagagaaggtctcattcggtgttttgggaagagagtcgtgtgggcccaggtctgtctgctatcagctatgccgctgcccgttgcgctgcagacccgcttggccaagagaggcatcctcaaacatctggagcctgaaccagaggaagagatcattgccgaggactatgacgatgatcctgtggactacgaggccaccaggttggagggcctaccaccaagctggtacaaggtgttcgacccttcctgcgggctcccttactactggaatgcagacacagaccttgtatcctggctctccccacatgaccccaactccgtggttaccaaatcggccaagaagctcagaagcagtaatgcagcagtaagccgaaaggatgaagagttagaccccatggaccctagctcatactcagacgccccccggggcacgtggtcaacaggactccccaagcggaatgaggccaagactggcgctgacaccacagcagctgggcccctcttccagcagcggccgtatccatccccaggggctgtgctccgggccaatgcagaggcctcccgaaccaagcagcaggattgaagcttcggcctccctggccctgggttaaaataaaagctttctggtgatcctgcccaccata

SEQ ID NO: 367486 - DNA, 1224 bp, Homo sapiens
cgtagtccagttactttcaggctcggggagtgaaggcctcgttgagagaaggtctcattcggtgttttgggaagagagtcgtgtgggcccaggtatcgtagcggcgacacgagagagacgggcggtgtgacagccttccactacctgcacgagtgtattggtctgtctgctatcagctatgccgctgcccgttgcgctgcagacccgcttggccaagagaggcatcctcaaacatctggagcctgaaccagaggaagagatcattgccgaggactatgacgatgatcctgtggactacgaggccaccaggttggagggcctaccaccaagctggtacaaggtgttcgacccttcctgcgggctcccttactactggaatgcagacacagaccttgtatcctggctctccccacatgaccccaactccgtggttaccaaatcggccaagaagctcagaagcagtaatgcagatgctgaagaaaagttggaccggagccatgacaagtcggacaggggccatgacaagtcggaccgcagccatgagaaactagacaggggccacgacaagtcagaccggggccacgacaagtctgacagggatcgagagcgtggctatgacaaggtagacagagagagagagcgagacagggaacgggatcgggaccgcgggtatgacaaggcagaccgggaagagggcaaagaacggcgccaccatcgccgggaggagctggctccctatcccaagagcaagaaggcagtaagccgaaaggatgaagagttagaccccatggaccctagctcatactcagacgccccccggggcacgtggtcaacaggactccccaagcggaatgaggccaagactggcgctgacaccacagcagctgggcccctcttccagcagcggccgtatccatccccaggggctgtgctccgggccaatgcagaggcctcccgaaccaagcagcaggattgaagcttcggcctccctggccctgggttaaaataaaagctttctggtgatcctgcccaccataaaagagtgcttcctttgaggctgcccaacccaagtcggcaagatacacaacacattttatttgcaaaaactcagctaagagatagtgtggagctggcaggggctggggggctgagctgaggtgggtcatgagagagcttagtcatgttggccctgggtggggcaggggtggtggggacagggagtcc

SEQ ID NO: 367487 - DNA, 961 bp, Homo sapiens
  misc_feature (886)..(886): n is a, c, g, or t
  misc_feature (902)..(902): n is a, c, g, or t
cgtagtccagttactttcaggctcggggagtgaaggcctcgttgagagaaggtctcattcggtgttttgggaagagagtcgtgtgggcccaggtatcgtagcggcgacacgagagagacgggcggtgtgacagccttccactacctgcacgagtgtattggtctgtctgctatcagctatgccgctgcccgttgcgctgcagacccgcttggccaagagaggcatcctcaaacatctggagcctgaaccagaggaagagatcattgccgaggactatgacgatgatcctgtggactacgaggccaccaggttggagggcctaccaccaagctggtacaaggtgttcgacccttcctgcgggctcccttactactggaatgcagacacagaccttgtatcctggctctccccacatgaccccaactccgtggttaccaaatcggccaagaagctcagaagcagtaatgcagatgctgaagaaaagttggaccggagccatgacaagtcggacaggggccatgacaagtcggaccgcagccatgagaaactagacaggggccacgacaagtcagaccggggccacgacaagtctgacagggatcgagagcgtggctatgacaaggtagacagagagagagagcgagacagggaacgggatcgggaccgcgggtatgacaaggcagaccgggaagagggcaaagaacggcgccaccatcgccgggaggagctggctccctatcccaagagcaagaaggcagtaagccgaaaggatgaagagttagaccccatggaccctagctcatactcagacgccccccgcacgggtcacaggactcccaagggatgaggccagatgggctgaacacagagtgggcctcttcagagnggcgacatcccggggnccggcatgggagcctcgaacagcgggtagagtggccggcggtaaaaaatggggcggccc

SEQ ID NO: 367488 - DNA, 1438 bp, Homo sapiens
cgtagtccagttactttcaggctcggggagtgaaggcctcgttgagagaaggtctcattcggtgttttgggaagagagtcgtgtgggcccaggtatcgtagcggcgacacgagagagacgggcggtgtgacagccttccactacctgcacgagtgtattggtctgtctgctatcagctatgccgctgcccgttgcgctgcagacccgcttggccaagagaggcatcctcaaacatctggagcctgaaccagaggaagagatcattgccgaggactatgacgatgatcctgtggactacgaggccaccaggttggagggcctaccaccaagctggtacaaggtgttcgacccttcctgcgggctcccttactactggaatgcagacacagaccttgtatcctggctctccccacatgaccccaactccgtggttaccaaatcggccaagaagctcagaagcagtaatgcagatgctgaagaaaagttggaccggagccatgacaagtcggacaggggccatgacaagtcggaccgcagccatgagaaactagacaggggccacgacaagtcagaccggggccacgacaagtctgacagggatcgagagcgtggctatgacaaggtagacagagagagagagcgagacagggaacgggatcgggaccgcgggtatgacaaggcagaccgggaagagggcaaagaacggcgccaccatcgccgggaggagctggctccctatcccaagagcaagaagggtaagctgggcagaatggggctcggtgagaccaacaaggtgcagggtgcactgcgtgaggaagccttccctcaaaaagatgcctggacctggggctagaggagggtgctgtggtacatggcagccaggggcttcatttcttcttgtggggtggggctcagtgatcaggggctcctggtgcctctattgaagactttgccctgccacttccacagcagtaagccgaaaggatgaagagttagaccccatggaccctagctcatactcagacgccccccggggcacgtggtcaacaggactccccaagcggaatgaggccaagactggcgctgacaccacagcagctgggcccctcttccagcagcggccgtatccatccccaggggctgtgctccgggccaatgcagaggcctcccgaaccaagcagcaggattgaagcttcggcctccctggccctgggttaaaataaaagctttctggtgatcctgcccaccataaaagagtgcttcctttgaggctgcccaacccaagtcggcaagatacacaacacattttatttgcaaaaactcagctaagagatagtgtggagctggcaggggctggggggctgagctgaggtgggtcatgagagagcttagtcatgttggccctgggtggggcaggggtggtggggacagggagtcc

SEQ ID NO: 367489 - DNA, 880 bp, Homo sapiens
cgtagtccagttactttcaggctcggggagtgaaggcctcgttgagagaaggtctcattcggtgttttgggaagagagtcgtgtgggcccaggtatcgtagcggcgacacgagagagacgggcggtgtgacagccttccactacctgcacgagtgtattggtctgtctgctatcagctatgccgctgcccgttgcgctgcagacccgcttggccaagagaggcatcctcaaacatctggagcctgaaccagaggaagagatcattgccgaggactatgacgatgatcctgtggactacgaggccaccaggttggagggcctaccaccaagctggtacaaggtgttcgacccttcctgcgggctcccttactactggaatgcagacacagaccttgtatcctggctctccccacatgaccccaactccgtggttaccaaatcggccaagaagctcagaagcagtaatgcagatgctgaagaaaagttggaccggagccatgacaagtcggacaggggccatgacaagtcggaccgcagccatgagaaactagacaggggccacgacaagtcagaccggggccacgacaagtctgacagggatcgagagcgtggctatgacaaggtagacagagagagagagcgagacagggaacgggatcgggaccgcgggtatgacaaggcagaccgggaagagggcaaagaacggcgccaccatcgccgggaggagctggctccctatcccaagagcaagaagggtaagctgggcagaatggggctcggtgagaccaacaaggtgcagggtgcactgcgtgaggaagccttccctcaaaaagatgccctgggttaaaataaaagctttctggtgatcctgcccaccata

SEQ ID NO: 367490 - DNA, 752 bp, Homo sapiens
cgtagtccagttactttcaggctcggggagtgaaggcctcgttgagagaaggtctcattcggtgttttgggaagagagtcgtgtgggcccaggtatcgtagcggcgacacgagagagacgggcggtgtgacagccttccactacctgcacgagtgtattggtctgtctgctatcagctatgccgctgcccgttgcgctgcagacccgcttggccaagagaggcatcctcaaacatctggagcctgaaccagaggaagagatcattgccgaggactatgacgatgatcctgtggactacgaggccaccaggttggagggcctaccaccaagctggtacaaggtgttcgacccttcctgcgggctcccttactactggaatgcagacacagaccttgtatcctggctctccccacatgaccccaactccgtggttaccaaatcggccaagaagctcagaagcagtaatgcagcagtaagccgaaaggatgaagagttagaccccatggaccctagctcatactcagacgccccccggggcacgtggtcaacaggactccccaagcggaatgaggccaagactggcgctgacaccacagcagctgggcccctcttccagcagcggccgtatccatccccaggggctgtgctccgggccaatgcagaggcctcccgaaccaagcagcaggattgaagcttcggcctccctggccctgggttaaaataaaagctttctggtgatcctgcccaccata

SEQ ID NO: 367491 - DNA, 438 bp, Homo sapiens
atttcattccctgtgctgagcctcctttcagtttcctcttcctacctatgtctcagctgaaaacttaagaccactcaccctacagccaatggttccaccttctgcagctgtcgtctaaattccaaatgcagccatgtcaaggcacctgcacatggcagctgtaaaagaaacactggcactttactgctgagaggaaaggtagtgccattttttgagcatcggttccctcccagagaggatgacagctggcaactctgtcctacagaaaataggaaagcaagagaaacatatacagaaatgcctacatatgatgtcactcggtagccacagccctaaaagtatcccagaaagagggcaaattagctgtaaagctaaagcaaaaaattttcctgaacagtatttggttacaaggacaaataaagttcatttatattcatt

SEQ ID NO: 367492 - DNA, 3530 bp, Homo sapiens
agagaagcctggcaaccaagaactgtttttttggtggtttacgagaacttaactgaattggaaaatatttgctttaatgaaacaatttactcttgtgcaacactaaattgtgtcaatcaagcaaataaggaagaaagtcttatttataaaattgcctgctcctgattttacttcatttcttctcaggctccaagaaggggaaaaaaatgaagattttgatacttggtatttttctgtttttatgtagtaccccagcctgggcgaaagaaaagcattattacattggaattattgaaacgacttgggattatgcctctgaccatggggaaaagaaacttatttctgttgacacggaacattccaatatctatcttcaaaatggcccagatagaattgggagactatataagaaggccctttatcttcagtacacagatgaaacctttaggacaactatagaaaaaccggtctggcttgggtttttaggccctattatcaaagctgaaactggagataaagtttatgtacacttaaaaaaccttgcctctaggccctacacctttcattcacatggaataacttactataaggaacatgagggggccatctaccctgataacaccacagattttcaaagagcagatgacaaagtatatccaggagagcagtatacatacatgttgcttgccactgaagaacaaagtcctggggaaggagatggcaattgtgtgactaggatttaccattcccacattgatgctccaaaagatattgcctcaggactcatcggacctttaataatctgtaaaaaagattctctagataaagaaaaagaaaaacatattgaccgagaatttgtggtgatgttttctgtggtggatgaaaatttcagctggtacctagaagacaacattaaaacctactgctcagaaccagagaaagttgacaaagacaacgaagacttccaggagagtaacagaatgtattctgtgaatggatacacttttggaagtctcccaggactctccatgtgtgctgaagacagagtaaaatggtacctttttggtatgggtaatgaagttgatgtgcacgcagctttctttcacgggcaagcactgactaacaagaactaccgtattgacacaatcaacctctttcctgctaccctgtttgatgcttatatggtggcccagaaccctggagaatggatgctcagctgtcagaatctaaaccatctgaaagccggtttgcaagcctttttccaggtccaggagtgtaacaagtcttcatcaaaggataatatccgtgggaagcatgttagacactactacattgccgctgaggaaatcatctggaactatgctccctctggtatagacatcttcactaaagaaaacttaacagcacctggaagtgactcagcggtgttttttgaacaaggtaccacaagaattggaggctcttataaaaagctggtttatcgtgagtacacagatgcctccttcacaaatcgaaaggagagaggccctgaagaagagcatcttggcatcctgggtcctgtcatttgggcagaggtgggagacaccatcagagtaaccttccataacaaaggagcatatcccctcagtattgagccgattggggtgagattcaataagaacaacgagggcacatactattccccaaattacaacccccagagcagaagtgtgcctccttcagcctcccatgtggcacccacagaaacattcacctatgaatggactgtccccaaagaagtaggacccactaatgcagatcctgtgtgtctagctaagatgtattattctgctgtggatcccactaaagatatattcactgggcttattgggccaatgaaaatatgcaagaaaggaagtttacatgcaaatgggagacagaaagatgtagacaaggaattctatttgtttcctacagtatttgatgagaatgagagtttactcctggaagataatattagaatgtttacaactgcacctgatcaggtggataaggaagatgaagactttcaggaatctaataaaatgcactccatgaatggattcatgtatgggaatcagccgggtctcactatgtgcaaaggagattcggtcgtgtggtacttattcagcgccggaaatgaggccgatgtacatggaatatacttttcaggaaacacatatctgtggagaggagaacggagagacacagcaaacctcttccctcaaacaagtcttacgctccacatgtggcctgacacagaggggacttttaatgttgaatgccttacaactgatcattacacaggcggcatgaagcaaaaatatactgtgaaccaatgcaggcggcagtctgaggattccaccttctacctgggagagaggacatactatatcgcagcagtggaggtggaatgggattattccccacaaagggagtgggaaaaggagctgcatcatttacaagagcagaatgtttcaaatgcatttttagataagggagagttttacataggctcaaagtacaagaaagttgtgtatcggcagtatactgatagcacattccgtgttccagtggagagaaaagctgaagaagaacatctgggaattctaggtccacaacttcatgcagatgttggagacaaagtcaaaattatctttaaaaacatggccacaaggccctactcaatacatgcccatggggtacaaacagagagttctacagttactccaacattaccaggtgaaactctcacttacgtatggaaaatcccagaaagatctggagctggaacagaggattctgcttgtattccatgggcttattattcaactgtggatcaagttaaggacctctacagtggattaattggccccctgattgtttgtcgaagaccttacttgaaagtattcaatcccagaaggaaactggaatttgcccttctgtttctagtttttgatgagaatgaatcttggtacttagatgacaacatcaaaacatactctgatcaccccgagaaagtaaacaaagatgatgaggaattcatagaaagcaataaaatgcatgctattaatggaagaatgtttggaaacctacaaggcctcacaatgcacgtgggagatgaagtcaactggtatctgatgggaatgggcaatgaaatagacttacacactgtacattttcacggccatagcttccaatacaagcacaggggagtttatagttctgatgtctttgacattttccctggaacataccaaaccctagaaatgtttccaagaacacctggaatttggttactccactgccatgtgaccgaccacattcatgctggaatggaaaccacttacaccgttctacaaaatgaagacaccaaatctggctgaatgaaataaattggtgataagtggaaaaaagagaaaaaccaatgattcataacaatgtatgtgaaagtgtaaaatagaatgttactttggaatgactataaacattaaaagaagactggaagcata

SEQ ID NO: 367493 - DNA, 568 bp, Homo sapiens
  misc_feature (568)..(568): n is a, c, g, or t
agagaagcctggcaaccaagaactgtttttttggtggtttacgagaacttaactgaattggaaaatatttgctttaatgaaacaatttactcttgtgcaacactaaattgtgtcaatcaagcaaataaggaagaaagtcttatttataaaattgcctgctcctgattttacttcatttcttctcaggctccaagaaggggaaaaaaatgaagattttgatacttggtatttttctgtttttatgtagtaccccagcctgggcgaaagaaaagcattattacattggaattattgaaacgacttgggattatgcctctgaccatggggaaaagaaacttatttctgttgacacggaacattccaatatctatcttcaaaatggcccagatagaattgggagactatataagaaggccctttatcttcagtacacagatgaaacctttaggacaactatagaaaaaccggtctggcttgggtttttaggccctattatcaaagctgaaactggagataaagtttatgtacacttaaaggaacatgagggggccatctaccctgataacan

SEQ ID NO: 367494 - DNA, 475 bp, Homo sapiens
ggaatacaaaaaccacattttaccatttgtattaaacacagaaacgagctcgattttttaaaaacagatttatccattttttcaatatccctgagctgaacattaacaaatgacatgagtgaactctcatatacaatattatacattatttgtcatttttctaattaagcacaggggagtttatagttctgatgtctttgacattttccctggaacataccaaaccctagaaatgtttccaagaacacctggaatttggttactccactgccatgtgaccgaccacattcatgctggaatggaaaccacttacaccgttctacaaaatgaagacaccaaatctggctgaatgaaataaattggtgataagtggaaaaaagagaaaaaccaatgattcataacaatgtatgtgaaagtgtaaaatagaatgttactttggaatgactataaacattaaaagaagactggaagcata

SEQ ID NO: 367495 - DNA, 4614 bp, Homo sapiens
agagaagcctggcaaccaagaactgtttttttggtggtttacgagaacttaactgaattggaaaatatttgctttaatgaaacaatttactcttgtgcaacactaaattgtgtcaatcaagcaaataaggaagaaagtcttatttataaaattgcctgctcctgattttacttcatttcttctcaggctccaagaaggggaaaaaaatgaagattttgatacttggtatttttctgtttttatgtagtaccccagcctgggcgaaagaaaagcattattacattggaattattgaaacgacttgggattatgcctctgaccatggggaaaagaaacttatttctgttgacacggaacattccaatatctatcttcaaaatggcccagatagaattgggagactatataagaaggccctttatcttcagtacacagatgaaacctttaggacaactatagaaaaaccggtctggcttgggtttttaggccctattatcaaagctgaaactggagataaagtttatgtacacttaaaaaaccttgcctctaggccctacacctttcattcacatggaataacttactataaggaacatgagggggccatctaccctgataacaccacagattttcaaagagcagatgacaaagtatatccaggagagcagtatacatacatgttgcttgccactgaagaacaaagtcctggggaaggagatggcaattgtgtgactaggatttaccattcccacattgatgctccaaaagatattgcctcaggactcatcggacctttaataatctgtaaaaaagattctctagataaagaaaaagaaaaacatattgaccgagaatttgtggtgatgttttctgtggtggatgaaaatttcagctggtacctagaagacaacattaaaacctactgctcagaaccagagaaagttgacaaagacaacgaagacttccaggagagtaacagaatgtattctgtgaatggatacacttttggaagtctcccaggactctccatgtgtgctgaagacagagtaaaatggtacctttttggtatgggtaatgaagttgatgtgcacgcagctttctttcacgggcaagcactgactaacaagaactaccgtattgacacaatcaacctctttcctgctaccctgtttgatgcttatatggtggcccagaaccctggagaatggatgctcagctgtcagaatctaaaccatctgaaagccggtttgcaagcctttttccaggtccaggagtgtaacaagtcttcatcaaaggataatatccgtgggaagcatgttagacactactacattgccgctgaggaaatcatctggaactatgctccctctggtatagacatcttcactaaagaaaacttaacagcacctggaagtgactcagcggtgttttttgaacaaggtaccacaagaattggaggctcttataaaaagctggtttatcgtgagtacacagatgcctccttcacaaatcgaaaggagagaggccctgaagaagagcatcttggcatcctgggtcctgtcatttgggcagaggtgggagacaccatcagagtaaccttccataacaaaggagcatatcccctcagtattgagccgattggggtgagattcaataagaacaacgagggcacatactattccccaaattacaacccccagagcagaagtgtgcctccttcagcctcccatgtggcacccacagaaacattcacctatgaatggactgtccccaaagaagtaggacccactaatgcagatcctgtgtgtctagctaagatgtattattctgctgtggatcccactaaagatatattcactgggcttattgggccaatgaaaatatgcaagaaaggaagtttacatgcaaatgggagacagaaagatgtagacaaggaattctatttgtttcctacagtatttgatgagaatgagagtttactcctggaagataatattagaatgtttacaactgcacctgatcaggtggataaggaagatgaagactttcaggaatctaataaaatgcactccatgaatggattcatgtatgggaatcagccgggtctcactatgtgcaaaggagattcggtcgtgtggtacttattcagcgccggaaatgaggccgatgtacatggaatatacttttcaggaaacacatatctgtggagaggagaacggagagacacagcaaacctcttccctcaaacaagtcttacgctccacatgtggcctgacacagaggggacttttaatgttgaatgccttacaactgatcattacacaggcggcatgaagcaaaaatatactgtgaaccaatgcaggcggcagtctgaggattccaccttctacctgggagagaggacatactatatcgcagcagtggaggtggaatgggattattccccacaaagggagtgggaaaaggagctgcatcatttacaagagcagaatgtttcaaatgcatttttagataagggagagttttacataggctcaaagtacaagaaagttgtgtatcggcagtatactgatagcacattccgtgttccagtggagagaaaagctgaagaagaacatctgggaattctaggtccacaacttcatgcagatgttggagacaaagtcaaaattatctttaaaaacatggccacaaggccctactcaatacatgcccatggggtacaaacagagagttctacagttactccaacattaccaggtgaaactctcacttacgtatggaaaatcccagaaagatctggagctggaacagaggattctgcttgtattccatgggcttattattcaactgtggatcaagttaaggacctctacagtggattaattggccccctgattgtttgtcgaagaccttacttgaaagtattcaatcccagaaggaaactggaatttgcccttctgtttctagtttttgatgagaatgaatcttggtacttagatgacaacatcaaaacatactctgatcaccccgagaaagtaaacaaagatgatgaggaattcatagaaagcaataaaatgcatgctattaatggaagaatgtttggaaacctacaaggcctcacaatgcacgtgggagatgaagtcaactggtatctgatgggaatgggcaatgaaatagacttacacactgtacattttcacggccatagcttccaatacaagcacaggggagtttatagttctgatgtctttgacattttccctggaacataccaaaccctagaaatgtttccaagaacacctggaatttggttactccactgccatgtgaccgaccacattcatgctggaatggaaaccacttacaccgttctacaaaatgaagacaccaaatctggctgaatgaaataaattggtgataagtggaaaaaagagaaaaaccaatgattcataacaatgtatgtgaaagtgtaaaatagaatgttactttggaatgactataaacattaaaagaagactggaagcatacaactttgtacatttgtgggggaaaactattaattttttgcaaatggaaagatcaacagactatataatgatacatgactgacacttgtacactaggtaataaaactgattcatacagtctaatgatatcaccgctgttagggttttataaaactgcatttaaaaaaagatctatgaccagatattctcctgggtgctcctcaaaggaacactattaaggttcattgaaatgttttcaatcattgccttcccattgatccttctaacatgctgttgacatcacacctaatattcagagggaatgggcaaggtatgagggaaggaaataaaaaataaaataaataaaatagaatgacacaaatttgagttttgtgaacccctgaacagatggtcttaaggacgttatctggaactggagaaaagcagagttgagagacaattctatagattaaatcctggtaaggacaaacattgccattagaagaaaagcttcaaaatagacctgtggcagatgtcacatgagtagaatttctgcccagccttaactgcattcagaggataatatcaatgaactaaacttgaactaaaaattttttaaacaaaaagttataaatgaagacacatggttgtgaatacaatgatgtatttctttattttcacatacactctagctaaaagagcaagagtacacatcaacaaaaatggaaacaaggctttggctgaaaaaaacatgcatttgacaaatcatgttaatagctagacaagaagaaagttagctttgtaaacttctacttcatttgattcagagaaacagagcatgagttttcttaaaagtaacaagaaaaggaacaaaaaaaatgaggtttgaaatcttttaccatggcaaaacattaacatctttctcaaaaacatagagaaatctggaaaaatcaagaagataaaattctggaccagttagtgacattctttcaagcatacttgtaaaatgtttccttaaagtgttcttgggatgaaaatgattgtcatgtctccaacaacagtgaactgatgttgttccttggaataaaagtcaatccccacctta

SEQ ID NO: 367496 - DNA, 4560 bp, Homo sapiens
agagaagcctggcaaccaagaactgtttttttggtggtttacgagaacttaactgaattggaaaatatttgctttaatgaaacaatttactcttgtgcaacactaaattgtgtcaatcaagcaaataaggaagaaagtcttatttataaaattgcctgctcctgattttacttcatttcttctcaggctccaagaaggggaaaaaaatgaagattttgatacttggtatttttctgtttttatgtagtaccccagcctgggcgaaagaaaagcattattacattggaattattgaaacgacttgggattatgcctctgaccatggggaaaagaaacttatttctgttgacacggaacattccaatatctatcttcaaaatggcccagatagaattgggagactatataagaaggccctttatcttcagtacacagatgaaacctttaggacaactatagaaaaaccggtctggcttgggtttttaggccctattatcaaagctgaaactggagataaagtttatgtacacttaaaaaaccttgcctctaggccctacacctttcattcacatggaataacttactataaggaacatgagggggccatctaccctgataacaccacagattttcaaagagcagatgacaaagtatatccaggagagcagtatacatacatgttgcttgccactgaagaacaaagtcctggggaaggagatggcaattgtgtgactaggatttaccattcccacattgatgctccaaaagatattgcctcaggactcatcggacctttaataatctgtaaaaaagattctctagataaagaaaaagaaaaacatattgaccgagaatttgtggtgatgttttctgtggtggatgaaaatttcagctggtacctagaagacaacattaaaacctactgctcagaaccagagaaagttgacaaagacaacgaagacttccaggagagtaacagaatgtattctgtgaatggatacacttttggaagtctcccaggactctccatgtgtgctgaagacagatttcacgggcaagcactgactaacaagaactaccgtattgacacaatcaacctctttcctgctaccctgtttgatgcttatatggtggcccagaaccctggagaatggatgctcagctgtcagaatctaaaccatctgaaagccggtttgcaagcctttttccaggtccaggagtgtaacaagtcttcatcaaaggataatatccgtgggaagcatgttagacactactacattgccgctgaggaaatcatctggaactatgctccctctggtatagacatcttcactaaagaaaacttaacagcacctggaagtgactcagcggtgttttttgaacaaggtaccacaagaattggaggctcttataaaaagctggtttatcgtgagtacacagatgcctccttcacaaatcgaaaggagagaggccctgaagaagagcatcttggcatcctgggtcctgtcatttgggcagaggtgggagacaccatcagagtaaccttccataacaaaggagcatatcccctcagtattgagccgattggggtgagattcaataagaacaacgagggcacatactattccccaaattacaacccccagagcagaagtgtgcctccttcagcctcccatgtggcacccacagaaacattcacctatgaatggactgtccccaaagaagtaggacccactaatgcagatcctgtgtgtctagctaagatgtattattctgctgtggatcccactaaagatatattcactgggcttattgggccaatgaaaatatgcaagaaaggaagtttacatgcaaatgggagacagaaagatgtagacaaggaattctatttgtttcctacagtatttgatgagaatgagagtttactcctggaagataatattagaatgtttacaactgcacctgatcaggtggataaggaagatgaagactttcaggaatctaataaaatgcactccatgaatggattcatgtatgggaatcagccgggtctcactatgtgcaaaggagattcggtcgtgtggtacttattcagcgccggaaatgaggccgatgtacatggaatatacttttcaggaaacacatatctgtggagaggagaacggagagacacagcaaacctcttccctcaaacaagtcttacgctccacatgtggcctgacacagaggggacttttaatgttgaatgccttacaactgatcattacacaggcggcatgaagcaaaaatatactgtgaaccaatgcaggcggcagtctgaggattccaccttctacctgggagagaggacatactatatcgcagcagtggaggtggaatgggattattccccacaaagggagtgggaaaaggagctgcatcatttacaagagcagaatgtttcaaatgcatttttagataagggagagttttacataggctcaaagtacaagaaagttgtgtatcggcagtatactgatagcacattccgtgttccagtggagagaaaagctgaagaagaacatctgggaattctaggtccacaacttcatgcagatgttggagacaaagtcaaaattatctttaaaaacatggccacaaggccctactcaatacatgcccatggggtacaaacagagagttctacagttactccaacattaccaggtgaaactctcacttacgtatggaaaatcccagaaagatctggagctggaacagaggattctgcttgtattccatgggcttattattcaactgtggatcaagttaaggacctctacagtggattaattggccccctgattgtttgtcgaagaccttacttgaaagtattcaatcccagaaggaaactggaatttgcccttctgtttctagtttttgatgagaatgaatcttggtacttagatgacaacatcaaaacatactctgatcaccccgagaaagtaaacaaagatgatgaggaattcatagaaagcaataaaatgcatgctattaatggaagaatgtttggaaacctacaaggcctcacaatgcacgtgggagatgaagtcaactggtatctgatgggaatgggcaatgaaatagacttacacactgtacattttcacggccatagcttccaatacaagcacaggggagtttatagttctgatgtctttgacattttccctggaacataccaaaccctagaaatgtttccaagaacacctggaatttggttactccactgccatgtgaccgaccacattcatgctggaatggaaaccacttacaccgttctacaaaatgaagacaccaaatctggctgaatgaaataaattggtgataagtggaaaaaagagaaaaaccaatgattcataacaatgtatgtgaaagtgtaaaatagaatgttactttggaatgactataaacattaaaagaagactggaagcatacaactttgtacatttgtgggggaaaactattaattttttgcaaatggaaagatcaacagactatataatgatacatgactgacacttgtacactaggtaataaaactgattcatacagtctaatgatatcaccgctgttagggttttataaaactgcatttaaaaaaagatctatgaccagatattctcctgggtgctcctcaaaggaacactattaaggttcattgaaatgttttcaatcattgccttcccattgatccttctaacatgctgttgacatcacacctaatattcagagggaatgggcaaggtatgagggaaggaaataaaaaataaaataaataaaatagaatgacacaaatttgagttttgtgaacccctgaacagatggtcttaaggacgttatctggaactggagaaaagcagagttgagagacaattctatagattaaatcctggtaaggacaaacattgccattagaagaaaagcttcaaaatagacctgtggcagatgtcacatgagtagaatttctgcccagccttaactgcattcagaggataatatcaatgaactaaacttgaactaaaaattttttaaacaaaaagttataaatgaagacacatggttgtgaatacaatgatgtatttctttattttcacatacactctagctaaaagagcaagagtacacatcaacaaaaatggaaacaaggctttggctgaaaaaaacatgcatttgacaaatcatgttaatagctagacaagaagaaagttagctttgtaaacttctacttcatttgattcagagaaacagagcatgagttttcttaaaagtaacaagaaaaggaacaaaaaaaatgaggtttgaaatcttttaccatggcaaaacattaacatctttctcaaaaacatagagaaatctggaaaaatcaagaagataaaattctggaccagttagtgacattctttcaagcatacttgtaaaatgtttccttaaagtgttcttgggatgaaaatgattgtcatgtctccaacaacagtgaactgatgttgttccttggaataaaagtcaatccccacctta

SEQ ID NO: 367497 - DNA, 4560 bp, Homo sapiens
agagaagcctggcaaccaagaactgtttttttggtggtttacgagaacttaactgaattggaaaatatttgctttaatgaaacaatttactcttgtgcaacactaaattgtgtcaatcaagcaaataaggaagaaagtcttatttataaaattgcctgctcctgattttacttcatttcttctcaggctccaagaaggggaaaaaaatgaagattttgatacttggtatttttctgtttttatgtagtaccccagcctgggcgaaagaaaagcattattacattggaattattgaaacgacttgggattatgcctctgaccatggggaaaagaaacttatttctgttgacacggaacattccaatatctatcttcaaaatggcccagatagaattgggagactatataagaaggccctttatcttcagtacacagatgaaacctttaggacaactatagaaaaaccggtctggcttgggtttttaggccctattatcaaagctgaaactggagataaagtttatgtacacttaaaaaaccttgcctctaggccctacacctttcattcacatggaataacttactataaggaacatgagggggccatctaccctgataacaccacagattttcaaagagcagatgacaaagtatatccaggagagcagtatacatacatgttgcttgccactgaagaacaaagtcctggggaaggagatggcaattgtgtgactaggatttaccattcccacattgatgctccaaaagatattgcctcaggactcatcggacctttaataatctgtaaaaaagattctctagataaagaaaaagaaaaacatattgaccgagaatttgtggtgatgttttctgtggtggatgaaaatttcagctggtacctagaagacaacattaaaacctactgctcagaaccagagaaagttgacaaagacaacgaagacttccaggagagtaacagaatgtattctgtgaatggatacacttttggaagtctcccaggactctccatgtgtgctgaagacagagtaaaatggtacctttttggtatgggtaatgaagttgatgtgcacgcagctttctttcacgggcaagcactgactaacaagaactaccgtattgacacaatcaacctctttcctgctaccctgtttgatgcttatatggtggcccagaaccctggagaatggatgctcagctgtcagaatctaaaccatctgaaagccggtttgcaagcctttttccaggtccaggagtgtaacaagtcttcatcaaaggataatatccgtgggaagcatgttagacactactacattgccgctgaggaaatcatctggaactatgctccctctggtatagacatcttcactaaagaaaacttaacagcacctggaagtgactcagcggtgttttttgaacaaggtaccacaagaattggaggctcttataaaaagctggtttatcgtgagtacacagatgcctccttcacaaatcgaaaggagagaggccctgaagaagagcatcttggcatcctgggtcctgtcatttgggcagaggtgggagacaccatcagagtaaccttccataacaaaggagcatatcccctcagtattgagccgattggggtgagattcaataagaacaacgagggcacatactattccccaaattacaacccccagagcagaagtgtgcctccttcagcctcccatgtggcacccacagaaacattcacctatgaatggactgtccccaaagaagtaggacccactaatgcagatcctgtgtgtctagctaagatgtattattctgctgtggatcccactaaagatatattcactgggcttattgggccaatgaaaatatgcaagaaaggaagtttacatgcaaatgggagacagaaagatgtagacaaggaattctatttgtttcctacagtatttgatgagaatgagagtttactcctggaagataatattagaatgtttacaactgcacctgatcaggtggataaggaagatgaagactttcaggaatctaataaaatgcactccatgaatggattcatgtatgggaatcagccgggtctcactatgtgcaaaggagattcggtcgtgtggtacttattcagcgccggaaatgaggccgatgtacatggaatatacttttcaggaaacacatatctgtggagaggagaacggagagacacagcaaacctcttccctcaaacaagtcttacgctccacatgtggcctgacacagaggggacttttaatgttgaatgccttacaactgatcattacacaggcggcatgaagcaaaaatatactgtgaaccaatgcaggcggcagtctgaggattccaccttctacctgggagagaggacatactatatcgcagcagtggaggtggaatgggattattccccacaaagggagtgggaaggagagttttacataggctcaaagtacaagaaagttgtgtatcggcagtatactgatagcacattccgtgttccagtggagagaaaagctgaagaagaacatctgggaattctaggtccacaacttcatgcagatgttggagacaaagtcaaaattatctttaaaaacatggccacaaggccctactcaatacatgcccatggggtacaaacagagagttctacagttactccaacattaccaggtgaaactctcacttacgtatggaaaatcccagaaagatctggagctggaacagaggattctgcttgtattccatgggcttattattcaactgtggatcaagttaaggacctctacagtggattaattggccccctgattgtttgtcgaagaccttacttgaaagtattcaatcccagaaggaaactggaatttgcccttctgtttctagtttttgatgagaatgaatcttggtacttagatgacaacatcaaaacatactctgatcaccccgagaaagtaaacaaagatgatgaggaattcatagaaagcaataaaatgcatgctattaatggaagaatgtttggaaacctacaaggcctcacaatgcacgtgggagatgaagtcaactggtatctgatgggaatgggcaatgaaatagacttacacactgtacattttcacggccatagcttccaatacaagcacaggggagtttatagttctgatgtctttgacattttccctggaacataccaaaccctagaaatgtttccaagaacacctggaatttggttactccactgccatgtgaccgaccacattcatgctggaatggaaaccacttacaccgttctacaaaatgaagacaccaaatctggctgaatgaaataaattggtgataagtggaaaaaagagaaaaaccaatgattcataacaatgtatgtgaaagtgtaaaatagaatgttactttggaatgactataaacattaaaagaagactggaagcatacaactttgtacatttgtgggggaaaactattaattttttgcaaatggaaagatcaacagactatataatgatacatgactgacacttgtacactaggtaataaaactgattcatacagtctaatgatatcaccgctgttagggttttataaaactgcatttaaaaaaagatctatgaccagatattctcctgggtgctcctcaaaggaacactattaaggttcattgaaatgttttcaatcattgccttcccattgatccttctaacatgctgttgacatcacacctaatattcagagggaatgggcaaggtatgagggaaggaaataaaaaataaaataaataaaatagaatgacacaaatttgagttttgtgaacccctgaacagatggtcttaaggacgttatctggaactggagaaaagcagagttgagagacaattctatagattaaatcctggtaaggacaaacattgccattagaagaaaagcttcaaaatagacctgtggcagatgtcacatgagtagaatttctgcccagccttaactgcattcagaggataatatcaatgaactaaacttgaactaaaaattttttaaacaaaaagttataaatgaagacacatggttgtgaatacaatgatgtatttctttattttcacatacactctagctaaaagagcaagagtacacatcaacaaaaatggaaacaaggctttggctgaaaaaaacatgcatttgacaaatcatgttaatagctagacaagaagaaagttagctttgtaaacttctacttcatttgattcagagaaacagagcatgagttttcttaaaagtaacaagaaaaggaacaaaaaaaatgaggtttgaaatcttttaccatggcaaaacattaacatctttctcaaaaacatagagaaatctggaaaaatcaagaagataaaattctggaccagttagtgacattctttcaagcatacttgtaaaatgtttccttaaagtgttcttgggatgaaaatgattgtcatgtctccaacaacagtgaactgatgttgttccttggaataaaagtcaatccccacctta

SEQ ID NO: 367498 - DNA, 4838 bp, Homo sapiens
agagaagcctggcaaccaagaactgtttttttggtggtttacgagaacttaactgaattggaaaatatttgctttaatgaaacaatttactcttgtgcaacactaaattgtgtcaatcaagcaaataaggaagaaagtcttatttataaaattgcctgctcctgattttacttcatttcttctcaggctccaagaaggggaaaaaaatgaagattttgatacttggtatttttctgtttttatgtagtaccccagcctgggcgaaagaaaagcattattacattggaattattgaaacgacttgggattatgcctctgaccatggggaaaagaaacttatttctgttgacacggaacattccaatatctatcttcaaaatggcccagatagaattgggagactatataagaaggccctttatcttcagtacacagatgaaacctttaggacaactatagaaaaaccggtctggcttgggtttttaggccctattatcaaagctgaaactggagataaagtttatgtacacttaaaaaaccttgcctctaggccctacacctttcattcacatggaataacttactataaggaacatgagggggccatctaccctgataacaccacagattttcaaagagcagatgacaaagtatatccaggagagcagtatacatacatgttgcttgccactgaagaacaaagtcctggggaaggagatggcaattgtgtgactaggatttaccattcccacattgatgctccaaaagatattgcctcaggactcatcggacctttaataatctgtaaaaaagattctctagataaagaaaaagaaaaacatattgaccgagaatttgtggtgatgttttctgtggtggatgaaaatttcagctggtacctagaagacaacattaaaacctactgctcagaaccagagaaagttgacaaagacaacgaagacttccaggagagtaacagaatgtattctgtgaatggatacacttttggaagtctcccaggactctccatgtgtgctgaagacagagtaaaatggtacctttttggtatgggtaatgaagttgatgtgcacgcagctttctttcacgggcaagcactgactaacaagaactaccgtattgacacaatcaacctctttcctgctaccctgtttgatgcttatatggtggcccagaaccctggagaatggatgctcagctgtcagaatctaaaccatctgaaagccggtttgcaagcctttttccaggtccaggagtgtaacaagtcttcatcaaaggataatatccgtgggaagcatgttagacactactacattgccgctgaggaaatcatctggaactatgctccctctggtatagacatcttcactaaagaaaacttaacagcacctggaagtgactcagcggtgttttttgaacaaggtaccacaagaattggaggctcttataaaaagctggtttatcgtgagtacacagatgcctccttcacaaatcgaaaggagagaggccctgaagaagagcatcttggcatcctgggtcctgtcatttgggcagaggtgggagacaccatcagagtaaccttccataacaaaggagcatatcccctcagtattgagccgattggggtgagattcaataagaacaacgagggcacatactattccccaaattacaacccccagagcagaagtgtgcctccttcagcctcccatgtggcacccacagaaacattcacctatgaatggactgtccccaaagaagtaggacccactaatgcagatcctgtgtgtctagctaagatgtattattctgctgtggatcccactaaagatatattcactgggcttattgggccaatgaaaatatgcaagaaaggaagtttacatgcaaatgggagacagaaagatgtagacaaggaattctatttgtttcctacagtatttgatgagaatgagagtttactcctggaagataatattagaatgtttacaactgcacctgatcaggtggataaggaagatgaagactttcaggaatctaataaaatgcactccatgaatggattcatgtatgggaatcagccgggtctcactatgtgcaaaggagattcggtcgtgtggtacttattcagcgccggaaatgaggccgatgtacatggaatatacttttcaggaaacacatatctgtggagaggagaacggagagacacagcaaacctcttccctcaaacaagtcttacgctccacatgtggcctgacacagaggggacttttaatgttgaatgccttacaactgatcattacacaggcggcatgaagcaaaaatatactgtgaaccaatgcaggcggcagtctgaggattccaccttctacctgggagagaggacatactatatcgcagcagtggaggtggaatgggattattccccacaaagggagtgggaaaaggagctgcatcatttacaagagcagaatgtttcaaatgcatttttagataagggagagttttacataggctcaaagtacaagaaagttgtgtatcggcagtatactgatagcacattccgtgttccagtggagagaaaagctgaagaagaacatctgggaattctaggtccacaacttcatgcagatgttggagacaaagtcaaaattatctttaaaaacatggccacaaggccctactcaatacatgcccatggggtacaaacagagagttctacagttactccaacattaccaggtgaaactctcacttacgtatggaaaatcccagaaagatctggagctggaacagaggattctgcttgtattccatgggcttattattcaactgtggatcaagttaaggacctctacagtggattaattggccccctgattgtttgtcgaagaccttacttgaaagtattcaatcccagaaggaaactggaatttgcccttctgtttctagtttttgatgagaatgaatcttggtacttagatgacaacatcaaaacatactctgatcaccccgagaaagtaaacaaagatgatgaggaattcatagaaagcaataaaatgcatgctattaatggaagaatgtttggaaacctacaaggcctcacaatgcacgtgggagatgaagtcaactggtatctgatgggaatgggcaatgaaatagacttacacactgtacattttcacggccatagcttccaatacaagcacaggggagtttatagttctgatgtctttgacattttccctggaacataccaaaccctagaaatgtttccaagaacacctggaatttggttactccactgccatgtgaccgaccacattcatgctggaatggaaaccacttacaccgttctacaaaatgaagacaccaaatctggctgaatgaaataaattggtgataagtggaaaaaagagaaaaaccaatgattcataacaatgtatgtgaaagtgtaaaatagaatgttactttggaatgactataaacattaaaagaagactggaagcatacaactttgtacatttgtgggggaaaactattaattttttgcaaatggaaagatcaacagactatataatgatacatgactgacacttgtacactaggtaataaaactgattcatacagtctaatgatatcaccgctgttagggttttataaaactgcatttaaaaaaagatctatgaccagatattctcctgggtgctcctcaaaggaacactattaaggttcattgaaatgttttcaatcattgccttcccattgatccttctaacatgctgttgacatcacacctaatattcagagggaatgggcaaggtatgagggaaggaaataaaaaataaaataaataaaatagaatgacacaaatttgagttttgtgaacccctgaacagatggtcttaaggacgttatctggaactggagaaaagcagagttgagagacaattctatagattaaatcctggtaaggacaaacattgccattagaagaaaagcttcaaaatagacctgtggcagatgtcacatgagtagaatttctgcccagccttaactgcattcagaggataatatcaatgaactaaacttgaactaaaaattttttaaacaaaaagttataaatgaagacacatggttgtgaatacaatgatgtatttctttattttcacatacactctagctaaaagagcaagagtacacatcaacaaaaatggaaacaaggctttggctgaaaaaaacatgcatttgacaaatcatgttaatagctagacaagaagaaatcttaaaagtaacaagaaaaggaacaaaaaaaatgaggtttgaaatcttttaccatggcaaaacattaacatctttctcaaaaacatagagaaatctggaaaaatcaagaagataaaattctggaccagttagtgacattctttcaagcatacttgtaaaatgtttccttaaagtgttcttgggatgaaaatgattgtcatgtctccaacaacagtgaactgatgttgttccttggaataaaagtcaatccccaccttaaaaaatgtatggcttctttgaggaattcttatgtcttaaagactttttacattctagacaattaaattgattgaggtcataaattaagaagtgaatagttaccactacacggtaaggtaagcagcctgaaagcatttgtatcatatatgtgtgtgtgtgtgtgtgtgtgtgtgtgtgtgtgtgtgatatataaaataaaaaactcctctacttgtactttggcattcaatttttagaaattcagtctcaaatgccattatggtatttttcaaatgata

SEQ ID NO: 367499 - DNA, 4558 bp, Homo sapiens
agagaagcctggcaaccaagaactgtttttttggtggtttacgagaacttaactgaattggaaaatatttgctttaatgaaacaatttactcttgtgcaacactaaattgtgtcaatcaagcaaataaggaagaaagtcttatttataaaattgcctgctcctgattttacttcatttcttctcaggctccaagaaggggaaaaaaatgaagattttgatacttggtatttttctgtttttatgtagtaccccagcctgggcgaaagaaaagcattattacattggaattattgaaacgacttgggattatgcctctgaccatggggaaaagaaacttatttctgttgacacggaacattccaatatctatcttcaaaatggcccagatagaattgggagactatataagaaggccctttatcttcagtacacagatgaaacctttaggacaactatagaaaaaccggtctggcttgggtttttaggccctattatcaaagctgaaactggagataaagtttatgtacacttaaaaaaccttgcctctaggccctacacctttcattcacatggaataacttactataaggaacatgagggggccatctaccctgataacaccacagattttcaaagagcagatgacaaagtatatccaggagagcagtatacatacatgttgcttgccactgaagaacaaagtcctggggaaggagatggcaattgtgtgactaggatttaccattcccacattgatgctccaaaagatattgcctcaggactcatcggacctttaataatctgtaaaaaagattctctagataaagaaaaagaaaaacatattgaccgagaatttgtggtgatgttttctgtggtggatgaaaatttcagctggtacctagaagacaacattaaaacctactgctcagaaccagagaaagttgacaaagacaacgaagacttccaggagagtaacagaatgtattctgtgaatggatacacttttggaagtctcccaggactctccatgtgtgctgaagacagagtaaaatggtacctttttggtatgggtaatgaagttgatgtgcacgcagctttctttcacgggcaagcactgactaacaagaactaccgtattgacacaatcaacctctttcctgctaccctgtttgatgcttatatggtggcccagaaccctggagaatggatgctcagctgtcagaatctaaaccatctgaaagccggtttgcaagcctttttccaggtccaggagtgtaacaagtcttcatcaaaggataatatccgtgggaagcatgttagacactactacattgccgctgaggaaatcatctggaactatgctccctctggtatagacatcttcactaaagaaaacttaacagcacctggaagtgactcagcggtgttttttgaacaaggtaccacaagaattggaggctcttataaaaagctggtttatcgtgagtacacagatgcctccttcacaaatcgaaaggagagaggccctgaagaagagcatcttggcatcctgggtcctgtcatttgggcagaggtgggagacaccatcagagtaaccttccataacaaaggagcatatcccctcagtattgagccgattggggtgagattcaataagaacaacgagggcacatactattccccaaattacaacccccagagcagaagtgtgcctccttcagcctcccatgtggcacccacagaaacattcacctatgaatggactgtccccaaagaagtaggacccactaatgcagatcctgtgtgtctagctaagatgtattattctgctgtggatcccactaaagatatattcactgggcttattgggccaatgaaaatatgcaagaaaggaagtttacatgcaaatgggagacagaaagatgtagacaaggaattctatttgtttcctacagtatttgatgagaatgagagtttactcctggaagataatattagaatgtttacaactgcacctgatcaggtggataaggaagatgaagactttcaggaatctaataaaatgcactccatgaatggattcatgtatgggaatcagccgggtctcactatgtgcaaaggagattcggtcgtgtggtacttattcagcgccggaaatgaggccgatgtacatggaatatacttttcaggaaacacatatctgtggagaggagaacggagagacacagcaaacctcttccctcaaacaagtcttacgctccacatgtggcctgacacagaggggacttttaatgttgaatgccttacaactgatcattacacaggcggcatgaagcaaaaatatactgtgaaccaatgcaggcggcagtctgaggattccaccttctacctgggagagaggacatactatatcgcagcagtggaggtggaatgggattattccccacaaagggagtgggaaaaggagctgcatcatttacaagagcagaatgtttcaaatgcatttttagataagggagagttttacataggctcaaagtacaagaaagttgtgtatcggcagtatactgatagcacattccgtgttccagtggagagaaaagctgaagaagaacatctgggaattctaggtccacaacttcatgcagatgttggagacaaagtcaaaattatctttaaaaacatggccacaaggccctactcaatacatgcccatggggtacaaacagagagttctacagttactccaacattaccaggattctgcttgtattccatgggcttattattcaactgtggatcaagttaaggacctctacagtggattaattggccccctgattgtttgtcgaagaccttacttgaaagtattcaatcccagaaggaaactggaatttgcccttctgtttctagtttttgatgagaatgaatcttggtacttagatgacaacatcaaaacatactctgatcaccccgagaaagtaaacaaagatgatgaggaattcatagaaagcaataaaatgcatgctattaatggaagaatgtttggaaacctacaaggcctcacaatgcacgtgggagatgaagtcaactggtatctgatgggaatgggcaatgaaatagacttacacactgtacattttcacggccatagcttccaatacaagcacaggggagtttatagttctgatgtctttgacattttccctggaacataccaaaccctagaaatgtttccaagaacacctggaatttggttactccactgccatgtgaccgaccacattcatgctggaatggaaaccacttacaccgttctacaaaatgaagacaccaaatctggctgaatgaaataaattggtgataagtggaaaaaagagaaaaaccaatgattcataacaatgtatgtgaaagtgtaaaatagaatgttactttggaatgactataaacattaaaagaagactggaagcatacaactttgtacatttgtgggggaaaactattaattttttgcaaatggaaagatcaacagactatataatgatacatgactgacacttgtacactaggtaataaaactgattcatacagtctaatgatatcaccgctgttagggttttataaaactgcatttaaaaaaagatctatgaccagatattctcctgggtgctcctcaaaggaacactattaaggttcattgaaatgttttcaatcattgccttcccattgatccttctaacatgctgttgacatcacacctaatattcagagggaatgggcaaggtatgagggaaggaaataaaaaataaaataaataaaatagaatgacacaaatttgagttttgtgaacccctgaacagatggtcttaaggacgttatctggaactggagaaaagcagagttgagagacaattctatagattaaatcctggtaaggacaaacattgccattagaagaaaagcttcaaaatagacctgtggcagatgtcacatgagtagaatttctgcccagccttaactgcattcagaggataatatcaatgaactaaacttgaactaaaaattttttaaacaaaaagttataaatgaagacacatggttgtgaatacaatgatgtatttctttattttcacatacactctagctaaaagagcaagagtacacatcaacaaaaatggaaacaaggctttggctgaaaaaaacatgcatttgacaaatcatgttaatagctagacaagaagaaagttagctttgtaaacttctacttcatttgattcagagaaacagagcatgagttttcttaaaagtaacaagaaaaggaacaaaaaaaatgaggtttgaaatcttttaccatggcaaaacattaacatctttctcaaaaacatagagaaatctggaaaaatcaagaagataaaattctggaccagttagtgacattctttcaagcatacttgtaaaatgtttccttaaagtgttcttgggatgaaaatgattgtcatgtctccaacaacagtgaactgatgttgttccttggaataaaagtcaatccccacctta

SEQ ID NO: 367500 - DNA, 4560 bp, Homo sapiens
agagaagcctggcaaccaagaactgtttttttggtggtttacgagaacttaactgaattggaaaatatttgctttaatgaaacaatttactcttgtgcaacactaaattgtgtcaatcaagcaaataaggaagaaagtcttatttataaaattgcctgctcctgattttacttcatttcttctcaggctccaagaaggggaaaaaaatgaagattttgatacttggtatttttctgtttttatgtagtaccccagcctgggcgaaagaaaagcattattacattggaattattgaaacgacttgggattatgcctctgaccatggggaaaagaaacttatttctgttgacacggaacattccaatatctatcttcaaaatggcccagatagaattgggagactatataagaaggccctttatcttcagtacacagatgaaacctttaggacaactatagaaaaaccggtctggcttgggtttttaggccctattatcaaagctgaaactggagataaagtttatgtacacttaaaaaaccttgcctctaggccctacacctttcattcacatggaataacttactataaggaacatgagggggccatctaccctgataacaccacagattttcaaagagcagatgacaaagtatatccaggagagcagtatacatacatgttgcttgccactgaagaacaaagtcctggggaaggagatggcaattgtgtgactaggatttaccattcccacattgatgctccaaaagatattgcctcaggactcatcggacctttaataatctgtaaaaaagattctctagataaagaaaaagaaaaacatattgaccgagaatttgtggtgatgttttctgtggtggatgaaaatttcagctggtacctagaagacaacattaaaacctactgctcagaaccagagaaagttgacaaagacaacgaagacttccaggagagtaacagaatgtattctgtgaatggatacacttttggaagtctcccaggactctccatgtgtgctgaagacagagtaaaatggtacctttttggtatgggtaatgaagttgatgtgcacgcagctttctttcacgggcaagcactgactaacaagaactaccgtattgacacaatcaacctctttcctgctaccctgtttgatgcttatatggtggcccagaaccctggagaatggatgctcagctgtcagaatctaaaccatctgaaagccggtttgcaagcctttttccaggtccaggagtgtaacaagtcttcatcaaaggataatatccgtgggaagcatgttagacactactacattgccgctgaggaaatcatctggaactatgctccctctggtatagacatcttcactaaagaaaacttaacagcacctggaagtgactcagcggtgttttttgaacaaggtaccacaagaattggaggctcttataaaaagctggtttatcgtgagtacacagatgcctccttcacaaatcgaaaggagagaggccctgaagaagagcatcttggcatcctgggtcctgtcatttgggcagaggtgggagacaccatcagagtaaccttccataacaaaggagcatatcccctcagtattgagccgattggggtgagattcaataagaacaacgagggcacatactattccccaaattacaacccccagagcagaagtgtgcctccttcagcctcccatgtggcacccacagaaacattcacctatgaatggactgtccccaaagaagtaggacccactaatgcagatcctgtgtgtctagctaagatgtattattctgctgtggatcccactaaagatatattcactgggcttattgggccaatgaaaatatgcaagaaaggaagtttacatgcaaatgggagacagaaagatgtagacaaggaattctatttgtttcctacagtatttgatgagaatgagagtttactcctggaagataatattagaatgtttacaactgcacctgatcaggtggataaggaagatgaagactttcaggaatctaataaaatgcactccatgaatggattcatgtatgggaatcagccgggtctcactatgtgcaaaggagattcggtcgtgtggtacttattcagcgccggaaatgaggccgatgtacatggaatatacttttcaggaaacacatatctgtggagaggagaacggagagacacagcaaacctcttccctcaaacaagtcttacgctccacatgtggcctgacacagaggggacttttaatgttgaatgccttacaactgatcattacacaggcggcatgaagcaaaaatatactgtgaaccaatgcaggcggcagtctgaggattccaccttctacctgggagagaggacatactatatcgcagcagtggaggtggaatgggattattccccacaaagggagtgggaaaaggagctgcatcatttacaagagcagaatgtttcaaatgcatttttagataagggagagttttacataggctcaaagtacaagaaagttgtgtatcggcagtatactgatagcacattccgtgttccagtggagagaaaagctgaagaagaacatctgggaattctaggtccacaacttcatgcagatgttggagacaaagtcaaaattatctttaaaaacatggccacaaggccctactcaatacatgcccatggggtacaaacagagagttctacagttactccaacattaccaggtgaaactctcacttacgtatggaaaatcccagaaagatctggagctggaacagaggattctgcttgtattccatgggcttattattcaactgtggatcaagttaaggacctctacagtggattaattggccccctgattgtttgtcgaagaccttacttgaaagtattcaatcccagaaggaaactggaatttgcccttctgtttctagtttttgatgagaatgaatcttggtacttagatgacaacatcaaaacatactctgatcaccccgagaaagtaaacaaagatgatgaggaattcatagaaagcaataaaatgcatgctattaatggaagaatgtttggaaacctacaaggcctcacaatgcacgtgggagatgaagtcaactggtatctgatgggaatgggcaatgaaatagacttacacactgtacattttcacggccatagcttccaatacaagcacaggggagtttatagttctgatgtctttgacattttccctggaacataccaaaccctagaaatgtttccaagaacacctggaatttggttactccactgccatgtgaccgaccacattcatgctggaatggaaaccacttacaccgttctacaaaatgaagacaccaaatctggctgaatgaaataaattggtgataagtggaaaaaagagaaaaaccaatgattcataacaatgtatgtgaaagtgtaaaatagaatgttactttggaatgactataaacattaaaagaagactggaagcatacaactttgtacatttgtgggggaaaactattaattttttgcaaatggaaagatcaacagactatataatgatacatgactgacacttgtacactaggtaataaaactgattcatacagtctaatgatatcaccgctgttagggttttataaaactgcatttaaaagttcattgaaatgttttcaatcattgccttcccattgatccttctaacatgctgttgacatcacacctaatattcagagggaatgggcaaggtatgagggaaggaaataaaaaataaaataaataaaatagaatgacacaaatttgagttttgtgaacccctgaacagatggtcttaaggacgttatctggaactggagaaaagcagagttgagagacaattctatagattaaatcctggtaaggacaaacattgccattagaagaaaagcttcaaaatagacctgtggcagatgtcacatgagtagaatttctgcccagccttaactgcattcagaggataatatcaatgaactaaacttgaactaaaaattttttaaacaaaaagttataaatgaagacacatggttgtgaatacaatgatgtatttctttattttcacatacactctagctaaaagagcaagagtacacatcaacaaaaatggaaacaaggctttggctgaaaaaaacatgcatttgacaaatcatgttaatagctagacaagaagaaagttagctttgtaaacttctacttcatttgattcagagaaacagagcatgagttttcttaaaagtaacaagaaaaggaacaaaaaaaatgaggtttgaaatcttttaccatggcaaaacattaacatctttctcaaaaacatagagaaatctggaaaaatcaagaagataaaattctggaccagttagtgacattctttcaagcatacttgtaaaatgtttccttaaagtgttcttgggatgaaaatgattgtcatgtctccaacaacagtgaactgatgttgttccttggaataaaagtcaatccccacctta

SEQ ID NO: 367501 - DNA, 2497 bp, Homo sapiens
  misc_feature (265)..(265): n is a, c, g, or t
gtcctgtatgtgggagtagtgacaaaacagcacatggtgtgatagaatgagatggactggagggggaggtaaacataactgtgtcaagtcggtgactcatgagaacaagaggtctaacggctcctcgccaggaaatcatgagctcactaaggatgatcatgagagaggacaaggaaaggaagccaatgctgaagctgagggaattacacaaaatagtccagatacacacatgcagagattacgggaaaggtgccagccactgggngaaaaatcactttttatctgaagagaaaaaagtatattaggaaaacacacttcaagctaagaagagattggttgcaaagttttttcaaattgtaatattgaagtacacacctcctagctttgtggtatggcaagtgggttatagctaatttaaaattaacccaaaaaatgacaaaattttgtcttccagttcatcttaaaactaaattcctgaaaacaatcttgagtaccacaatttttaaaaactaattacactgacatttccagttcctgggtcctagttatcaaggctgtgtgtgtgtgtgtgtgtgtgtgtgtgtgtgtgtgtgtacaatataaaccaaatacaaccagatccattaacacttgatgaatttaggtgaaactctcacttacgtatggaaaatcccagaaagatctggagctggaacagaggattctgcttgtattccatgggcttattattcaactgtggatcaagttaaggacctctacagtggattaattggccccctgattgtttgtcgaagaccttacttgaaagtattcaatcccagaaggaaactggaatttgcccttctgtttctagtttttgatgagaatgaatcttggtacttagatgacaacatcaaaacatactctgatcaccccgagaaagtaaacaaagatgatgaggaattcatagaaagcaataaaatgcatgctattaatggaagaatgtttggaaacctacaaggcctcacaatgcacgtgggagatgaagtcaactggtatctgatgggaatgggcaatgaaatagacttacacactgtacattttcacggccatagcttccaatacaagcacaggggagtttatagttctgatgtctttgacattttccctggaacataccaaaccctagaaatgtttccaagaacacctggaatttggttactccactgccatgtgaccgaccacattcatgctggaatggaaaccacttacaccgttctacaaaatgaagacaccaaatctggctgaatgaaataaattggtgataagtggaaaaaagagaaaaaccaatgattcataacaatgtatgtgaaagtgtaaaatagaatgttactttggaatgactataaacattaaaagaagactggaagcatacaactttgtacatttgtgggggaaaactattaattttttgcaaatggaaagatcaacagactatataatgatacatgactgacacttgtacactaggtaataaaactgattcatacagtctaatgatatcaccgctgttagggttttataaaactgcatttaaaaaaagatctatgaccagatattctcctgggtgctcctcaaaggaacactattaaggttcattgaaatgttttcaatcattgccttcccattgatccttctaacatgctgttgacatcacacctaatattcagagggaatgggcaaggtatgagggaaggaaataaaaaataaaataaataaaatagaatgacacaaatttgagttttgtgaacccctgaacagatggtcttaaggacgttatctggaactggagaaaagcagagttgagagacaattctatagattaaatcctggtaaggacaaacattgccattagaagaaaagcttcaaaatagacctgtggcagatgtcacatgagtagaatttctgcccagccttaactgcattcagaggataatatcaatgaactaaacttgaactaaaaattttttaaacaaaaagttataaatgaagacacatggttgtgaatacaatgatgtatttctttattttcacatacactctagctaaaagagcaagagtacacatcaacaaaaatggaaacaaggctttggctgaaaaaaacatgcatttgacaaatcatgttaatagctagacaagaagaaagttagctttgtaaacttctacttcatttgattcagagaaacagagcatgagttttcttaaaagtaacaagaaaaggaacaaaaaaaatgaggtttgaaatcttttaccatggcaaaacattaacatctttctcaaaaacatagagaaatctggaaaaatcaagaagataaaattctggaccagttagtgacattctttcaagcatacttgtaaaatgtttccttaaagtgttcttgggatgaaaatgattgtcatgtctccaacaacagtgaactgatgttgttccttggaataaaagtcaatccccacctta

SEQ ID NO: 367502 - DNA, 6305 bp, Homo sapiens
agagaagcctggcaaccaagaactgtttttttggtggtttacgagaacttaactgaattggaaaatatttgctttaatgaaacaatttactcttgtgcaacactaaattgtgtcaatcaagcaaataaggaagaaagtcttatttataaaattgcctgctcctgattttacttcatttcttctcaggctccaagaaggggaaaaaaatgaagattttgatacttggtatttttctgtttttatgtagtaccccagcctgggcgaaagaaaagcattattacattggaattattgaaacgacttgggattatgcctctgaccatggggaaaagaaacttatttctgttgacacggaacattccaatatctatcttcaaaatggcccagatagaattgggagactatataagaaggccctttatcttcagtacacagatgaaacctttaggacaactatagaaaaaccggtctggcttgggtttttaggccctattatcaaagctgaaactggagataaagtttatgtacacttaaaaaaccttgcctctaggccctacacctttcattcacatggaataacttactataaggaacatgagggggccatctaccctgataacaccacagattttcaaagagcagatgacaaagtatatccaggagagcagtatacatacatgttgcttgccactgaagaacaaagtcctggggaaggagatggcaattgtgtgactaggatttaccattcccacattgatgctccaaaagatattgcctcaggactcatcggacctttaataatctgtaaaaaagattctctagataaagaaaaagaaaaacatattgaccgagaatttgtggtgatgttttctgtggtggatgaaaatttcagctggtacctagaagacaacattaaaacctactgctcagaaccagagaaagttgacaaagacaacgaagacttccaggagagtaacagaatgtattctgtgaatggatacacttttggaagtctcccaggactctccatgtgtgctgaagacagagtaaaatggtacctttttggtatgggtaatgaagttgatgtgcacgcagctttctttcacgggcaagcactgactaacaagaactaccgtattgacacaatcaacctctttcctgctaccctgtttgatgcttatatggtggcccagaaccctggagaatggatgctcagctgtcagaatctaaaccatctgaaagccggtttgcaagcctttttccaggtccaggagtgtaacaagtcttcatcaaaggataatatccgtgggaagcatgttagacactactacattgccgctgaggaaatcatctggaactatgctccctctggtatagacatcttcactaaagaaaacttaacagcacctggaagtgactcagcggtgttttttgaacaaggtaccacaagaattggaggctcttataaaaagctggtttatcgtgagtacacagatgcctccttcacaaatcgaaaggagagaggccctgaagaagagcatcttggcatcctgggtcctgtcatttgggcagaggtgggagacaccatcagagtaaccttccataacaaaggagcatatcccctcagtattgagccgattggggtgagattcaataagaacaacgagggcacatactattccccaaattacaacccccagagcagaagtgtgcctccttcagcctcccatgtggcacccacagaaacattcacctatgaatggactgtccccaaagaagtaggacccactaatgcagatcctgtgtgtctagctaagatgtattattctgctgtggatcccactaaagatatattcactgggcttattgggccaatgaaaatatgcaagaaaggaagtttacatgcaaatgggagacagaaagatgtagacaaggaattctatttgtttcctacagtatttgatgagaatgagagtttactcctggaagataatattagaatgtttacaactgcacctgatcaggtggataaggaagatgaagactttcaggaatctaataaaatgcactccatgaatggattcatgtatgggaatcagccgggtctcactatgtgcaaaggagattcggtcgtgtggtacttattcagcgccggaaatgaggccgatgtacatggaatatacttttcaggaaacacatatctgtggagaggagaacggagagacacagcaaacctcttccctcaaacaagtcttacgctccacatgtggcctgacacagaggggacttttaatgttgaatgccttacaactgatcattacacaggcggcatgaagcaaaaatatactgtgaaccaatgcaggcggcagtctgaggattccaccttctacctgggagagaggacatactatatcgcagcagtggaggtggaatgggattattccccacaaagggagtgggaaaaggagctgcatcatttacaagagcagaatgtttcaaatgcatttttagataagggagagttttacataggctcaaagtacaagaaagttgtgtatcggcagtatactgatagcacattccgtgttccagtggagagaaaagctgaagaagaacatctgggaattctaggtccacaacttcatgcagatgttggagacaaagtcaaaattatctttaaaaacatggccacaaggccctactcaatacatgcccatggggtacaaacagagagttctacagttactccaacattaccaggtgaaactctcacttacgtatggaaaatcccagaaagatctggagctggaacagaggattctgcttgtattccatgggcttattattcaactgtggatcaagttaaggacctctacagtggattaattggccccctgattgtttgtcgaagaccttacttgaaagtattcaatcccagaaggaaactggaatttgcccttctgtttctagtttttgatgagaatgaatcttggtacttagatgacaacatcaaaacatactctgatcaccccgagaaagtaaacaaagatgatgaggaattcatagaaagcaataaaatgcatgctattaatggaagaatgtttggaaacctacaaggcctcacaatgcacgtgggagatgaagtcaactggtatctgatgggaatgggcaatgaaatagacttacacactacacacacacttaaaatggagaaaaatgaacagtttttttggtaagattcctgcactgtggctgcaggctttggtctttcctgggtctttcgagttgaggattgttgtaattagaaatggtaaattcaaagggaggaaattatgtaaagaaaaccaatctatgtctttcctccctaaaatggggaaaaagggaacatacaaatgaagaaaatataaatgtaaatatatttgaagatttaaaaagccctgaaaggttaacctttagtgcaaatggaaagttttaatttctgctcctgggtcttacacaaacaacttacatcatgaaaaactatttccattaatgccctttttattagagcagtcactgataacactagaatatcaaagactctaacagacaagccactaaatttaacgccaataacttgaacaaagtgaagagagccaaatatgagaaagaaaactttagtctttaaataacacttgcaaccatgtggttacatgtggttgcatgtaaaccacacaaaaggatggtcttgctcaaaaaaataatggtgagtaagtaacatggaggcatttggggaattcatgtgtgcaaatgcctggcatgcagagtatggcactacagggtaaccctacacacacagccacagagaagattcctcctgtgtaacaaccgtgaaagaagagggagattactgcgttggttaagaaaggcgagatagtttttaaagctatagtaaaaattacagaacaaatagcaaatatgaagtaaaaatcaacactagataaaaaattaaagagaaatttgacttttgcaaagagaaaaggtattgcatgagactgaaagcagcagactgaataaaaaaagatagtttgaactatctttggcccataaaatcagtggccatgtttatcagtctgaatcatctttaaataagtccaataaagctttgagcaagtttacattaattatgagtcttagaaaagcctgcttagctttaaatttcttacaggcagggactatatattctgtatttctagctaagtacccaaatccaatacaatagtttgcttactgaatgtataacaacatattaattcaatgaagagaaacttttgaaacttttttgacataatttcagattcccatatacctttcacccagattccccaaatattaatgatgtgcgtagccacattggctttctcattcttttccctatctccctctcatgctcaccctctatatgtacacacacagacgtgtatagatacacatacaactatctttcctaaaaacaagaatattcttgtacatgaccacaatacaatgatcgaaattagaaaagcaacaatgatttaaaaactagagatcttcaaatttcgctaataatcctaatcatgttctttacagatctgaataattccttaatacagggcactttgtagaatgtccttcaatttgagtttgtctaatgtttccttatgattagatttaggttatgcacttttggcaagactatcatggcatgatgttgtgtttttcttagtacaccatatcaggaggcacaagatattgatcagttctattactggttatgttaacttcaagctttggttaagatggtgtctgccaggtgtctccattgtaaagttattcattttccctttacaattaataaagatcttgtagggaagaaagtaatctttctttaaataaagcagcaatagaatgagagatttttaaacatataaaaagcagaaaaatataaatgaatcaggagtaaagtaacattaaaaattggaatacatttaaagaaccatctactaatttctaaccatatattatttttaataatggtcttaaaatttctttttctatagacaccaaatctggctgaatgaaataaattggtgataagtggaaaaaagagaaaaaccaatgattcataacaatgtatgtgaaagtgtaaaatagaatgttactttggaatgactataaacattaaaagaagactggaagcatacaactttgtacatttgtgggggaaaactattaattttttgcaaatggaaagatcaacagactatataatgatacatgactgacacttgtacactaggtaataaaactgattcatacagtctaatgatatcaccgctgttagggttttataaaactgcatttaaaaaaagatctatgaccagatattctcctgggtgctcctcaaaggaacactattaaggttcattgaaatgttttcaatcattgccttcccattgatccttctaacatgctgttgacatcacacctaatattcagagggaatgggcaaggtatgagggaaggaaataaaaaataaaataaataaaatagaatgacacaaatttgagttttgtgaacccctgaacagatggtcttaaggacgttatctggaactggagaaaagcagagttgagagacaattctatagattaaatcctggtaaggacaaacattgccattagaagaaaagcttcaaaatagacctgtggcagatgtcacatgagtagaatttctgcccagccttaactgcattcagaggataatatcaatgaactaaacttgaactaaaaattttttaaacaaaaagttataaatgaagacacatggttgtgaatacaatgatgtatttctttattttcacatacactctagctaaaagagcaagagtacacatcaacaaaaatggaaacaaggctttggctgaaaaaaacatgcatttgacaaatcatgttaatagctagacaagaagaaagttagctttgtaaacttctacttcatttgattcagagaaacagagcatgagttttcttaaaagtaacaagaaaaggaacaaaaaaaatgaggtttgaaatcttttaccatggcaaaacattaacatctttctcaaaaacatagagaaatctggaaaaatcaagaagataaaattctggaccagttagtgacattctttcaagcatacttgtaaaatgtttccttaaagtgttcttgggatgaaaatgattgtcatgtctccaacaacagtgaactgatgttgttccttggaataaaagtcaatccccacctta

SEQ ID NO: 367503 - DNA, 3960 bp, Homo sapiens
agagaagcctggcaaccaagaactgtttttttggtggtttacgagaacttaactgaattggaaaatatttgctttaatgaaacaatttactcttgtgcaacactaaattgtgtcaatcaagcaaataaggaagaaagtcttatttataaaattgcctgctcctgattttacttcatttcttctcaggctccaagaaggggaaaaaaatgaagattttgatacttggtatttttctgtttttatgtagtaccccagcctgggcgaaagaaaagcattattacattggaattattgaaacgacttgggattatgcctctgaccatggggaaaagaaacttatttctgttgacacggaacattccaatatctatcttcaaaatggcccagatagaattgggagactatataagaaggccctttatcttcagtacacagatgaaacctttaggacaactatagaaaaaccggtctggcttgggtttttaggccctattatcaaagctgaaactggagataaagtttatgtacacttaaaaaaccttgcctctaggccctacacctttcattcacatggaataacttactataaggaacatgagggggccatctaccctgataacaccacagattttcaaagagcagatgacaaagtatatccaggagagcagtatacatacatgttgcttgccactgaagaacaaagtcctggggaaggagatggcaattgtgtgactaggatttaccattcccacattgatgctccaaaagatattgcctcaggactcatcggacctttaataatctgtaaaaaagattctctagataaagaaaaagaaaaacatattgaccgagaatttgtggtgatgttttctgtggtggatgaaaatttcagctggtacctagaagacaacattaaaacctactgctcagaaccagagaaagttgacaaagacaacgaagacttccaggagagtaacagaatgtattctgtgaatggatacacttttggaagtctcccaggactctccatgtgtgctgaagacagagtaaaatggtacctttttggtatgggtaatgaagttgatgtgcacgcagctttctttcacgggcaagcactgactaacaagaactaccgtattgacacaatcaacctctttcctgctaccctgtttgatgcttatatggtggcccagaaccctggagaatggatgctcagctgtcagaatctaaaccatctgaaagccggtttgcaagcctttttccaggtccaggagtgtaacaagtcttcatcaaaggataatatccgtgggaagcatgttagacactactacattgccgctgaggaaatcatctggaactatgctccctctggtatagacatcttcactaaagaaaacttaacagcacctggaagtgactcagcggtgttttttgaacaaggtaccacaagaattggaggctcttataaaaagctggtttatcgtgagtacacagatgcctccttcacaaatcgaaaggagagaggccctgaagaagagcatcttggcatcctgggtcctgtcatttgggcagaggtgggagacaccatcagagtaaccttccataacaaaggagcatatcccctcagtattgagccgattggggtgagattcaataagaacaacgagggcacatactattccccaaattacaacccccagagcagaagtgtgcctccttcagcctcccatgtggcacccacagaaacattcacctatgaatggactgtccccaaagaagtaggacccactaatgcagatcctgtgtgtctagctaagatgtattattctgctgtggatcccactaaagatatattcactgggcttattgggccaatgaaaatatgcaagaaaggaagtttacatgcaaatgggagacagaaagatgtagacaaggaattctatttgtttcctacagtatttgatgagaatgagagtttactcctggaagataatattagaatgtttacaactgcacctgatcaggtggataaggaagatgaagactttcaggaatctaataaaatgcactccatgaatggattcatgtatgggaatcagccgggtctcactatgtgcaaaggagattcggtcgtgtggtacttattcagcgccggaaatgaggccgatgtacatggaatatacttttcaggaaacacatatctgtggagaggagaacggagagacacagcaaacctcttccctcaaacaagtcttacgctccacatgtggcctgacacagaggggacttttaatgttgaatgccttacaactgatcattacacaggcggcatgaagcaaaaatatactgtgaaccaatgcaggcggcagtctgaggattccaccttctacctgggagagaggacatactatatcgcagcagtggaggtggaatgggattattccccacaaagggagtgggaaaaggagctgcatcatttacaagagcagaatgtttcaaatgcatttttagataagggagagttttacataggctcaaagtacaagaaagttgtgtatcggcagtatactgatagcacattccgtgttccagtggagagaaaagctgaagaagaacatctgggaattctaggtccacaacttcatgcagatgttggagacaaagtcaaaattatctttaaaaacatggccacaaggccctactcaatacatgcccatggggtacaaacagagagttctacagttactccaacattaccaggtgaaactctcacttacgtatggaaaatcccagaaagatctggagctggaacagaggattctgcttgtattccatgggcttattattcaactgtggatcaagttaaggacctctacagtggattaattggccccctgattgtttgtcgaagaccttacttgaaagtattcaatcccagaaggaaactggaatttgcccttctgtttctagtttttgatgagaatgaatcttggtacttagatgacaacatcaaaacatactctgatcaccccgagaaagtaaacaaagatgatgaggaattcatagaaagcaataaaatgcatgctattaatggaagaatgtttggaaacctacaaggcctcacaatgcacgtgggagatgaagtcaactggtatctgatgggaatgggcaatgaaatagacttacacactgtacattttcacggccatagcttccaatacaagcacaggggagtttatagttctgatgtctttgacattttccctggaacataccaaaccctagaaatgtttccaagaacacctggaatttggttactccactgccatgtgaccgaccacattcatgctggaatggaaaccacttacaccgttctacaaaatgaagcatcttctgagactcacaggagaatatggaatgtgatctacccaatcacagtcagtgtgattattttattccaaatatctaccaaggaatgaccaggagaataagatcctccgatgttcgcaatggtgtggtgtcaggaggctgcctcttagacaatctccagatgtactgtgatgtgagtttgaaaaagagttcctgaagtaccacatctgggagacatgccactagctgagcttcccaaaagtctaccaagagctgaggaattgtatcttcatccttagcacaaagcaccttaaaaacagtaaaaggagcctctatattccagataaatatagcactgataaagcgacagctgggctgaatatcacagcatcacatgggccacgcaatcaataatttaccattagcattagcgccatggcaaaagcaaatttagacatttttaaaaggaaacagattctaggatgtacaaataaagtttctacagatatagtcttttaattagtacttttatcttataaactgattatgtatgtctgttttttcaataaacaaacaaatgaaaaaaaaaat

SEQ ID NO: 367504 - DNA, 5279 bp, Homo sapiens
agagaagcctggcaaccaagaactgtttttttggtggtttacgagaacttaactgaattggaaaatatttgctttaatgaaacaatttactcttgtgcaacactaaattgtgtcaatcaagcaaataaggaagaaagtcttatttataaaattgcctgctcctgattttacttcatttcttctcaggctccaagaaggggaaaaaaatgaagattttgatacttggtatttttctgtttttatgtagtaccccagcctgggcgaaagaaaagcattattacattggaattattgaaacgacttgggattatgcctctgaccatggggaaaagaaacttatttctgttgacacggaacattccaatatctatcttcaaaatggcccagatagaattgggagactatataagaaggccctttatcttcagtacacagatgaaacctttaggacaactatagaaaaaccggtctggcttgggtttttaggccctattatcaaagctgaaactggagataaagtttatgtacacttaaaaaaccttgcctctaggccctacacctttcattcacatggaataacttactataaggaacatgagggggccatctaccctgataacaccacagattttcaaagagcagatgacaaagtatatccaggagagcagtatacatacatgttgcttgccactgaagaacaaagtcctggggaaggagatggcaattgtgtgactaggatttaccattcccacattgatgctccaaaagatattgcctcaggactcatcggacctttaataatctgtaaaaaagattctctagataaagaaaaagaaaaacatattgaccgagaatttgtggtgatgttttctgtggtggatgaaaatttcagctggtacctagaagacaacattaaaacctactgctcagaaccagagaaagttgacaaagacaacgaagacttccaggagagtaacagaatgtattctgtgaatggatacacttttggaagtctcccaggactctccatgtgtgctgaagacagagtaaaatggtacctttttggtatgggtaatgaagttgatgtgcacgcagctttctttcacgggcaagcactgactaacaagaactaccgtattgacacaatcaacctctttcctgctaccctgtttgatgcttatatggtggcccagaaccctggagaatggatgctcagctgtcagaatctaaaccatctgaaagccggtttgcaagcctttttccaggtccaggagtgtaacaagtcttcatcaaaggataatatccgtgggaagcatgttagacactactacattgccgctgaggaaatcatctggaactatgctccctctggtatagacatcttcactaaagaaaacttaacagcacctggaagtgactcagcggtgttttttgaacaaggtaccacaagaattggaggctcttataaaaagctggtttatcgtgagtacacagatgcctccttcacaaatcgaaaggagagaggccctgaagaagagcatcttggcatcctgggtcctgtcatttgggcagaggtgggagacaccatcagagtaaccttccataacaaaggagcatatcccctcagtattgagccgattggggtgagattcaataagaacaacgagggcacatactattccccaaattacaacccccagagcagaagtgtgcctccttcagcctcccatgtggcacccacagaaacattcacctatgaatggactgtccccaaagaagtaggacccactaatgcagatcctgtgtgtctagctaagatgtattattctgctgtggatcccactaaagatatattcactgggcttattgggccaatgaaaatatgcaagaaaggaagtttacatgcaaatgggagacagaaagatgtagacaaggaattctatttgtttcctacagtatttgatgagaatgagagtttactcctggaagataatattagaatgtttacaactgcacctgatcaggtggataaggaagatgaagactttcaggaatctaataaaatgcactccatgaatggattcatgtatgggaatcagccgggtctcactatgtgcaaaggagattcggtcgtgtggtacttattcagcgccggaaatgaggccgatgtacatggaatatacttttcaggaaacacatatctgtggagaggagaacggagagacacagcaaacctcttccctcaaacaagtcttacgctccacatgtggcctgacacagaggggacttttaatgttgaatgccttacaactgatcattacacaggcggcatgaagcaaaaatatactgtgaaccaatgcaggcggcagtctgaggattccaccttctacctgggagagaggacatactatatcgcagcagtggaggtggaatgggattattccccacaaagggagtgggaaaaggagctgcatcatttacaagagcagaatgtttcaaatgcatttttagataagggagagttttacataggctcaaagtacaagaaagttgtgtatcggcagtatactgatagcacattccgtgttccagtggagagaaaagctgaagaagaacatctgggaattctaggtccacaacttcatgcagatgttggagacaaagtcaaaattatctttaaaaacatggccacaaggccctactcaatacatgcccatggggtacaaacagagagttctacagttactccaacattaccaggtgaaactctcacttacgtatggaaaatcccagaaagatctggagctggaacagaggattctgcttgtattccatgggcttattattcaactgtggatcaagttaaggacctctacagtggattaattggccccctgattgtttgtcgaagaccttacttgaaagtattcaatcccagaaggaaactggaatttgcccttctgtttctagtttttgatgagaatgaatcttggtacttagatgacaacatcaaaacatactctgatcaccccgagaaagtaaacaaagatgatgaggaattcatagaaagcaataaaatgcatgctattaatggaagaatgtttggaaacctacaaggcctcacaatgcacgtgggagatgaagtcaactggtatctgatgggaatgggcaatgaaatagacttacacactacacacacacttaaaatggagaaaaatgaacagtttttttggtaagattcctgcactgtggctgcaggctttggtctttcctgggtctttcgagttgaggattgttgtaattagaaatggtaaattcaaagggaggaaattatgtaaagaaaaccaatctatgtctttcctccctaaaatggggaaaaagggaacatacaaatgaagaaaatataaatgtaaatatatttgaagatttaaaaagccctgaaaggttaacctttagtgcaaatggaaagttttaatttctgctcctgggtcttacacaaacaacttacatcatgaaaaactatttccattaatgccctttttattagagcagtcactgataacactagaatatcaaagactctaacagacaagccactaaatttaacgccaataacttgaacaaagtgaagagagccaaatatgagaaagaaaactttagtctttaaataacacttgcaaccatgtggttacatgtggttgcatgtaaaccacacaaaaggatggtcttgctcaaaaaaataatggtgagtaagtaacatggaggcatttggggaattcatgtgtgcaaatgcctggcatgcagagtatggcactacagggtaaccctacacacacagccacagagaagattcctcctgtgtaacaaccgtgaaagaagagggagattactgcgttggttaagaaaggcgagatagtttttaaagctatagtaaaaattacagaacaaatagcaaatatgaagtaaaaatcaacactagataaaaaattaaagagaaatttgacttttgcaaagagaaaaggtattgcatgagactgaaagcagcagactgaataaaaaaagatagtttgaactatctttggcccataaaatcagtggccatgtttatcagtctgaatcatctttaaataagtccaataaagctttgagcaagtttacattaattatgagtcttagaaaagcctgcttagctttaaatttcttacaggcagggactatatattctgtatttctagctaagtacccaaatccaatacaatagtttgcttactgaatgtataacaacatattaattcaatgaagagaaacttttgaaacttttttgacataatttcagattcccatatacctttcacccagattccccaaatattaatgatgtgcgtagccacattggctttctcattcttttccctatctccctctcatgctcaccctctatatgtacacacacagacgtgtatagatacacatacaactatctttcctaaaaacaagaatattcttgtacatgaccacaatacaatgatcgaaattagaaaagcaacaatgatttaaaaactagagatcttcaaatttcgctaataatcctaatcatgttctttacagaaaaagaaaatcccggatcatgtactgcattgttgccatgtcttttaagtctcctttactctgaataattccttaatacagggcactttgtagaatgtccttcaatttgagtttgtctaatgtttccttatgattagatttaggttatgcacttttggcaagactatcatggcatgatgttgtgtttttcttagtacaccatatcaggaggcacaagatattgatcagttctattactggttatgttaacttcaagctttggttaagatggtgtctgccaggtgtctccattgtaaagttattcattttccctttacaattaataaagatcttgtagggaagaaagtaatctttctttaaataaagcagcaatagaatgagagatttttaaacatataaaaagcagaaaaatataaatgaatcaggagtaaagtaacattaaaaattggaatacatttaaagaaccatctactaatttctaaccatatattatttttaataatggtcttaaaatttctttttctatagacaccaaatctggctgaatgaaataaattggtgataagtggaaaaaagagaaaaaccaatgattcataacaatgtatgtgaaagtgtaaaatagaatgttactttggaatgactataaacattaaaagaagactggaagcata

SEQ ID NO: 367505 - DNA, 3652 bp, Homo sapiens
agagaagcctggcaaccaagaactgtttttttggtggtttacgagaacttaactgaattggaaaatatttgctttaatgaaacaatttactcttgtgcaacactaaattgtgtcaatcaagcaaataaggaagaaagtcttatttataaaattgcctgctcctgattttacttcatttcttctcaggctccaagaaggggaaaaaaatgaagattttgatacttggtatttttctgtttttatgtagtaccccagcctgggcgaaagaaaagcattattacattggaattattgaaacgacttgggattatgcctctgaccatggggaaaagaaacttatttctgttgacacggaacattccaatatctatcttcaaaatggcccagatagaattgggagactatataagaaggccctttatcttcagtacacagatgaaacctttaggacaactatagaaaaaccggtctggcttgggtttttaggccctattatcaaagctgaaactggagataaagtttatgtacacttaaaaaaccttgcctctaggccctacacctttcattcacatggaataacttactataaggaacatgagggggccatctaccctgataacaccacagattttcaaagagcagatgacaaagtatatccaggagagcagtatacatacatgttgcttgccactgaagaacaaagtcctggggaaggagatggcaattgtgtgactaggatttaccattcccacattgatgctccaaaagatattgcctcaggactcatcggacctttaataatctgtaaaaaagattctctagataaagaaaaagaaaaacatattgaccgagaatttgtggtgatgttttctgtggtggatgaaaatttcagctggtacctagaagacaacattaaaacctactgctcagaaccagagaaagttgacaaagacaacgaagacttccaggagagtaacagaatgtattctgtgaatggatacacttttggaagtctcccaggactctccatgtgtgctgaagacagagtaaaatggtacctttttggtatgggtaatgaagttgatgtgcacgcagctttctttcacgggcaagcactgactaacaagaactaccgtattgacacaatcaacctctttcctgctaccctgtttgatgcttatatggtggcccagaaccctggagaatggatgctcagctgtcagaatctaaaccatctgaaagccggtttgcaagcctttttccaggtccaggagtgtaacaagtcttcatcaaaggataatatccgtgggaagcatgttagacactactacattgccgctgaggaaatcatctggaactatgctccctctggtatagacatcttcactaaagaaaacttaacagcacctggaagtgactcagcggtgttttttgaacaaggtaccacaagaattggaggctcttataaaaagctggtttatcgtgagtacacagatgcctccttcacaaatcgaaaggagagaggccctgaagaagagcatcttggcatcctgggtcctgtcatttgggcagaggtgggagacaccatcagagtaaccttccataacaaaggagcatatcccctcagtattgagccgattggggtgagattcaataagaacaacgagggcacatactattccccaaattacaacccccagagcagaagtgtgcctccttcagcctcccatgtggcacccacagaaacattcacctatgaatggactgtccccaaagaagtaggacccactaatgcagatcctgtgtgtctagctaagatgtattattctgctgtggatcccactaaagatatattcactgggcttattgggccaatgaaaatatgcaagaaaggaagtttacatgcaaatgggagacagaaagatgtagacaaggaattctatttgtttcctacagtatttgatgagaatgagagtttactcctggaagataatattagaatgtttacaactgcacctgatcaggtggataaggaagatgaagactttcaggaatctaataaaatgcactccatgaatggattcatgtatgggaatcagccgggtctcactatgtgcaaaggagattcggtcgtgtggtacttattcagcgccggaaatgaggccgatgtacatggaatatacttttcaggaaacacatatctgtggagaggagaacggagagacacagcaaacctcttccctcaaacaagtcttacgctccacatgtggcctgacacagaggggacttttaatgttgaatgccttacaactgatcattacacaggcggcatgaagcaaaaatatactgtgaaccaatgcaggcggcagtctgaggattccaccttctacctgggagagaggacatactatatcgcagcagtggaggtggaatgggattattccccacaaagggagtgggaaaaggagctgcatcatttacaagagcagaatgtttcaaatgcatttttagataagggagagttttacataggctcaaagtacaagaaagttgtgtatcggcagtatactgatagcacattccgtgttccagtggagagaaaagctgaagaagaacatctgggaattctaggtccacaacttcatgcagatgttggagacaaagtcaaaattatctttaaaaacatggccacaaggccctactcaatacatgcccatggggtacaaacagagagttctacagttactccaacattaccaggtgaaactctcacttacgtatggaaaatcccagaaagatctggagctggaacagaggattctgcttgtattccatgggcttattattcaactgtggatcaagttaaggacctctacagtggattaattggccccctgattgtttgtcgaagaccttacttgaaagtattcaatcccagaaggaaactggaatttgcccttctgtttctagtttttgatgagaatgaatcttggtacttagatgacaacatcaaaacatactctgatcaccccgagaaagtaaacaaagatgatgaggaattcatagaaagcaataaaatgcatgctattaatggaagaatgtttggaaacctacaaggcctcacaatgcacgtgggagatgaagtcaactggtatctgatgggaatgggcaatgaaatagacttacacactgtacattttcacggccatagcttccaatacaagcacaggggagtttatagttctgatgtctttgacattttccctggaacataccaaaccctagaaatgtttccaagaacacctggaatttggttactccactgccatgtgaccgaccacattcatgctggaatggaaaccacttacaccgttctacaaaatgaaggtgaatatccaggtagtaattctagaagccatatataaaagatataactaaaggaactactttgcctaaatacttcccccaatatgatgcatcaatatgaagcatttgtgaatctgctgccctgatttcttccttctctacctccaaacaggatttttttcctgctaaatggtgagggatactgctcatttcctgacagccagtacttgtaacagcaccagtcatttctaagttaatacaaatgtgtaattatacttaaagctga

SEQ ID NO: 367506 - DNA, 3469 bp, Homo sapiens
agagaagcctggcaaccaagaactgtttttttggtggtttacgagaacttaactgaattggaaaatatttgctttaatgaaacaatttactcttgtgcaacactaaattgtgtcaatcaagcaaataaggaagaaagtcttatttataaaattgcctgctcctgattttacttcatttcttctcaggctccaagaaggggaaaaaaatgaagattttgatacttggtatttttctgtttttatgtagtaccccagcctgggcgaaagaaaagcattattacattggaattattgaaacgacttgggattatgcctctgaccatggggaaaagaaacttatttctgttgacacggaacattccaatatctatcttcaaaatggcccagatagaattgggagactatataagaaggccctttatcttcagtacacagatgaaacctttaggacaactatagaaaaaccggtctggcttgggtttttaggccctattatcaaagctgaaactggagataaagtttatgtacacttaaaaaaccttgcctctaggccctacacctttcattcacatggaataacttactataaggaacatgagggggccatctaccctgataacaccacagattttcaaagagcagatgacaaagtatatccaggagagcagtatacatacatgttgcttgccactgaagaacaaagtcctggggaaggagatggcaattgtgtgactaggatttaccattcccacattgatgctccaaaagatattgcctcaggactcatcggacctttaataatctgtaaaaaagattctctagataaagaaaaagaaaaacatattgaccgagaatttgtggtgatgttttctgtggtggatgaaaatttcagctggtacctagaagacaacattaaaacctactgctcagaaccagagaaagttgacaaagacaacgaagacttccaggagagtaacagaatgtattctgtgaatggatacacttttggaagtctcccaggactctccatgtgtgctgaagacagagtaaaatggtacctttttggtatgggtaatgaagttgatgtgcacgcagctttctttcacgggcaagcactgactaacaagaactaccgtattgacacaatcaacctctttcctgctaccctgtttgatgcttatatggtggcccagaaccctggagaatggatgctcagctgtcagaatctaaaccatctgaaagccggtttgcaagcctttttccaggtccaggagtgtaacaagtcttcatcaaaggataatatccgtgggaagcatgttagacactactacattgccgctgaggaaatcatctggaactatgctccctctggtatagacatcttcactaaagaaaacttaacagcacctggaagtgactcagcggtgttttttgaacaaggtaccacaagaattggaggctcttataaaaagctggtttatcgtgagtacacagatgcctccttcacaaatcgaaaggagagaggccctgaagaagagcatcttggcatcctgggtcctgtcatttgggcagaggtgggagacaccatcagagtaaccttccataacaaaggagcatatcccctcagtattgagccgattggggtgagattcaataagaacaacgagggcacatactattccccaaattacaacccccagagcagaagtgtgcctccttcagcctcccatgtggcacccacagaaacattcacctatgaatggactgtccccaaagaagtaggacccactaatgcagatcctgtgtgtctagctaagatgtattattctgctgtggatcccactaaagatatattcactgggcttattgggccaatgaaaatatgcaagaaaggaagtttacatgcaaatgggagacagaaagatgtagacaaggaattctatttgtttcctacagtatttgatgagaatgagagtttactcctggaagataatattagaatgtttacaactgcacctgatcaggtggataaggaagatgaagactttcaggaatctaataaaatgcactccatgaatggattcatgtatgggaatcagccgggtctcactatgtgcaaaggagattcggtcgtgtggtacttattcagcgccggaaatgaggccgatgtacatggaatatacttttcaggaaacacatatctgtggagaggagaacggagagacacagcaaacctcttccctcaaacaagtcttacgctccacatgtggcctgacacagaggggacttttaatgttgaatgccttacaactgatcattacacaggcggcatgaagcaaaaatatactgtgaaccaatgcaggcggcagtctgaggattccaccttctacctgggagagaggacatactatatcgcagcagtggaggtggaatgggattattccccacaaagggagtgggaaaaggagctgcatcatttacaagagcagaatgtttcaaatgcatttttagataagggagagttttacataggctcaaagtacaagaaagttgtgtatcggcagtatactgatagcacattccgtgttccagtggagagaaaagctgaagaagaacatctgggaattctaggtccacaacttcatgcagatgttggagacaaagtcaaaattatctttaaaaacatggccacaaggccctactcaatacatgcccatggggtacaaacagagagttctacagttactccaacattaccaggtgaaactctcacttacgtatggaaaatcccagaaagatctggagctggaacagaggattctgcttgtattccatgggcttattattcaactgtggatcaagttaaggacctctacagtggattaattggccccctgattgtttgtcgaagaccttacttgaaagtattcaatcccagaaggaaactggaatttgcccttctgtttctagtttttgatgagaatgaatcttggtacttagatgacaacatcaaaacatactctgatcaccccgagaaagtaaacaaagatgatgaggaattcatagaaagcaataaaatgcatgctattaatggaagaatgtttggaaacctacaaggcctcacaatgcacgtgggagatgaagtcaactggtatctgatgggaatgggcaatgaaatagacttacacactgtacattttcacggccatagcttccaatacaagaaatgtttccaagaacacctggaatttggttactccactgccatgtgaccgaccacattcatgctggaatggaaaccacttacaccgttctacaaaatgaagacaccaaatctggctgaatgaaataaattggtgataagtggaaaaaagagaaaaaccaatgattcataacaatgtatgtgaaagtgtaaaatagaatgttactttggaatgactataaacattaaaagaagactggaagcata

SEQ ID NO: 367507 - DNA, 813 bp, Homo sapiens
gagaggaacgttgtgtgtggcagcaaggagcccgcagaggtatgagggaaggaaataaaaaataaaataaataaaatagaatgacacaaatttgagttttgtgaacccctgaacagatggtcttaaggacgttatctggaactggagaaaagcagagttgagagacaattctatagattaaatcctggtaaggacaaacattgccattagaagaaaagcttcaaaatagacctgtggcagatgtcacatgagtagaatttctgcccagccttaactgcattcagaggataatatcaatgaactaaacttgaactaaaaattttttaaacaaaaagttataaatgaagacacatggttgtgaatacaatgatgtatttctttattttcacatacactctagctaaaagagcaagagtacacatcaacaaaaatggaaacaaggctttggctgaaaaaaacatgcatttgacaaatcatgttaatagctagacaagaagaaagttagctttgtaaacttctacttcatttgattcagagaaacagagcatgagttttcttaaaagtaacaagaaaaggaacaaaaaaaatgaggtttgaaatcttttaccatggcaaaacattaacatctttctcaaaaacatagagaaatctggaaaaatcaagaagataaaattctggaccagttagtgacattctttcaagcatacttgtaaaatgtttccttaaagtgttcttgggatgaaaatgattgtcatgtctccaacaacagtgaactgatgttgttccttggaataaaagtcaatccccacctta

SEQ ID NO: 367508 - DNA, 706 bp, Homo sapiens
  misc_feature (59)..(59): n is a, c, g, or t
tggcatgtgaaatatcacggaaaaatccgtcaccatcggagtgtgaaaataattaattngggtattgagtgccatgtgaccgaccacattcatgctggaatggaaaccacttacaccgttctacaaaatgaagcatcttctgagactcacaggagaatatggaatgtgatctacccaatcacagtcagtgtgattattttattccaaatatctaccaaggaatgaccaggagaataagatcctccgatgttcgcaatggtgtggtgtcaggaggctgcctcttagacaatctccagatgtactgtgatgtgagtttgaaaaagagttcctgaagtaccacatctgggagacatgccactagctgagcttcccaaaagtctaccaagagctgaggaattgtatcttcatccttagcacaaagcaccttaaaaacagtaaaaggagcctctatattccagataaatatagcactgataaagcgacagctgggctgaatatcacagcatcacatgggccacgcaatcaataatttaccattagcattagcgccatggcaaaagcaaatttagacatttttaaaaggaaacagattctaggatgtacaaataaagtttctacagatatagtcttttaattagtacttttatcttataaactgattatgtatgtctgttttttcaataaacaaacaaatgaaaaaaaaaat

SEQ ID NO: 367509 - DNA, 2959 bp, Homo sapiens
agagaagcctggcaaccaagaactgtttttttggtggtttacgagaacttaactgaattggaaaatatttgctttaatgaaacaatttactcttgtgcaacactaaattgtgtcaatcaagcaaataaggaagaaagtcttatttataaaattgcctgctcctgattttacttcatttcttctcaggctccaagaaggggaaaaaaatgaagattttgatacttggtatttttctgtttttatgtagtaccccagcctgggcgaaagaaaagcattattacattggaattattgaaacgacttgggattatgcctctgaccatggggaaaagaaacttatttctgttgacacggaacattccaatatctatcttcaaaatggcccagatagaattgggagactatataagaaggccctttatcttcagtacacagatgaaacctttaggacaactatagaaaaaccggtctggcttgggtttttaggccctattatcaaagctgaaactggagataaagtttatgtacacttaaaaaaccttgcctctaggccctacacctttcattcacatggaataacttactataaggaacatgagggggccatctaccctgataacaccacagattttcaaagagcagatgacaaagtatatccaggagagcagtatacatacatgttgcttgccactgaagaacaaagtcctggggaaggagatggcaattgtgtgactaggatttaccattcccacattgatgctccaaaagatattgcctcaggactcatcggacctttaataatctgtaaaaaagattctctagataaagaaaaagaaaaacatattgaccgagaatttgtggtgatgttttctgtggtggatgaaaatttcagctggtacctagaagacaacattaaaacctactgctcagaaccagagaaagttgacaaagacaacgaagacttccaggagagtaacagaatgtattctgtgaatggatacacttttggaagtctcccaggactctccatgtgtgctgaagacagagtaaaatggtacctttttggtatgggtaatgaagttgatgtgcacgcagctttctttcacgggcaagcactgactaacaagaactaccgtattgacacaatcaacctctttcctgctaccctgtttgatgcttatatggtggcccagaaccctggagaatggatgctcagctgtcagaatctaaaccatctgaaagccggtttgcaagcctttttccaggtccaggagtgtaacaagtcttcatcaaaggataatatccgtgggaagcatgttagacactactacattgccgctgaggaaatcatctggaactatgctccctctggtatagacatcttcactaaagaaaacttaacagcacctggaagtgactcagcggtgttttttgaacaaggtaccacaagaattggaggctcttataaaaagctggtttatcgtgagtacacagatgcctccttcacaaatcgaaaggagagaggccctgaagaagagcatcttggcatcctgggtcctgtcatttgggcagaggtgggagacaccatcagagtaaccttccataacaaaggagcatatcccctcagtattgagccgattggggtgagattcaataagaacaacgagggcacatactattccccaaattacaacccccagagcagaagtgtgcctccttcagcctcccatgtggcacccacagaaacattcacctatgaatggactgtccccaaagaagtaggacccactaatgcagatcctgtgtgtctagctaagatgtattattctgctgtggatcccactaaagatatattcactgggcttattgggccaatgaaaatatgcaagaaaggaagtttacatgcaaatgggagacagaaagatgtagacaaggaattctatttgtttcctacagtatttgatgagaatgagagtttactcctggaagataatattagaatgtttacaactgcacctgatcaggtggataaggaagatgaagactttcaggaatctaataaaatgcactccatgaatggattcatgtatgggaatcagccgggtctcactatgtgcaaaggagattcggtcgtgtggtacttattcagcgccggaaatgaggccgatgtacatggaatatacttttcaggaaacacatatctgtggagaggagaacggagagacacagcaaacctcttccctcaaacaagtcttacgctccacatgtggcctgacacagaggggacttttaatgttgaatgccttacaactgatcattacacaggcggcatgaagcaaaaatatactgtgaaccaatgcaggcggcagtctgaggattccaccttctacctgggagagaggacatactatatcgcagcagtggaggtggaatgggattattccccacaaagggagtgggaaaaggagctgcatcatttacaagagcagaatgtttcaaatgcatttttagataagggagagttttacataggctcaaagtacaagaaagttgtgtatcggcagtatactgatagcacattccgtgttccagtggagagaaaagctgaagaagaacatctgggaattctaggtccacaacttcatgcagatgttggagacaaagtcaaaattatctttaaaaacatggccacaaggccctactcaatacatgcccatggggtacaaacagagagttctacagttactccaacattaccaggtgaaactctcacttacgtatggaaaatcccagaaagatctggagctggaacagaggattctgcttgtattccaaggcttctctttggttgagatcttccttgtacggtccgtttccagtaggtcacttgcaataggggctctggtctccattgaccgatatcttctcaagttgagccatagctgtgtcccttcactcc

SEQ ID NO: 367510 - DNA, 1135 bp, Homo sapiens
tgttttgttgttgtgtttttttttgtgaatacaatgatgtatttctttattttcacatacactctagctaaaagagcaagagtacacatcaacaaaaatggaaacaaggctttggctgaaaaaaacatgcatttgacaaatcatgttaatagctagacaagaagaaagttagctttgtaaacttctacttcatttgattcagagaaacagagcatgagttttcttaaaagtaacaagaaaaggaacaaaaaaaatgaggtttgaaatcttttaccatggcaaaacattaacatctttctcaaaaacatagagaaatctggaaaaatcaagaagataaaattctggaccagttagtgacattctttcaagcatacttgtaaaatgtttccttaaagtgttcttgggatgaaaatgattgtcatgtctccaacaacagtgaactgatgttgttccttggaataaaagtcaatccccaccttaaaaaatgtatggcttctttgaggaattcttatgtcttaaagactttttacattctagacaattaaattgattgaggtcataaattaagaagtgaatagttaccactacacggtaaggtaagcagcctgaaagcatttgtatcatatatgtgtgtgtgtgtgtgtgtgtgtgtgtgtgttttgttggtcttttgcctgttagtactggtagaatgaagcttcatgagggctttgtttctattgcctagaaaagttcctattggtggtagtctcttagtatttgttgaatgatgaaataaatggtttaaaatgttctttgttagtaaaaagagattcttattggtggtaaaaatgtgaaagaatatagtttttcagttacagtttctttttttacaaatttgctcccagtcatttcctttaatcagtctttttaccaactttgcaataagtatcacaatgctgcctcctctgtggatgactgatggcaagagtctgaattgaaagaaaaatgggttggaattagaatgaaactatttgtttttatgagtctctgataatgaaagactttcacaaaaggaaagtataacattcacacgtatacatatgtaacaaacctgcacattgtgcacatgtaccctaaaacttaaagtataatt

SEQ ID NO: 367511 - DNA, 3214 bp, Homo sapiens
  misc_feature (2822)..(2822): n is a, c, g, or t
  misc_feature (2829)..(2829): n is a, c, g, or t
  misc_feature (2832)..(2832): n is a, c, g, or t
  misc_feature (2839)..(2839): n is a, c, g, or t
  misc_feature (3011)..(3011): n is a, c, g, or t
agagaagcctggcaaccaagaactgtttttttggtggtttacgagaacttaactgaattggaaaatatttgctttaatgaaacaatttactcttgtgcaacactaaattgtgtcaatcaagcaaataaggaagaaagtcttatttataaaattgcctgctcctgattttacttcatttcttctcaggctccaagaaggggaaaaaaatgaagattttgatacttggtatttttctgtttttatgtagtaccccagcctgggcgaaagaaaagcattattacattggaattattgaaacgacttgggattatgcctctgaccatggggaaaagaaacttatttctgttgacacggaacattccaatatctatcttcaaaatggcccagatagaattgggagactatataagaaggccctttatcttcagtacacagatgaaacctttaggacaactatagaaaaaccggtctggcttgggtttttaggccctattatcaaagctgaaactggagataaagtttatgtacacttaaaaaaccttgcctctaggccctacacctttcattcacatggaataacttactataaggaacatgagggggccatctaccctgataacaccacagattttcaaagagcagatgacaaagtatatccaggagagcagtatacatacatgttgcttgccactgaagaacaaagtcctggggaaggagatggcaattgtgtgactaggatttaccattcccacattgatgctccaaaagatattgcctcaggactcatcggacctttaataatctgtaaaaaagattctctagataaagaaaaagaaaaacatattgaccgagaatttgtggtgatgttttctgtggtggatgaaaatttcagctggtacctagaagacaacattaaaacctactgctcagaaccagagaaagttgacaaagacaacgaagacttccaggagagtaacagaatgtattctgtgaatggatacacttttggaagtctcccaggactctccatgtgtgctgaagacagagtaaaatggtacctttttggtatgggtaatgaagttgatgtgcacgcagctttctttcacgggcaagcactgactaacaagaactaccgtattgacacaatcaacctctttcctgctaccctgtttgatgcttatatggtggcccagaaccctggagaatggatgctcagctgtcagaatctaaaccatctgaaagccggtttgcaagcctttttccaggtccaggagtgtaacaagtcttcatcaaaggataatatccgtgggaagcatgttagacactactacattgccgctgaggaaatcatctggaactatgctccctctggtatagacatcttcactaaagaaaacttaacagcacctggaagtgactcagcggtgttttttgaacaaggtaccacaagaattggaggctcttataaaaagctggtttatcgtgagtacacagatgcctccttcacaaatcgaaaggagagaggccctgaagaagagcatcttggcatcctgggtcctgtcatttgggcagaggtgggagacaccatcagagtaaccttccataacaaaggagcatatcccctcagtattgagccgattggggtgagattcaataagaacaacgagggcacatactattccccaaattacaacccccagagcagaagtgtgcctccttcagcctcccatgtggcacccacagaaacattcacctatgaatggactgtccccaaagaagtaggacccactaatgcagatcctgtgtgtctagctaagatgtattattctgctgtggatcccactaaagatatattcactgggcttattgggccaatgaaaatatgcaagaaaggaagtttacatgcaaatgggagacagaaagatgtagacaaggaattctatttgtttcctacagtatttgatgagaatgagagtttactcctggaagataatattagaatgtttacaactgcacctgatcaggtggataaggaagatgaagactttcaggaatctaataaaatgcactccatgaatggattcatgtatgggaatcagccgggtctcactatgtgcaaaggagattcggtcgtgtggtacttattcagcgccggaaatgaggccgatgtacatggaatatacttttcaggaaacacatatctgtggagaggagaacggagagacacagcaaacctcttccctcaaacaagtcttacgctccacatgtggcctgacacagaggggacttttaatgttgaatgccttacaactgatcattacacaggcggcatgaagcaaaaatatactgtgaaccaatgcaggcggcagtctgaggattccaccttctacctgggagagaggacatactatatcgcagcagtggaggtggaatgggattattccccacaaagggagtgggaaaaggagctgcatcatttacaagagcagaagtaattctccagactctgattcccaatttcagcagtaattttaggtttccttttcagagaagtaagaattacaccaaattttagaaaaaaaaaaaaagttgcattaaacaataacaacaacaacaacaacaacaacaaaacacttcctaggaacttgtccttattcatttccgcttctctcaatttccttaagggaaaatttccatttatcttctttgatcctttggagtcttgctttcttttctactggagtgtcttctcacattcatgtgccctcatgttgtcatttatattcaaacttaactcccatgtggcacccacagaaacattnacctatnaanggactgnccccaaagaagtaggacccactaatgcagatcctgtgtgtctagctaagatgtattattctgctgtggatcccactaaagatatattcactgggcttattgggccaatgtatgcaagaaaggaagtttacatgcaaatgggagacagaaagatgtagacaaggaattctatntgtttcctacagtatttgatgagaatgagagtttactcctggaagataatattagaatgtttacaactgcacctgatcaggtggataaggaagatgaagactttcaggaatctaattgcaaaggagattcggtcgtgtggtacttattcagcgccggaaatgaggccgatgtacatggtatacttttcaggcacattctgtgg

SEQ ID NO: 367512 - DNA, 2208 bp, Homo sapiens
agagaagcctggcaaccaagaactgtttttttggtggtttacgagaacttaactgaattggaaaatatttgctttaatgaaacaatttactcttgtgcaacactaaattgtgtcaatcaagcaaataaggaagaaagtcttatttataaaattgcctgctcctgattttacttcatttcttctcaggctccaagaaggggaaaaaaatgaagattttgatacttggtatttttctgtttttatgtagtaccccagcctgggcgaaagaaaagcattattacattggaattattgaaacgacttgggattatgcctctgaccatggggaaaagaaacttatttctgttgacacggaacattccaatatctatcttcaaaatggcccagatagaattgggagactatataagaaggccctttatcttcagtacacagatgaaacctttaggacaactatagaaaaaccggtctggcttgggtttttaggccctattatcaaagctgaaactggagataaagtttatgtacacttaaaaaaccttgcctctaggccctacacctttcattcacatggaataacttactataaggaacatgagggggccatctaccctgataacaccacagattttcaaagagcagatgacaaagtatatccaggagagcagtatacatacatgttgcttgccactgaagaacaaagtcctggggaaggagatggcaattgtgtgactaggatttaccattcccacattgatgctccaaaagatattgcctcaggactcatcggacctttaataatctgtaaaaaagattctctagataaagaaaaagaaaaacatattgaccgagaatttgtggtgatgttttctgtggtggatgaaaatttcagctggtacctagaagacaacattaaaacctactgctcagaaccagagaaagttgacaaagacaacgaagacttccaggagagtaacagaatgtattctgtgaatggatacacttttggaagtctcccaggactctccatgtgtgctgaagacagagtaaaatggtacctttttggtatgggtaatgaagttgatgtgcacgcagctttctttcacgggcaagcactgactaacaagaactaccgtattgacacaatcaacctctttcctgctaccctgtttgatgcttatatggtggcccagaaccctggagaatggatgctcagctgtcagaatctaaaccatctgaaagccggtttgcaagcctttttccaggtccaggagtgtaacaagtcttcatcaaaggataatatccgtgggaagcatgttagacactactacattgccgctgaggaaatcatctggaactatgctccctctggtatagacatcttcactaaagaaaacttaacagcacctggaagtgactcagcggtgttttttgaacaaggtaccacaagaattggaggctcttataaaaagctggtttatcgtgagtacacagatgcctccttcacaaatcgaaaggagagaggccctgaagaagagcatcttggcatcctgggtcctgtcatttgggcagaggtgggagacaccatcagagtaaccttccataacaaaggagcatatcccctcagtattgagccgattggggtgagattcaataagaacaacgagggcacatactattccccaaattacaacccccagagcagaagtgtgcctccttcagcctcccatgtggcacccacagaaacattcacctatgaatggactgtccccaaagaagtaggacccactaatgcagatcctgtgtgtctagctaagatgtattattctgctgtggatcccactaaagatatattcactgggcttattgggccaatgaaaatatgcaagaaaggaagtttacatgcaaatgggagacagaaagatgtagacaaggaattctatttgtttcctacagtatttgatgagaatgagagtttactcctggaagataatattagaatgtttacaactgcacctgatcaggtggataaggaagatgaagactttcaggaatctaataaaatgcactgcactgtaagtactgcatcatccaccaatctaccaagttattttagtactgcatatgtaatgcttttaactaaacaaaatgtgaagagctttgctcattgattattttttcaataaacgattacaatagtgtcctgaa

SEQ ID NO: 367513 - DNA, 1244 bp, Homo sapiens
  misc_feature (852)..(852): n is a, c, g, or t
  misc_feature (859)..(859): n is a, c, g, or t
  misc_feature (862)..(862): n is a, c, g, or t
  misc_feature (869)..(869): n is a, c, g, or t
  misc_feature (1041)..(1041): n is a, c, g, or t
aataaaatgagggtgtgaaccatgaggatattttggggagaaggcagaggaaacagcaagtgcaaagttcccaaggcaggcacacacttgatctgctctaagaacagcaaaaggatggatggagcagggtgagcagaaggtgtggaaagctagatcacctgaggccatgataaggacttcagcattaattctgaggaaggtggagagccccagagggcactagcaaagaagtgacatgttttcttatttaccactccagggacttttaatgttgaatgccttacaactgatcattacacaggcggcatgaagcaaaaatatactgtgaaccaatgcaggcggcagtctgaggattccaccttctacctgggagagaggacatactatatcgcagcagtggaggtggaatgggattattccccacaaagggagtgggaaaaggagctgcatcatttacaagagcagaagtaattctccagactctgattcccaatttcagcagtaattttaggtttccttttcagagaagtaagaattacaccaaattttagaaaaaaaaaaaaagttgcattaaacaataacaacaacaacaacaacaacaacaaaacacttcctaggaacttgtccttattcatttccgcttctctcaatttccttaagggaaaatttccatttatcttctttgatcctttggagtcttgctttcttttctactggagtgtcttctcacattcatgtgccctcatgttgtcatttatattcaaacttaacaaaagttaatgcccaaattacaacccccagagcagaagtgtgcctccttcagcctcccatgtggcacccacagaaacattnacctatnaanggactgnccccaaagaagtaggacccactaatgcagatcctgtgtgtctagctaagatgtattattctgctgtggatcccactaaagatatattcactgggcttattgggccaatgtatgcaagaaaggaagtttacatgcaaatgggagacagaaagatgtagacaaggaattctatntgtttcctacagtatttgatgagaatgagagtttactcctggaagataatattagaatgtttacaactgcacctgatcaggtggataaggaagatgaagactttcaggaatctaattgcaaaggagattcggtcgtgtggtacttattcagcgccggaaatgaggccgatgtacatggtatacttttcaggcacattctgtgg

SEQ ID NO: 367514 - DNA, 817 bp, Homo sapiens
ctcggctctacctggtctccaacatctgggaattctaggtccacaacttcatgcagatgttggagacaaagtcaaaattatctttaaaaacatggccacaaggccctactcaatacatgcccatggggtacaaacagagagttctacagttactccaacattaccaggtgaaactctcacttacgtatggaaaatcccagaaagatctggagctggaacagaggattctgcttgtattccatgggcttattattcaactgtggatcaagttaaggacctctacagtggattaattggccccctgattgtttgtcgaagaccttacttgaaagtattcaatcccagaaggaaactggaatttgcccttctgtttctagtttttgatgagaatgaatcttggtacttagatgacaacatcaaaacatactctgatcattacacaggcggcatgaagcaaaaatatactgtgaaccaatgcaggcggcagtctgaggattccaccttctacctgggagagaggacatactatatcgcagcagtggaggtggaatgggattattccccacaaagggagtgggaaaaggagctgcatcatttacaagagcagaatgtttcaaatgcatttttagataagggagagttttacataggctcaaagtacaagaaagttgtgtatcggcagtatactgatagcacattccgtgttccagtggagagaaaagctgaagaagaacatctgggaattctaggtccacaacttcatgcagatgttggagacaaagtcaaaattatctttagttctacagttactccaaca

SEQ ID NO: 367515 - DNA, 5269 bp, Homo sapiens
agagaagcctggcaaccaagaactgtttttttggtggtttacgagaacttaactgaattggaaaatatttgctttaatgaaacaatttactcttgtgcaacactaaattgtgtcaatcaagcaaataaggaagaaagtcttatttataaaattgcctgctcctgattttacttcatttcttctcaggctccaagaaggggaaaaaaatgaagattttgatacttggtatttttctgtttttatgtagtaccccagcctgggcgaaagaaaagcattattacattggaattattgaaacgacttgggattatgcctctgaccatggggaaaagaaacttatttctgttgacacggaacattccaatatctatcttcaaaatggcccagatagaattgggagactatataagaaggccctttatcttcagtacacagatgaaacctttaggacaactatagaaaaaccggtctggcttgggtttttaggccctattatcaaagctgaaactggagataaagtttatgtacacttaaaaaaccttgcctctaggccctacacctttcattcacatggaataacttactataaggaacatgagggggccatctaccctgataacaccacagattttcaaagagcagatgacaaagtatatccaggagagcagtatacatacatgttgcttgccactgaagaacaaagtcctggggaaggagatggcaattgtgtgactaggatttaccattcccacattgatgctccaaaagatattgcctcaggactcatcggacctttaataatctgtaaaaaagattctctagataaagaaaaagaaaaacatattgaccgagaatttgtggtgatgttttctgtggtggatgaaaatttcagctggtacctagaagacaacattaaaacctactgctcagaaccagagaaagttgacaaagacaacgaagacttccaggagagtaacagaatgtattctgtgaatggatacacttttggaagtctcccaggactctccatgtgtgctgaagacagagtaaaatggtacctttttggtatgggtaatgaagttgatgtgcacgcagctttctttcacgggcaagcactgactaacaagaactaccgtattgacacaatcaacctctttcctgctaccctgtttgatgcttatatggtggcccagaaccctggagaatggatgctcagctgtcagaatctaaaccatctgaaagccggtttgcaagcctttttccaggtccaggagtgtaacaagtcttcatcaaaggataatatccgtgggaagcatgttagacactactacattgccgctgaggaaatcatctggaactatgctccctctggtatagacatcttcactaaagaaaacttaacagcacctggaagtgactcagcggtgttttttgaacaaggtaccacaagaattggaggctcttataaaaagctggtttatcgtgagtacacagatgcctccttcacaaatcgaaaggagagaggccctgaagaagagcatcttggcatcctgggtcctgtcatttgggcagaggtgggagacaccatcagagtaaccttccataacaaaggagcatatcccctcagtattgagccgattggggtgagattcaataagaacaacgagggcacatactattccccaaattacaacccccagagcagaagtgtgcctccttcagcctcccatgtggcacccacagaaacattcacctatgaatggactgtccccaaagaagtaggacccactaatgcagatcctgtgtgtctagctaagatgtattattctgctgtggatcccactaaagatatattcactgggcttattgggccaatgaaaatatgcaagaaaggaagtttacatgcaaatgggagacagaaagatgtagacaaggaattctatttgtttcctacagtatttgatgagaatgagagtttactcctggaagataatattagaatgtttacaactgcacctgatcaggtggataaggaagatgaagactttcaggaatctaataaaatgcactccatgaatggattcatgtatgggaatcagccgggtctcactatgtgcaaaggagattcggtcgtgtggtacttattcagcgccggaaatgaggccgatgtacatggaatatacttttcaggaaacacatatctgtggagaggagaacggagagacacagcaaacctcttccctcaaacaagtcttacgctccacatgtggcctgacacagaggggacttttaatgttgaatgccttacaactgatcattacacaggcggcatgaagcaaaaatatactgtgaaccaatgcaggcggcagtctgaggattccaccttctacctgggagagaggacatactatatcgcagcagtggaggtggaatgggattattccccacaaagggagtgggaaaaggagctgcatcatttacaagagcagaatgtttcaaatgcatttttagataagggagagttttacataggctcaaagtacaagaaagttgtgtatcggcagtatactgatagcacattccgtgttccagtggagagaaaagctgaagaagaacatctgggaattctaggtccacaacttcatgcagatgttggagacaaagtcaaaattatctttaaaaacatggccacaaggccctactcaatacatgcccatggggtacaaacagagagttctacagttactccaacattaccaggtgaaactctcacttacgtatggaaaatcccagaaagatctggagctggaacagaggattctgcttgtattccatgggcttattattcaactgtggatcaagttaaggacctctacagtggattaattggccccctgattgtttgtcgaagaccttacttgaaagtattcaatcccagaaggaaactggaatttgcccttctgtttctagtttttgatgagaatgaatcttggtacttagatgacaacatcaaaacatactctgatcaccccgagaaagtaaacaaagatgatgaggaattcatagaaagcaataaaatgcatgctattaatggaagaatgtttggaaacctacaaggcctcacaatgcacgtgggagatgaagtcaactggtatctgatgggaatgggcaatgaaatagacttacacactgtacattttcacggccatagcttccaatacaagcacaggggagtttatagttctgatgtctttgacattttccctggaacataccaaaccctagaaatgtttccaagaacacctggaatttggttactccactgccatgtgaccgaccacattcatgctggaatggaaaccacttacaccgttctacaaaatgaagacaccaaatctggctgaatgaaataaattggtgataagtggaaaaaagagaaaaaccaatgattcataacaatgtatgtgaaagtgtaaaatagaatgttactttggaatgactataaacattaaaagaagactggaagcatacaactttgtacatttgtgggggaaaactattaattttttgcaaatggaaagatcaacagactatataatgatacatgactgacacttgtacactaggtaataaaactgattcatacagtctaatgatatcaccgctgttagggttttataaaactgcatttaaaaaaagatctatgaccagatattctcctgggtgctcctcaaaggaacactattaaggttcattgaaatgttttcaatcattgccttcccattgatccttctaacatgctgttgacatcacacctaatattcagagggaatgggcaaggtatgagggaaggaaataaaaaataaaataaataaaatagaatgacacaaatttgagttttgtgaacccctgaacagatggtcttaaggacgttatctggaactggagaaaagcagagttgagagacaattctatagattaaatcctggtaaggacaaacattgccattagaagaaaagcttcaaaatagacctgtggcagatgtcacatgagtagaatttctgcccagccttaactgcattcagaggataatatcaatgaactaaacttgaactaaaaattttttaaacaaaaagttataaatgaagacacatggttgtgaatacaatgatgtatttctttattttcacatacactctagctaaaagagcaagagtacacatcaacaaaaatggaaacaaggctttggctgaaaaaaacatgcatttgacaaatcatgttaatagctagacaagaagaaagttagctttgtaaacttctacttcatttgattcagagaaacagagcatgagttttcttaaaagtaacaagaaaaggaacaaaaaaaatgaggtttgaaatcttttaccatggcaaaacattaacatctttctcaaaaacatagagaaatctggaaaaatcaagaagataaaattctggaccagttagtgacattctttcaagcatacttgtaaaatgtttccttaaagtgttcttgggatgaaaatgattgtcatgtctccaacaacagtgaactgatgttgttccttggaataaaagtcaatccccaccttaaaaaatgtatggcttctttgaggaattcttatgtcttaaagactttttacattctagacaattaaattgattgaggtcataaattaagaagtgaatagttaccactacacggtaaggtaagcagcctgaaagcatttgtatcatatatgtgtgtgtgtgtgtgtgtgtgtgtgtgtgttttgttggtcttttgcctgttagtactggtagaatgaagcttcatgagggctttgtttctattgcctagaaaagttcctattggtggtagtctcttagtatttgttgaatgatgaaataaatggtttaaaatgttctttgttagtaaaaagagattcttattggtggtaaaaatgtgaaagaatatagtttttcagttacagtttctttttttacaaatttgctcccagtcatttcctttaatcagtctttttaccaactttgcaataagtatcacaatgctgcctcctctgtggatgactgatggcaagagtctgaattgaaagaaaaatgggttggaattagaatgaaactatttgtttttatgagtctctgataatgaaagactttcacaaaaggaaagtataacattcacacgtatacatatgtaacaaacctgcacattgtgcacatgtaccctaaaacttaaagtataatt

SEQ ID NO: 367516 - DNA, 4570 bp, Homo sapiens
agagaagcctggcaaccaagaactgtttttttggtggtttacgagaacttaactgaattggaaaatatttgctttaatgaaacaatttactcttgtgcaacactaaattgtgtcaatcaagcaaataaggaagaaagtcttatttataaaattgcctgctcctgattttacttcatttcttctcaggctccaagaaggggaaaaaaatgaagattttgatacttggtatttttctgtttttatgtagtaccccagcctgggcgaaagaaaagcattattacattggaattattgaaacgacttgggattatgcctctgaccatggggaaaagaaacttatttctgttgacacggaacattccaatatctatcttcaaaatggcccagatagaattgggagactatataagaaggccctttatcttcagtacacagatgaaacctttaggacaactatagaaaaaccggtctggcttgggtttttaggccctattatcaaagctgaaactggagataaagtttatgtacacttaaaaaaccttgcctctaggccctacacctttcattcacatggaataacttactataaggaacatgagggggccatctaccctgataacaccacagattttcaaagagcagatgacaaagtatatccaggagagcagtatacatacatgttgcttgccactgaagaacaaagtcctggggaaggagatggcaattgtgtgactaggatttaccattcccacattgatgctccaaaagatattgcctcaggactcatcggacctttaataatctgtaaaaaagattctctagataaagaaaaagaaaaacatattgaccgagaatttgtggtgatgttttctgtggtggatgaaaatttcagctggtacctagaagacaacattaaaacctactgctcagaaccagagaaagttgacaaagacaacgaagacttccaggagagtaacagaatgtattctgtgaatggatacacttttggaagtctcccaggactctccatgtgtgctgaagacagagtaaaatggtacctttttggtatgggtaatgaagttgatgtgcacgcagctttctttcacgggcaagcactgactaacaagaactaccgtattgacacaatcaacctctttcctgctaccctgtttgatgcttatatggtggcccagaaccctggagaatggatgctcagctgtcagaatctaaaccatctgaaagccggtttgcaagcctttttccaggtccaggagtgtaacaagtcttcatcaaaggataatatccgtgggaagcatgttagacactactacattgccgctgaggaaatcatctggaactatgctccctctggtatagacatcttcactaaagaaaacttaacagcacctggaagtgactcagcggtgttttttgaacaaggtaccacaagaattggaggctcttataaaaagctggtttatcgtgagtacacagatgcctccttcacaaatcgaaaggagagaggccctgaagaagagcatcttggcatcctgggtcctgtcatttgggcagaggtgggagacaccatcagagtaaccttccataacaaaggagcatatcccctcagtattgagccgattggggtgagattcaataagaacaacgagggcacatactattccccaaattacaacccccagagcagaagtgtgcctccttcagcctcccatgtggcacccacagaaacattcacctatgaatggactgtccccaaagaagtaggacccactaatgcagatcctgtgtgtctagctaagatgtattattctgctgtggatcccactaaagatatattcactgggcttattgggccaatgaaaatatgcaagaaaggaagtttacatgcaaatgggagacagaaagatgtagacaaggaattctatttgtttcctacagtatttgatgagaatgagagtttactcctggaagataatattagaatgtttacaactgcacctgatcaggtggataaggaagatgaagactttcaggaatctaataaaatgcacttgcaaaggagattcggtcgtgtggtacttattcagcgccggaaatgaggccgatgtacatggaatatacttttcaggaaacacatatctgtggagaggagaacggagagacacagcaaacctcttccctcaaacaagtcttacgctccacatgtggcctgacacagaggggacttttaatgttgaatgccttacaactgatcattacacaggcggcatgaagcaaaaatatactgtgaaccaatgcaggcggcagtctgaggattccaccttctacctgggagagaggacatactatatcgcagcagtggaggtggaatgggattattccccacaaagggagtgggaaaaggagctgcatcatttacaagagcagaatgtttcaaatgcatttttagataagggagagttttacataggctcaaagtacaagaaagttgtgtatcggcagtatactgatagcacattccgtgttccagtggagagaaaagctgaagaagaacatctgggaattctaggtccacaacttcatgcagatgttggagacaaagtcaaaattatctttaaaaacatggccacaaggccctactcaatacatgcccatggggtacaaacagagagttctacagttactccaacattaccaggtgaaactctcacttacgtatggaaaatcccagaaagatctggagctggaacagaggattctgcttgtattccatgggcttattattcaactgtggatcaagttaaggacctctacagtggattaattggccccctgattgtttgtcgaagaccttacttgaaagtattcaatcccagaaggaaactggaatttgcccttctgtttctagtttttgatgagaatgaatcttggtacttagatgacaacatcaaaacatactctgatcaccccgagaaagtaaacaaagatgatgaggaattcatagaaagcaataaaatgcatgctattaatggaagaatgtttggaaacctacaaggcctcacaatgcacgtgggagatgaagtcaactggtatctgatgggaatgggcaatgaaatagacttacacactgtacattttcacggccatagcttccaatacaagcacaggggagtttatagttctgatgtctttgacattttccctggaacataccaaaccctagaaatgtttccaagaacacctggaatttggttactccactgccatgtgaccgaccacattcatgctggaatggaaaccacttacaccgttctacaaaatgaagacaccaaatctggctgaatgaaataaattggtgataagtggaaaaaagagaaaaaccaatgattcataacaatgtatgtgaaagtgtaaaatagaatgttactttggaatgactataaacattaaaagaagactggaagcatacaactttgtacatttgtgggggaaaactattaattttttgcaaatggaaagatcaacagactatataatgatacatgactgacacttgtacactaggtaataaaactgattcatacagtctaatgatatcaccgctgttagggttttataaaactgcatttaaaaaaagatctatgaccagatattctcctgggtgctcctcaaaggaacactattaaggttcattgaaatgttttcaatcattgccttcccattgatccttctaacatgctgttgacatcacacctaatattcagagggaatgggcaaggtatgagggaaggaaataaaaaataaaataaataaaatagaatgacacaaatttgagttttgtgaacccctgaacagatggtcttaaggacgttatctggaactggagaaaagcagagttgagagacaattctatagattaaatcctggtaaggacaaacattgccattagaagaaaagcttcaaaatagacctgtggcagatgtcacatgagtagaatttctgcccagccttaactgcattcagaggataatatcaatgaactaaacttgaactaaaaattttttaaacaaaaagttataaatgaagacacatggttgtgaatacaatgatgtatttctttattttcacatacactctagctaaaagagcaagagtacacatcaacaaaaatggaaacaaggctttggctgaaaaaaacatgcatttgacaaatcatgttaatagctagacaagaagaaagttagctttgtaaacttctacttcatttgattcagagaaacagagcatgagttttcttaaaagtaacaagaaaaggaacaaaaaaaatgaggtttgaaatcttttaccatggcaaaacattaacatctttctcaaaaacatagagaaatctggaaaaatcaagaagataaaattctggaccagttagtgacattctttcaagcatacttgtaaaatgtttccttaaagtgttcttgggatgaaaatgattgtcatgtctccaacaacagtgaactgatgttgttccttggaataaaagtcaatccccacctta

SEQ ID NO: 367517 - DNA, 3227 bp, Homo sapiens
atcagattgattatggacttctcaaaaaccaagctttccattcaccacaaataagcgtgttgctcctagtagttcttgccagagaacacagtcaaagaagataactatcttatacattctgcatgttacataccaaggaaggataataattctctctttgttcccaggtcctgtcatttgggcagaggtgggagacaccatcagagtaaccttccataacaaaggagcatatcccctcagtattgagccgattggggtgagattcaataagaacaacgagggcacatactattccccaaattacaacccccagagcagaagtgtgcctccttcagcctcccatgtggcacccacagaaacattcacctatgaatggactgtccccaaagaagtaggacccactaatgcagatcctgtgtgtctagctaagatgtattattctgctgtggatcccactaaagatatattcactgggcttattgggccaatgaaaatatgcaagaaaggaagtttacatgcaaatgggagacagaaagatgtagacaaggaattctatttgtttcctacagtatttgatgagaatgagagtttactcctggaagataatattagaatgtttacaactgcacctgatcaggtggataaggaagatgaagactttcaggaatctaataaaatgcactccatgaatggattcatgtatgggaatcagccgggtctcactatgtgcaaaggagattcggtcgtgtggtacttattcagcgccggaaatgaggccgatgtacatggaatatacttttcaggaaacacatatctgtggagaggagaacggagagacacagcaaacctcttccctcaaacaagtcttacgctccacatgtggcctgacacagaggggacttttaatgttgaatgccttacaactgatcattacacaggcggcatgaagcaaaaatatactgtgaaccaatgcaggcggcagtctgaggattccaccttctacctgggagagaggacatactatatcgcagcagtggaggtggaatgggattattccccacaaagggagtgggaaaaggagctgcatcatttacaagagcagaatgtttcaaatgcatttttagataagggagagttttacataggctcaaagtacaagaaagttgtgtatcggcagtatactgatagcacattccgtgttccagtggagagaaaagctgaagaagaacatctgggaattctaggtccacaacttcatgcagatgttggagacaaagtcaaaattatctttaaaaacatggccacaaggccctactcaatacatgcccatggggtacaaacagagagttctacagttactccaacattaccaggtgaaactctcacttacgtatggaaaatcccagaaagatctggagctggaacagaggattctgcttgtattccatgggcttattattcaactgtggatcaagttaaggacctctacagtggattaattggccccctgattgtttgtcgaagaccttacttgaaagtattcaatcccagaaggaaactggaatttgcccttctgtttctagtttttgatgagaatgaatcttggtacttagatgacaacatcaaaacatactctgatcaccccgagaaagtaaacaaagatgatgaggaattcatagaaagcaataaaatgcatgctattaatggaagaatgtttggaaacctacaaggcctcacaatgcacgtgggagatgaagtcaactggtatctgatgggaatgggcaatgaaatagacttacacactgtacattttcacggccatagcttccaatacaagcacaggggagtttatagttctgatgtctttgacattttccctggaacataccaaaccctagaaatgtttccaagaacacctggaatttggttactccactgccatgtgaccgaccacattcatgctggaatggaaaccacttacaccgttctacaaaatgaagacaccaaatctggctgaatgaaataaattggtgataagtggaaaaaagagaaaaaccaatgattcataacaatgtatgtgaaagtgtaaaatagaatgttactttggaatgactataaacattaaaagaagactggaagcatacaactttgtacatttgtgggggaaaactattaattttttgcaaatggaaagatcaacagactatataatgatacatgactgacacttgtacactaggtaataaaactgattcatacagtctaatgatatcaccgctgttagggttttataaaactgcatttaaaaaaagatctatgaccagatattctcctgggtgctcctcaaaggaacactattaaggttcattgaaatgttttcaatcattgccttcccattgatccttctaacatgctgttgacatcacacctaatattcagagggaatgggcaaggtatgagggaaggaaataaaaaataaaataaataaaatagaatgacacaaatttgagttttgtgaacccctgaacagatggtcttaaggacgttatctggaactggagaaaagcagagttgagagacaattctatagattaaatcctggtaaggacaaacattgccattagaagaaaagcttcaaaatagacctgtggcagatgtcacatgagtagaatttctgcccagccttaactgcattcagaggataatatcaatgaactaaacttgaactaaaaattttttaaacaaaaagttataaatgaagacacatggttgtgaatacaatgatgtatttctttattttcacatacactctagctaaaagagcaagagtacacatcaacaaaaatggaaacaaggctttggctgaaaaaaacatgcatttgacaaatcatgttaatagctagacaagaagaaagttagctttgtaaacttctacttcatttgattcagagaaacagagcatgagttttcttaaaagtaacaagaaaaggaacaaaaaaaatgaggtttgaaatcttttaccatggcaaaacattaacatctttctcaaaaacatagagaaatctggaaaaatcaagaagataaaattctggaccagttagtgacattctttcaagcatacttgtaaaatgtttccttaaagtgttcttgggatgaaaatgattgtcatgtctccaacaacagtgaactgatgttgttccttggaataaaagtcaatccccacctta

SEQ ID NO: 367518 - DNA, 5215 bp, Homo sapiens
agagaagcctggcaaccaagaactgtttttttggtggtttacgagaacttaactgaattggaaaatatttgctttaatgaaacaatttactcttgtgcaacactaaattgtgtcaatcaagcaaataaggaagaaagtcttatttataaaattgcctgctcctgattttacttcatttcttctcaggctccaagaaggggaaaaaaatgaagattttgatacttggtatttttctgtttttatgtagtaccccagcctgggcgaaagaaaagcattattacattggaattattgaaacgacttgggattatgcctctgaccatggggaaaagaaacttatttctgttgacacggaacattccaatatctatcttcaaaatggcccagatagaattgggagactatataagaaggccctttatcttcagtacacagatgaaacctttaggacaactatagaaaaaccggtctggcttgggtttttaggccctattatcaaagctgaaactggagataaagtttatgtacacttaaaaaaccttgcctctaggccctacacctttcattcacatggaataacttactataaggaacatgagggggccatctaccctgataacaccacagattttcaaagagcagatgacaaagtatatccaggagagcagtatacatacatgttgcttgccactgaagaacaaagtcctggggaaggagatggcaattgtgtgactaggatttaccattcccacattgatgctccaaaagatattgcctcaggactcatcggacctttaataatctgtaaaaaagattctctagataaagaaaaagaaaaacatattgaccgagaatttgtggtgatgttttctgtggtggatgaaaatttcagctggtacctagaagacaacattaaaacctactgctcagaaccagagaaagttgacaaagacaacgaagacttccaggagagtaacagaatgtattctgtgaatggatacacttttggaagtctcccaggactctccatgtgtgctgaagacagagtaaaatggtacctttttggtatgggtaatgaagttgatgtgcacgcagctttctttcacgggcaagcactgactaacaagaactaccgtattgacacaatcaacctctttcctgctaccctgtttgatgcttatatggtggcccagaaccctggagaatggatgctcagctgtcagaatctaaaccatctgaaagccggtttgcaagcctttttccaggtccaggagtgtaacaagtcttcatcaaaggataatatccgtgggaagcatgttagacactactacattgccgctgaggaaatcatctggaactatgctccctctggtatagacatcttcactaaagaaaacttaacagcacctggaagtgactcagcggtgttttttgaacaaggtaccacaagaattggaggctcttataaaaagctggtttatcgtgagtacacagatgcctccttcacaaatcgaaaggagagaggccctgaagaagagcatcttggcatcctgggtcctgtcatttgggcagaggtgggagacaccatcagagtaaccttccataacaaaggagcatatcccctcagtattgagccgattggggtgagattcaataagaacaacgagggcacatactattccccaaattacaacccccagagcagaagtgtgcctccttcagcctcccatgtggcacccacagaaacattcacctatgaatggactgtccccaaagaagtaggacccactaatgcagatcctgtgtgtctagctaagatgtattattctgctgtggatcccactaaagatatattcactgggcttattgggccaatgaaaatatgcaagaaaggaagtttacatgcaaatgggagacagaaagatgtagacaaggaattctatttgtttcctacagtatttgatgagaatgagagtttactcctggaagataatattagaatgtttacaactgcacctgatcaggtggataaggaagatgaagactttcaggaatctaataaaatgcactccatgaatggattcatgtatgggaatcagccgggtctcactatgtgcaaaggagattcggtcgtgtggtacttattcagcgccggaaatgaggccgatgtacatggaatatacttttcaggaaacacatatctgtggagaggagaacggagagacacagcaaacctcttccctcaaacaagtcttacgctccacatgtggcctgacacagaggggacttttaatgttgaatgccttacaactgatcattacacaggcggcatgaagcaaaaatatactgtgaaccaatgcaggcggcagtctgaggattccaccttctacctgggagagaggacatactatatcgcagcagtggaggtggaatgggattattccccacaaagggagtgggaaaaggagctgcatcatttacaagagcagaatgtttcaaatgcatttttagataagggagagttttacataggctcaaagtacaagaaagttgtgtatcggcagtatactgatagcacattccgtgttccagtggagagaaaagctgaagaagaacatctgggaattctaggtccacaacttcatgcagatgttggagacaaagtcaaaattatctttaaaaacatggccacaaggccctactcaatacatgcccatggggtacaaacagagagttctacagttactccaacattaccaggtgaaactctcacttacgtatggaaaatcccagaaagatctggagctggaacagaggattctgcttgtattccatgggcttattattcaactgtggatcaagttaaggacctctacagtggattaattggccccctgattgtttgtcgaagaccttacttgaaagtattcaatcccagaaggaaactggaatttgcccttctgtttctagtttttgatgagaatgaatcttggtacttagatgacaacatcaaaacatactctgatcaccccgagaaagtaaacaaagatgatgaggaattcatagaaagcaataaaatgcatgctattaatggaagaatgtttggaaacctacaaggcctcacaatgcacgtgggagatgaagtcaactggtatctgatgggaatgggcaatgaaatagacttacacactgtacattttcacggccatagcttccaatacaagcacaggggagtttatagttctgatgtctttgacattttccctggaacataccaaaccctagaaatgtttccaagaacacctggaatttggttactccactgccatgtgaccgaccacattcatgctggaatggaaaccacttacaccgttctacaaaatgaagacaccaaatctggctgaatgaaataaattggtgataagtggaaaaaagagaaaaaccaatgattcataacaatgtatgtgaaagtgtaaaatagaatgttactttggaatgactataaacattaaaagaagactggaagcatacaactttgtacatttgtgggggaaaactattaattttttgcaaatggaaagatcaacagactatataatgatacatgactgacacttgtacactaggtaataaaactgattcatacagtctaatgatatcaccgctgttagggttttataaaactgcatttaaaaaaagatctatgaccagatattctcctgggtgctcctcaaaggaacactattaaggttcattgaaatgttttcaatcattgccttcccattgatccttctaacatgctgttgacatcacacctaatattcagagggaatgggcaaggtatgagggaaggaaataaaaaataaaataaataaaatagaatgacacaaatttgagttttgtgaacccctgaacagatggtcttaaggacgttatctggaactggagaaaagcagagttgagagacaattctatagattaaatcctggtaaggacaaacattgccattagaagaaaagctttgcattcagaggataatatcaatgaactaaacttgaactaaaaattttttaaacaaaaagttataaatgaagacacatggttgtgaatacaatgatgtatttctttattttcacatacactctagctaaaagagcaagagtacacatcaacaaaaatggaaacaaggctttggctgaaaaaaacatgcatttgacaaatcatgttaatagctagacaagaagaaagttagctttgtaaacttctacttcatttgattcagagaaacagagcatgagttttcttaaaagtaacaagaaaaggaacaaaaaaaatgaggtttgaaatcttttaccatggcaaaacattaacatctttctcaaaaacatagagaaatctggaaaaatcaagaagataaaattctggaccagttagtgacattctttcaagcatacttgtaaaatgtttccttaaagtgttcttgggatgaaaatgattgtcatgtctccaacaacagtgaactgatgttgttccttggaataaaagtcaatccccaccttaaaaaatgtatggcttctttgaggaattcttatgtcttaaagactttttacattctagacaattaaattgattgaggtcataaattaagaagtgaatagttaccactacacggtaaggtaagcagcctgaaagcatttgtatcatatatgtgtgtgtgtgtgtgtgtgtgtgtgtgtgttttgttggtcttttgcctgttagtactggtagaatgaagcttcatgagggctttgtttctattgcctagaaaagttcctattggtggtagtctcttagtatttgttgaatgatgaaataaatggtttaaaatgttctttgttagtaaaaagagattcttattggtggtaaaaatgtgaaagaatatagtttttcagttacagtttctttttttacaaatttgctcccagtcatttcctttaatcagtctttttaccaactttgcaataagtatcacaatgctgcctcctctgtggatgactgatggcaagagtctgaattgaaagaaaaatgggttggaattagaatgaaactatttgtttttatgagtctctgataatgaaagactttcacaaaaggaaagtataacattcacacgtatacatatgtaacaaacctgcacattgtgcacatgtaccctaaaacttaaagtataatt

SEQ ID NO: 367519 - DNA, 4465 bp, Homo sapiens
agagaagcctggcaaccaagaactgtttttttggtggtttacgagaacttaactgaattggaaaatatttgctttaatgaaacaatttactcttgtgcaacactaaattgtgtcaatcaagcaaataaggaagaaagtcttatttataaaattgcctgctcctgattttacttcatttcttctcaggctccaagaaggggaaaaaaatgaagattttgatacttggtatttttctgtttttatgtagtaccccagcctgggcgaaagaaaagcattattacattggaattattgaaacgacttgggattatgcctctgaccatggggaaaagaaacttatttctgttgacacggaacattccaatatctatcttcaaaatggcccagatagaattgggagactatataagaaggccctttatcttcagtacacagatgaaacctttaggacaactatagaaaaaccggtctggcttgggtttttaggccctattatcaaagctgaaactggagataaagtttatgtacacttaaaaaaccttgcctctaggccctacacctttcattcacatggaataacttactataaggaacatgagggggccatctaccctgataacaccacagattttcaaagagcagatgacaaagtatatccaggagagcagtatacatacatgttgcttgccactgaagaacaaagtcctggggaaggagatggcaattgtgtgactaggatttaccattcccacattgatgctccaaaagatattgcctcaggactcatcggacctttaataatctgtaaaaaagattctctagataaagaaaaagaaaaacatattgaccgagaatttgtggtgatgttttctgtggtggatgaaaatttcagctggtacctagaagacaacattaaaacctactgctcagaaccagagaaagttgacaaagacaacgaagacttccaggagagtaacagaatgtattctgtgaatggatacacttttggaagtctcccaggactctccatgtgtgctgaagacagagtaaaatggtacctttttggtatgggtaatgaagttgatgtgcacgcagctttctttcacgggcaagcactgactaacaagaactaccgtattgacacaatcaacctctttcctgctaccctgtttgatgcttatatggtggcccagaaccctggagaatggatgctcagctgtcagaatctaaaccatctgaaagccggtttgcaagcctttttccaggtccaggagtgtaacaagtcttcatcaaaggataatatccgtgggaagcatgttagacactactacattgccgctgaggaaatcatctggaactatgctccctctggtatagacatcttcactaaagaaaacttaacagcacctggaagtgactcagcggtgttttttgaacaaggtaccacaagaattggaggctcttataaaaagctggtttatcgtgagtacacagatgcctccttcacaaatcgaaaggagagaggccctgaagaagagcatcttggcatcctgggtcctgtcatttgggcagaggtgggagacaccatcagagtaaccttccataacaaaggagcatatcccctcagtattgagccgattggggtgagattcaataagaacaacgagggcacatactattccccaaattacaacccccagagcagaagtgtgcctccttcagcctcccatgtggcacccacagaaacattcacctatgaatggactgtccccaaagaagtaggacccactaatgcagatcctgtgtgtctagctaagatgtattattctgctgtggatcccactaaagatatattcactgggcttattgggccaatgaaaatatgcaagaaaggaagtttacatgcaaatgggagacagaaagatgtagacaaggaattctatttgtttcctacagtatttgatgagaatgagagtttactcctggaagataatattagaatgtttacaactgcacctgatcaggtggataaggaagatgaagactttcaggaatctaataaaatgcactccatgaatggattcatgtatgggaatcagccgggtctcactatgtgcaaaggagattcggtcgtgtggtacttattcagcgccggaaatgaggccgatgtacatggaatatacttttcaggaaacacatatctgtggagaggagaacggagagacacagcaaacctcttccctcaaacaagtcttacgctccacatgtggcctgacacagaggggacttttaatgttgaatgccttacaactgatcattacacaggcggcatgaagcaaaaatatactgtgaaccaatgcaggcggcagtctgaggattccaccttctacctgggagagaggacatactatatcgcagcagtggaggtggaatgggattattccccacaaagggagtgggaaaaggagctgcatcatttacaagagcagaatgtttcaaatgcatttttagataagggagagttttacataggctcaaagtacaagaaagttgtgtatcggcagtatactgatagcacattccgtgttccagtggagagaaaagctgaagaagaacatctgggaattctaggtccacaacttcatgcagatgttggagacaaagtcaaaattatctttaaaaacatgggcttattattcaactgtggatcaagttaaggacctctacagtggattaattggccccctgattgtttgtcgaagaccttacttgaaagtattcaatcccagaaggaaactggaatttgcccttctgtttctagtttttgatgagaatgaatcttggtacttagatgacaacatcaaaacatactctgatcaccccgagaaagtaaacaaagatgatgaggaattcatagaaagcaataaaatgcatgctattaatggaagaatgtttggaaacctacaaggcctcacaatgcacgtgggagatgaagtcaactggtatctgatgggaatgggcaatgaaatagacttacacactgtacattttcacggccatagcttccaatacaagcacaggggagtttatagttctgatgtctttgacattttccctggaacataccaaaccctagaaatgtttccaagaacacctggaatttggttactccactgccatgtgaccgaccacattcatgctggaatggaaaccacttacaccgttctacaaaatgaagacaccaaatctggctgaatgaaataaattggtgataagtggaaaaaagagaaaaaccaatgattcataacaatgtatgtgaaagtgtaaaatagaatgttactttggaatgactataaacattaaaagaagactggaagcatacaactttgtacatttgtgggggaaaactattaattttttgcaaatggaaagatcaacagactatataatgatacatgactgacacttgtacactaggtaataaaactgattcatacagtctaatgatatcaccgctgttagggttttataaaactgcatttaaaaaaagatctatgaccagatattctcctgggtgctcctcaaaggaacactattaaggttcattgaaatgttttcaatcattgccttcccattgatccttctaacatgctgttgacatcacacctaatattcagagggaatgggcaaggtatgagggaaggaaataaaaaataaaataaataaaatagaatgacacaaatttgagttttgtgaacccctgaacagatggtcttaaggacgttatctggaactggagaaaagcagagttgagagacaattctatagattaaatcctggtaaggacaaacattgccattagaagaaaagcttcaaaatagacctgtggcagatgtcacatgagtagaatttctgcccagccttaactgcattcagaggataatatcaatgaactaaacttgaactaaaaattttttaaacaaaaagttataaatgaagacacatggttgtgaatacaatgatgtatttctttattttcacatacactctagctaaaagagcaagagtacacatcaacaaaaatggaaacaaggctttggctgaaaaaaacatgcatttgacaaatcatgttaatagctagacaagaagaaagttagctttgtaaacttctacttcatttgattcagagaaacagagcatgagttttcttaaaagtaacaagaaaaggaacaaaaaaaatgaggtttgaaatcttttaccatggcaaaacattaacatctttctcaaaaacatagagaaatctggaaaaatcaagaagataaaattctggaccagttagtgacattctttcaagcatacttgtaaaatgtttccttaaagtgttcttgggatgaaaatgattgtcatgtctccaacaacagtgaactgatgttgttccttggaataaaagtcaatccccacctta

SEQ ID NO: 367520 - DNA, 6363 bp, Homo sapiens
agagaagcctggcaaccaagaactgtttttttggtggtttacgagaacttaactgaattggaaaatatttgctttaatgaaacaatttactcttgtgcaacactaaattgtgtcaatcaagcaaataaggaagaaagtcttatttataaaattgcctgctcctgattttacttcatttcttctcaggctccaagaaggggaaaaaaatgaagattttgatacttggtatttttctgtttttatgtagtaccccagcctgggcgaaagaaaagcattattacattggaattattgaaacgacttgggattatgcctctgaccatggggaaaagaaacttatttctgttgacacggaacattccaatatctatcttcaaaatggcccagatagaattgggagactatataagaaggccctttatcttcagtacacagatgaaacctttaggacaactatagaaaaaccggtctggcttgggtttttaggccctattatcaaagctgaaactggagataaagtttatgtacacttaaaaaaccttgcctctaggccctacacctttcattcacatggaataacttactataaggaacatgagggggccatctaccctgataacaccacagattttcaaagagcagatgacaaagtatatccaggagagcagtatacatacatgttgcttgccactgaagaacaaagtcctggggaaggagatggcaattgtgtgactaggatttaccattcccacattgatgctccaaaagatattgcctcaggactcatcggacctttaataatctgtaaaaaagattctctagataaagaaaaagaaaaacatattgaccgagaatttgtggtgatgttttctgtggtggatgaaaatttcagctggtacctagaagacaacattaaaacctactgctcagaaccagagaaagttgacaaagacaacgaagacttccaggagagtaacagaatgtattctgtgaatggatacacttttggaagtctcccaggactctccatgtgtgctgaagacagagtaaaatggtacctttttggtatgggtaatgaagttgatgtgcacgcagctttctttcacgggcaagcactgactaacaagaactaccgtattgacacaatcaacctctttcctgctaccctgtttgatgcttatatggtggcccagaaccctggagaatggatgctcagctgtcagaatctaaaccatctgaaagccggtttgcaagcctttttccaggtccaggagtgtaacaagtcttcatcaaaggataatatccgtgggaagcatgttagacactactacattgccgctgaggaaatcatctggaactatgctccctctggtatagacatcttcactaaagaaaacttaacagcacctggaagtgactcagcggtgttttttgaacaaggtaccacaagaattggaggctcttataaaaagctggtttatcgtgagtacacagatgcctccttcacaaatcgaaaggagagaggccctgaagaagagcatcttggcatcctgggtcctgtcatttgggcagaggtgggagacaccatcagagtaaccttccataacaaaggagcatatcccctcagtattgagccgattggggtgagattcaataagaacaacgagggcacatactattccccaaattacaacccccagagcagaagtgtgcctccttcagcctcccatgtggcacccacagaaacattcacctatgaatggactgtccccaaagaagtaggacccactaatgcagatcctgtgtgtctagctaagatgtattattctgctgtggatcccactaaagatatattcactgggcttattgggccaatgaaaatatgcaagaaaggaagtttacatgcaaatgggagacagaaagatgtagacaaggaattctatttgtttcctacagtatttgatgagaatgagagtttactcctggaagataatattagaatgtttacaactgcacctgatcaggtggataaggaagatgaagactttcaggaatctaataaaatgcactccatgaatggattcatgtatgggaatcagccgggtctcactatgtgcaaaggagattcggtcgtgtggtacttattcagcgccggaaatgaggccgatgtacatggaatatacttttcaggaaacacatatctgtggagaggagaacggagagacacagcaaacctcttccctcaaacaagtcttacgctccacatgtggcctgacacagaggggacttttaatgttgaatgccttacaactgatcattacacaggcggcatgaagcaaaaatatactgtgaaccaatgcaggcggcagtctgaggattccaccttctacctgggagagaggacatactatatcgcagcagtggaggtggaatgggattattccccacaaagggagtgggaaaaggagctgcatcatttacaagagcagaatgtttcaaatgcatttttagataagggagagttttacataggctcaaagtacaagaaagttgtgtatcggcagtatactgatagcacattccgtgttccagtggagagaaaagctgaagaagaacatctgggaattctaggtccacaacttcatgcagatgttggagacaaagtcaaaattatctttaaaaacatggccacaaggccctactcaatacatgcccatggggtacaaacagagagttctacagttactccaacattaccaggtgaaactctcacttacgtatggaaaatcccagaaagatctggagctggaacagaggattctgcttgtattccatgggcttattattcaactgtggatcaagttaaggacctctacagtggattaattggccccctgattgtttgtcgaagaccttacttgaaagtattcaatcccagaaggaaactggaatttgcccttctgtttctagtttttgatgagaatgaatcttggtacttagatgacaacatcaaaacatactctgatcaccccgagaaagtaaacaaagatgatgaggaattcatagaaagcaataaaatgcatgctattaatggaagaatgtttggaaacctacaaggcctcacaatgcacgtgggagatgaagtcaactggtatctgatgggaatgggcaatgaaatagacttacacactacacacacacttaaaatggagaaaaatgaacagtttttttggtaagattcctgcactgtggctgcaggctttggtctttcctgggtctttcgagttgaggattgttgtaattagaaatggtaaattcaaagggaggaaattatgtaaagaaaaccaatctatgtctttcctccctaaaatggggaaaaagggaacatacaaatgaagaaaatataaatgtaaatatatttgaagatttaaaaagccctgaaaggttaacctttagtgcaaatggaaagttttaatttctgctcctgggtcttacacaaacaacttacatcatgaaaaactatttccattaatgccctttttattagagcagtcactgataacactagaatatcaaagactctaacagacaagccactaaatttaacgccaataacttgaacaaagtgaagagagccaaatatgagaaagaaaactttagtctttaaataacacttgcaaccatgtggttacatgtggttgcatgtaaaccacacaaaaggatggtcttgctcaaaaaaataatggtgagtaagtaacatggaggcatttggggaattcatgtgtgcaaatgcctggcatgcagagtatggcactacagggtaaccctacacacacagccacagagaagattcctcctgtgtaacaaccgtgaaagaagagggagattactgcgttggttaagaaaggcgagatagtttttaaagctatagtaaaaattacagaacaaatagcaaatatgaagtaaaaatcaacactagataaaaaattaaagagaaatttgacttttgcaaagagaaaaggtattgcatgagactgaaagcagcagactgaataaaaaaagatagtttgaactatctttggcccataaaatcagtggccatgtttatcagtctgaatcatctttaaataagtccaataaagctttgagcaagtttacattaattatgagtcttagaaaagcctgcttagctttaaatttcttacaggcagggactatatattctgtatttctagctaagtacccaaatccaatacaatagtttgcttactgaatgtataacaacatattaattcaatgaagagaaacttttgaaacttttttgacataatttcagattcccatatacctttcacccagattccccaaatattaatgatgtgcgtagccacattggctttctcattcttttccctatctccctctcatgctcaccctctatatgtacacacacagacgtgtatagatacacatacaactatctttcctaaaaacaagaatattcttgtacatgaccacaatacaatgatcgaaattagaaaagcaacaatgatttaaaaactagagatcttcaaatttcgctaataatcctaatcatgttctttacagaaaaagaaaatcccggatcatgtactgcattgttgccatgtcttttaagtctcctttactctgaataattccttaatacagggcactttgtagaatgtccttcaatttgagtttgtctaatgtttccttatgattagatttaggttatgcacttttggcaagactatcatggcatgatgttgtgtttttcttagtacaccatatcaggaggcacaagatattgatcagttctattactggttatgttaacttcaagctttggttaagatggtgtctgccaggtgtctccattgtaaagttattcattttccctttacaattaataaagatcttgtagggaagaaagtaatctttctttaaataaagcagcaatagaatgagagatttttaaacatataaaaagcagaaaaatataaatgaatcaggagtaaagtaacattaaaaattggaatacatttaaagaaccatctactaatttctaaccatatattatttttaataatggtcttaaaatttctttttctatagacaccaaatctggctgaatgaaataaattggtgataagtggaaaaaagagaaaaaccaatgattcataacaatgtatgtgaaagtgtaaaatagaatgttactttggaatgactataaacattaaaagaagactggaagcatacaactttgtacatttgtgggggaaaactattaattttttgcaaatggaaagatcaacagactatataatgatacatgactgacacttgtacactaggtaataaaactgattcatacagtctaatgatatcaccgctgttagggttttataaaactgcatttaaaaaaagatctatgaccagatattctcctgggtgctcctcaaaggaacactattaaggttcattgaaatgttttcaatcattgccttcccattgatccttctaacatgctgttgacatcacacctaatattcagagggaatgggcaaggtatgagggaaggaaataaaaaataaaataaataaaatagaatgacacaaatttgagttttgtgaacccctgaacagatggtcttaaggacgttatctggaactggagaaaagcagagttgagagacaattctatagattaaatcctggtaaggacaaacattgccattagaagaaaagcttcaaaatagacctgtggcagatgtcacatgagtagaatttctgcccagccttaactgcattcagaggataatatcaatgaactaaacttgaactaaaaattttttaaacaaaaagttataaatgaagacacatggttgtgaatacaatgatgtatttctttattttcacatacactctagctaaaagagcaagagtacacatcaacaaaaatggaaacaaggctttggctgaaaaaaacatgcatttgacaaatcatgttaatagctagacaagaagaaagttagctttgtaaacttctacttcatttgattcagagaaacagagcatgagttttcttaaaagtaacaagaaaaggaacaaaaaaaatgaggtttgaaatcttttaccatggcaaaacattaacatctttctcaaaaacatagagaaatctggaaaaatcaagaagataaaattctggaccagttagtgacattctttcaagcatacttgtaaaatgtttccttaaagtgttcttgggatgaaaatgattgtcatgtctccaacaacagtgaactgatgttgttccttggaataaaagtcaatccccacctta

SEQ ID NO: 367521 - DNA, 3969 bp, Homo sapiens
agagaagcctggcaaccaagaactgtttttttggtggtttacgagaacttaactgaattggaaaatatttgctttaatgaaacaatttactcttgtgcaacactaaattgtgtcaatcaagcaaataaggaagaaagtcttatttataaaattgcctgctcctgattttacttcatttcttctcaggctccaagaaggggaaaaaaatgaagattttgatacttggtatttttctgtttttatgtagtaccccagcctgggcgaaagaaaagcattattacattggaattattgaaacgacttgggattatgcctctgaccatggggaaaagaaacttatttctgttgacacggaacattccaatatctatcttcaaaatggcccagatagaattgggagactatataagaaggccctttatcttcagtacacagatgaaacctttaggacaactatagaaaaaccggtctggcttgggtttttaggccctattatcaaagctgaaactggagataaagtttatgtacacttaaaaaaccttgcctctaggccctacacctttcattcacatggaataacttactataaggaacatgagggggccatctaccctgataacaccacagattttcaaagagcagatgacaaagtatatccaggagagcagtatacatacatgttgcttgccactgaagaacaaagtcctggggaaggagatggcaattgtgtgactaggatttaccattcccacattgatgctccaaaagatattgcctcaggactcatcggacctttaataatctgtaaaaaagattctctagataaagaaaaagaaaaacatattgaccgagaatttgtggtgatgttttctgtggtggatgaaaatttcagctggtacctagaagacaacattaaaacctactgctcagaaccagagaaagttgacaaagacaacgaagacttccaggagagtaacagaatgtattctgtgaatggatacacttttggaagtctcccaggactctccatgtgtgctgaagacagagtaaaatggtacctttttggtatgggtaatgaagttgatgtgcacgcagctttctttcacgggcaagcactgactaacaagaactaccgtattgacacaatcaacctctttcctgctaccctgtttgatgcttatatggtggcccagaaccctggagaatggatgctcagctgtcagaatctaaaccatctgaaagccggtttgcaagcctttttccaggtccaggagtgtaacaagtcttcatcaaaggataatatccgtgggaagcatgttagacactactacattgccgctgaggaaatcatctggaactatgctccctctggtatagacatcttcactaaagaaaacttaacagcacctggaagtgactcagcggtgttttttgaacaaggtaccacaagaattggaggctcttataaaaagctggtttatcgtgagtacacagatgcctccttcacaaatcgaaaggagagaggccctgaagaagagcatcttggcatcctgggtcctgtcatttgggcagaggtgggagacaccatcagagtaaccttccataacaaaggagcatatcccctcagtattgagccgattggggtgagattcaataagaacaacgagggcacatactattccccaaattacaacccccagagcagaagtgtgcctccttcagcctcccatgtggcacccacagaaacattcacctatgaatggactgtccccaaagaagtaggacccactaatgcagatcctgtgtgtctagctaagatgtattattctgctgtggatcccactaaagatatattcactgggcttattgggccaatgaaaatatgcaagaaaggaagtttacatgcaaatgggagacagaaagatgtagacaaggaattctatttgtttcctacagtatttgatgagaatgagagtttactcctggaagataatattagaatgtttacaactgcacctgatcaggtggataaggaagatgaagactttcaggaatctaataaaatgcactccatgaatggattcatgtatgggaatcagccgggtctcactatgtgcaaaggagattcggtcgtgtggtacttattcagcgccggaaatgaggccgatgtacatggaatatacttttcaggaaacacatatctgtggagaggagaacggagagacacagcaaacctcttccctcaaacaagtcttacgctccacatgtggcctgacacagaggggacttttaatgttgaatgccttacaactgatcattacacaggcggcatgaagcaaaaatatactgtgaaccaatgcaggcggcagtctgaggattccaccttctacctgggagagaggacatactatatcgcagcagtggaggtggaatgggattattccccacaaagggagtgggaaaaggagctgcatcatttacaagagcagaatgtttcaaatgcatttttagataagggagagttttacataggctcaaagtacaagaaagttgtgtatcggcagtatactgatagcacattccgtgttccagtggagagaaaagctgaagaagaacatctgggaattctaggtccacaacttcatgcagatgttggagacaaagtcaaaattatctttaaaaacatggccacaaggccctactcaatacatgcccatggggtacaaacagagagttctacagttactccaacattaccaggtgaaactctcacttacgtatggaaaatcccagaaagatctggagctggaacagaggattctgcttgtattccatgggcttattattcaactgtggatcaagttaaggacctctacagtggattaattggccccctgattgtttgtcgaagaccttacttgaaagtattcaatcccagaaggaaactggaatttgcccttctgtttctagtttttgatgagaatgaatcttggtacttagatgacaacatcaaaacatactctgatcaccccgagaaagtaaacaaagatgatgaggaattcatagaaagcaataaaatgcatgctattaatggaagaatgtttggaaacctacaaggcctcacaatgcacgtgggagatgaagtcaactggtatctgatgggaatgggcaatgaaatagacttacacactgtacattttcacggccatagcttccaatacaagcacaggggagtttatagttctgatgtctttgacattttccctggaacataccaaaccctagaaatgtttccaagaacacctggaatttggttactccactgccatgtgaccgaccacattcatgctggaatggaaaccacttacaccgttctacaaaatgaagacaccaaatctggctgaatgaaataaattggtgataagtggaaaaaagagaaaaaccaatgattcataacaatgtatgtgaaagtgtaaaatagaatgttactttggaatgactataaacattaaaagaagactggaagcatacaactttgtacatttgtgggggaaaactattaattttttgcaaatggaaagatcaacagactatataatgatacatgactgacacttgtacactaggtaataaaactgattcatacagtctaaaaaaaaaaagaaagaacaaaaaaatttttggccccccccggccccgaaaacgtttgtaaaaccactccgttataggcggcgccggggccccatgtgagtgatagttcagacgccttgggtccttaggcgtcgttcccaaggagaagaccctccgggtcataggactaagtggcgttgggatttcttccagccgaattaaaagaaccgcccggggggagacccgagcgttttttagagaagatgtccaaatggaagttcgagaggccatacggggatcctttaacgagagttccaaagagctctcatttaaattacg

SEQ ID NO: 367522 - DNA, 3991 bp, Homo sapiens
agagaagcctggcaaccaagaactgtttttttggtggtttacgagaacttaactgaattggaaaatatttgctttaatgaaacaatttactcttgtgcaacactaaattgtgtcaatcaagcaaataaggaagaaagtcttatttataaaattgcctgctcctgattttacttcatttcttctcaggctccaagaaggggaaaaaaatgaagattttgatacttggtatttttctgtttttatgtagtaccccagcctgggcgaaagaaaagcattattacattggaattattgaaacgacttgggattatgcctctgaccatggggaaaagaaacttatttctgttgacacggaacattccaatatctatcttcaaaatggcccagatagaattgggagactatataagaaggccctttatcttcagtacacagatgaaacctttaggacaactatagaaaaaccggtctggcttgggtttttaggccctattatcaaagctgaaactggagataaagtttatgtacacttaaaaaaccttgcctctaggccctacacctttcattcacatggaataacttactataaggaacatgagggggccatctaccctgataacaccacagattttcaaagagcagatgacaaagtatatccaggagagcagtatacatacatgttgcttgccactgaagaacaaagtcctggggaaggagatggcaattgtgtgactaggatttaccattcccacattgatgctccaaaagatattgcctcaggactcatcggacctttaataatctgtaaaaaagattctctagataaagaaaaagaaaaacatattgaccgagaatttgtggtgatgttttctgtggtggatgaaaatttcagctggtacctagaagacaacattaaaacctactgctcagaaccagagaaagttgacaaagacaacgaagacttccaggagagtaacagaatgtattctgtgaatggatacacttttggaagtctcccaggactctccatgtgtgctgaagacagagtaaaatggtacctttttggtatgggtaatgaagttgatgtgcacgcagctttctttcacgggcaagcactgactaacaagaactaccgtattgacacaatcaacctctttcctgctaccctgtttgatgcttatatggtggcccagaaccctggagaatggatgctcagctgtcagaatctaaaccatctgaaagccggtttgcaagcctttttccaggtccaggagtgtaacaagtcttcatcaaaggataatatccgtgggaagcatgttagacactactacattgccgctgaggaaatcatctggaactatgctccctctggtatagacatcttcactaaagaaaacttaacagcacctggaagtgactcagcggtgttttttgaacaaggtaccacaagaattggaggctcttataaaaagctggtttatcgtgagtacacagatgcctccttcacaaatcgaaaggagagaggccctgaagaagagcatcttggcatcctgggtcctgtcatttgggcagaggtgggagacaccatcagagtaaccttccataacaaaggagcatatcccctcagtattgagccgattggggtgagattcaataagaacaacgagggcacatactattccccaaattacaacccccagagcagaagtgtgcctccttcagcctcccatgtggcacccacagaaacattcacctatgaatggactgtccccaaagaagtaggacccactaatgcagatcctgtgtgtctagctaagatgtattattctgctgtggatcccactaaagatatattcactgggcttattgggccaatgaaaatatgcaagaaaggaagtttacatgcaaatgggagacagaaagatgtagacaaggaattctatttgtttcctacagtatttgatgagaatgagagtttactcctggaagataatattagaatgtttacaactgcacctgatcaggtggataaggaagatgaagactttcaggaatctaataaaatgcactccatgaatggattcatgtatgggaatcagccgggtctcactatgtgcaaaggagattcggtcgtgtggtacttattcagcgccggaaatgaggccgatgtacatggaatatacttttcaggaaacacatatctgtggagaggagaacggagagacacagcaaacctcttccctcaaacaagtcttacgctccacatgtggcctgacacagaggggacttttaatgttgaatgccttacaactgatcattacacaggcggcatgaagcaaaaatatactgtgaaccaatgcaggcggcagtctgaggattccaccttctacctgggagagaggacatactatatcgcagcagtggaggtggaatgggattattccccacaaagggagtgggaaaaggagctgcatcatttacaagagcagaatgtttcaaatgcatttttagataagggagagttttacataggctcaaagtacaagaaagttgtgtatcggcagtatactgatagcacattccgtgttccagtggagagaaaagctgaagaagaacatctgggaattctaggtccacaacttcatgcagatgttggagacaaagtcaaaattatctttaaaaacatggccacaaggccctactcaatacatgcccatggggtacaaacagagagttctacagttactccaacattaccaggtgaaactctcacttacgtatggaaaatcccagaaagatctggagctggaacagaggattctgcttgtattccatgggcttattattcaactgtggatcaagttaaggacctctacagtggattaattggccccctgattgtttgtcgaagaccttacttgaaagtattcaatcccagaaggaaactggaatttgcccttctgtttctagtttttgatgagaatgaatcttggtacttagatgacaacatcaaaacatactctgatcaccccgagaaagtaaacaaagatgatgaggaattcatagaaagcaataaaatgcatgctattaatggaagaatgtttggaaacctacaaggcctcacaatgcacgtgggagatgaagtcaactggtatctgatgggaatgggcaatgaaatagacttacacactgtacattttcacggccatagcttccaatacaagcacaggggagtttatagttctgatgtctttgacattttccctggaacataccaaaccctagaaatgtttccaagaacacctggaatttggttactccactgccatgtgaccgaccacattcatgctggaatggaaaccacttacaccgttctacaaaatgaagcatcttctgagactcacaggagaatatggaatgtgatctacccaatcacagtcagtgtgattattttattccaaatatctaccaaggaatgaccaggagaataagatcctccgatgttcgcaatggtgtggtgtcaggaggctgcctcttagacaatctccagatgtactgtgatgtgagtttgaaaaagagttcctgaagtaccacatctgggagacatgccactagctgagcttcccaaaagtctaccaagagctgaggaattgtatcttcgggatcctctagcacaaagaattgtatcttcatccttagcacaaagcaccttaaaaacagtaaaaggagcctctatattccagataaatatagcactgataaagcgacagctgggctgaatatcacagcatcacatgggccacgcaatcaataatttaccattagcattagcgccatggcaaaagcaaatttagacatttttaaaaggaaacagattctaggatgtacaaataaagtttctacagatatagtcttttaattagtacttttatcttataaactgattatgtatgtctgttttttcaataaacaaacaaatgaaaaaaaaaat

SEQ ID NO: 367523 - DNA, 3828 bp, Homo sapiens
agagaagcctggcaaccaagaactgtttttttggtggtttacgagaacttaactgaattggaaaatatttgctttaatgaaacaatttactcttgtgcaacactaaattgtgtcaatcaagcaaataaggaagaaagtcttatttataaaattgcctgctcctgattttacttcatttcttctcaggctccaagaaggggaaaaaaatgaagattttgatacttggtatttttctgtttttatgtagtaccccagcctgggcgaaagaaaagcattattacattggaattattgaaacgacttgggattatgcctctgaccatggggaaaagaaacttatttctgttgacacggaacattccaatatctatcttcaaaatggcccagatagaattgggagactatataagaaggccctttatcttcagtacacagatgaaacctttaggacaactatagaaaaaccggtctggcttgggtttttaggccctattatcaaagctgaaactggagataaagtttatgtacacttaaaaaaccttgcctctaggccctacacctttcattcacatggaataacttactataaggaacatgagggggccatctaccctgataacaccacagattttcaaagagcagatgacaaagtatatccaggagagcagtatacatacatgttgcttgccactgaagaacaaagtcctggggaaggagatggcaattgtgtgactaggatttaccattcccacattgatgctccaaaagatattgcctcaggactcatcggacctttaataatctgtaaaaaagattctctagataaagaaaaagaaaaacatattgaccgagaatttgtggtgatgttttctgtggtggatgaaaatttcagctggtacctagaagacaacattaaaacctactgctcagaaccagagaaagttgacaaagacaacgaagacttccaggagagtaacagaatgtattctgtgaatggatacacttttggaagtctcccaggactctccatgtgtgctgaagacagagtaaaatggtacctttttggtatgggtaatgaagttgatgtgcacgcagctttctttcacgggcaagcactgactaacaagaactaccgtattgacacaatcaacctctttcctgctaccctgtttgatgcttatatggtggcccagaaccctggagaatggatgctcagctgtcagaatctaaaccatctgaaagccggtttgcaagcctttttccaggtccaggagtgtaacaagtcttcatcaaaggataatatccgtgggaagcatgttagacactactacattgccgctgaggaaatcatctggaactatgctccctctggtatagacatcttcactaaagaaaacttaacagcacctggaagtgactcagcggtgttttttgaacaaggtaccacaagaattggaggctcttataaaaagctggtttatcgtgagtacacagatgcctccttcacaaatcgaaaggagagaggccctgaagaagagcatcttggcatcctgggtcctgtcatttgggcagaggtgggagacaccatcagagtaaccttccataacaaaggagcatatcccctcagtattgagccgattggggtgagattcaataagaacaacgagggcacatactattccccaaattacaacccccagagcagaagtgtgcctccttcagcctcccatgtggcacccacagaaacattcacctatgaatggactgtccccaaagaagtaggacccactaatgcagatcctgtgtgtctagctaagatgtattattctgctgtggatcccactaaagatatattcactgggcttattgggccaatgaaaatatgcaagaaaggaagtttacatgcaaatgggagacagaaagatgtagacaaggaattctatttgtttcctacagtatttgatgagaatgagagtttactcctggaagataatattagaatgtttacaactgcacctgatcaggtggataaggaagatgaagactttcaggaatctaataaaatgcactccatgaatggattcatgtatgggaatcagccgggtctcactatgtgcaaaggagattcggtcgtgtggtacttattcagcgccggaaatgaggccgatgtacatggaatatacttttcaggaaacacatatctgtggagaggagaacggagagacacagcaaacctcttccctcaaacaagtcttacgctccacatgtggcctgacacagaggggacttttaatgttgaatgccttacaactgatcattacacaggcggcatgaagcaaaaatatactgtgaaccaatgcaggcggcagtctgaggattccaccttctacctgggagagaggacatactatatcgcagcagtggaggtggaatgggattattccccacaaagggagtgggaaaaggagctgcatcatttacaagagcagaatgtttcaaatgcatttttagataagggagagttttacataggctcaaagtacaagaaagttgtgtatcggcagtatactgatagcacattccgtgttccagtggagagaaaagctgaagaagaacatctgggaattctaggtccacaacttcatgcagatgttggagacaaagtcaaaattatctttaaaaacatggccacaaggccctactcaatacatgcccatggggtacaaacagagagttctacagttactccaacattaccaggtgaaactctcacttacgtatggaaaatcccagaaagatctggagctggaacagaggattctgcttgtattccatgggcttattattcaactgtggatcaagttaaggacctctacagtggattaattggccccctgattgtttgtcgaagaccttacttgaaagtattcaatcccagaaggaaactggaatttgcccttctgtttctagtttttgatgagaatgaatcttggtacttagatgacaacatcaaaacatactctgatcaccccgagaaagtaaacaaagatgatgaggaattcatagaaagcaataaaatgcatgctattaatggaagaatgtttggaaacctacaaggcctcacaatgcacgtgggagatgaagtcaactggtatctgatgggaatgggcaatgaaatagacttacacactgtacattttcacggccatagcttccaatacaagcatcttctgagactcacaggagaatatggaatgtgatctacccaatcacagtcagtgtgattattttattccaaatatctaccaaggaatgaccaggagaataagatcctccgatgttcgcaatggtgtggtgtcaggaggctgcctcttagacaatctccagatgtactgtgatgtgagtttgaaaaagagttcctgaagtaccacatctgggagacatgccactagctgagcttcccaaaagtctaccaagagctgaggaattgtatcttcgggatcctctagcacaaagaattgtatcttcatccttagcacaaagcaccttaaaaacagtaaaaggagcctctatattccagataaatatagcactgataaagcgacagctgggctgaatatcacagcatcacatgggccacgcaatcaataatttaccattagcattagcgccatggcaaaagcaaatttagacatttttaaaaggaaacagattctaggatgtacaaataaagtttctacagatatagtcttttaattagtacttttatcttataaactgattatgtatgtctgttttttcaataaacaaacaaatgaaaaaaaaaat

SEQ ID NO: 367524 - DNA, 3410 bp, Homo sapiens
agagaagcctggcaaccaagaactgtttttttggtggtttacgagaacttaactgaattggaaaatatttgctttaatgaaacaatttactcttgtgcaacactaaattgtgtcaatcaagcaaataaggaagaaagtcttatttataaaattgcctgctcctgattttacttcatttcttctcaggctccaagaaggggaaaaaaatgaagattttgatacttggtatttttctgtttttatgtagtaccccagcctgggcgaaagaaaagcattattacattggaattattgaaacgacttgggattatgcctctgaccatggggaaaagaaacttatttctgttgacacggaacattccaatatctatcttcaaaatggcccagatagaattgggagactatataagaaggccctttatcttcagtacacagatgaaacctttaggacaactatagaaaaaccggtctggcttgggtttttaggccctattatcaaagctgaaactggagataaagtttatgtacacttaaaaaaccttgcctctaggccctacacctttcattcacatggaataacttactataaggaacatgagggggccatctaccctgataacaccacagattttcaaagagcagatgacaaagtatatccaggagagcagtatacatacatgttgcttgccactgaagaacaaagtcctggggaaggagatggcaattgtgtgactaggatttaccattcccacattgatgctccaaaagatattgcctcaggactcatcggacctttaataatctgtaaaaaagattctctagataaagaaaaagaaaaacatattgaccgagaatttgtggtgatgttttctgtggtggatgaaaatttcagctggtacctagaagacaacattaaaacctactgctcagaaccagagaaagttgacaaagacaacgaagacttccaggagagtaacagaatgtattctgtgaatggatacacttttggaagtctcccaggactctccatgtgtgctgaagacagagtaaaatggtacctttttggtatgggtaatgaagttgatgtgcacgcagctttctttcacgggcaagcactgactaacaagaactaccgtattgacacaatcaacctctttcctgctaccctgtttgatgcttatatggtggcccagaaccctggagaatggatgctcagctgtcagaatctaaaccatctgaaagccggtttgcaagcctttttccaggtccaggagtgtaacaagtcttcatcaaaggataatatccgtgggaagcatgttagacactactacattgccgctgaggaaatcatctggaactatgctccctctggtatagacatcttcactaaagaaaacttaacagcacctggaagtgactcagcggtgttttttgaacaaggtaccacaagaattggaggctcttataaaaagctggtttatcgtgagtacacagatgcctccttcacaaatcgaaaggagagaggccctgaagaagagcatcttggcatcctgggtcctgtcatttgggcagaggtgggagacaccatcagagtaaccttccataacaaaggagcatatcccctcagtattgagccgattggggtgagattcaataagaacaacgagggcacatactattccccaaattacaacccccagagcagaagtgtgcctccttcagcctcccatgtggcacccacagaaacattcacctatgaatggactgtccccaaagaagtaggacccactaatgcagatcctgtgtgtctagctaagatgtattattctgctgtggatcccactaaagatatattcactgggcttattgggccaatgaaaatatgcaagaaaggaagtttacatgcaaatgggagacagaaagatgtagacaaggaattctatttgtttcctacagtatttgatgagaatgagagtttactcctggaagataatattagaatgtttacaactgcacctgatcaggtggataaggaagatgaagactttcaggaatctaataaaatgcactccatgaatggattcatgtatgggaatcagccgggtctcactatgtgcaaaggagattcggtcgtgtggtacttattcagcgccggaaatgaggccgatgtacatggaatatacttttcaggaaacacatatctgtggagaggagaacggagagacacagcaaacctcttccctcaaacaagtcttacgctccacatgtggcctgacacagaggggacttttaatgttgaatgccttacaactgatcattacacaggcggcatgaagcaaaaatatactgtgaaccaatgcaggcggcagtctgaggattccaccttctacctgggagagaggacatactatatcgcagcagtggaggtggaatgggattattccccacaaagggagtgggaaaaggagctgcatcatttacaagagcagaatgtttcaaatgcatttttagataagggagagttttacataggctcaaagtacaagaaagttgtgtatcggcagtatactgatagcacattccgtgttccagtggagagaaaagctgaagaagaacatctgggaattctaggtccacaacttcatgcagatgttggagacaaagtcaaaattatctttaaaaacatggccacaaggccctactcaatacatgcccatggggtacaaacagagagttctacagttactccaacattaccaggtgaaactctcacttacgtatggaaaatcccagaaagatctggagctggaacagaggattctgcttgtattccatgggcttattattcaactgtggatcaagttaaggacctctacagtggattaattggccccctgattgtttgtcgaagaccttacttgaaagtattcaatcccagaaggaaactggaatttgcccttctgtttctagtttttgatgagaatgaatcttggtacttagatgacaacatcaaaacatactctgatcattacacaggcggcatgaagcaaaaatatactgtgaaccaatgcaggcggcagtctgaggattccaccttctacctgggagagaggacatactatatcgcagcagtggaggtggaatgggattattccccacaaagggagtgggaaaaggagctgcatcatttacaagagcagaatgtttcaaatgcatttttagataagggagagttttacataggctcaaagtacaagaaagttgtgtatcggcagtatactgatagcacattccgtgttccagtggagagaaaagctgaagaagaacatctgggaattctaggtccacaacttcatgcagatgttggagacaaagtcaaaattatctttagttctacagttactccaaca

SEQ ID NO: 367525 - DNA, 3268 bp, Homo sapiens
  misc_feature (2876)..(2876): n is a, c, g, or t
  misc_feature (2883)..(2883): n is a, c, g, or t
  misc_feature (2886)..(2886): n is a, c, g, or t
  misc_feature (2893)..(2893): n is a, c, g, or t
  misc_feature (3065)..(3065): n is a, c, g, or t
agagaagcctggcaaccaagaactgtttttttggtggtttacgagaacttaactgaattggaaaatatttgctttaatgaaacaatttactcttgtgcaacactaaattgtgtcaatcaagcaaataaggaagaaagtcttatttataaaattgcctgctcctgattttacttcatttcttctcaggctccaagaaggggaaaaaaatgaagattttgatacttggtatttttctgtttttatgtagtaccccagcctgggcgaaagaaaagcattattacattggaattattgaaacgacttgggattatgcctctgaccatggggaaaagaaacttatttctgttgacacggaacattccaatatctatcttcaaaatggcccagatagaattgggagactatataagaaggccctttatcttcagtacacagatgaaacctttaggacaactatagaaaaaccggtctggcttgggtttttaggccctattatcaaagctgaaactggagataaagtttatgtacacttaaaaaaccttgcctctaggccctacacctttcattcacatggaataacttactataaggaacatgagggggccatctaccctgataacaccacagattttcaaagagcagatgacaaagtatatccaggagagcagtatacatacatgttgcttgccactgaagaacaaagtcctggggaaggagatggcaattgtgtgactaggatttaccattcccacattgatgctccaaaagatattgcctcaggactcatcggacctttaataatctgtaaaaaagattctctagataaagaaaaagaaaaacatattgaccgagaatttgtggtgatgttttctgtggtggatgaaaatttcagctggtacctagaagacaacattaaaacctactgctcagaaccagagaaagttgacaaagacaacgaagacttccaggagagtaacagaatgtattctgtgaatggatacacttttggaagtctcccaggactctccatgtgtgctgaagacagagtaaaatggtacctttttggtatgggtaatgaagttgatgtgcacgcagctttctttcacgggcaagcactgactaacaagaactaccgtattgacacaatcaacctctttcctgctaccctgtttgatgcttatatggtggcccagaaccctggagaatggatgctcagctgtcagaatctaaaccatctgaaagccggtttgcaagcctttttccaggtccaggagtgtaacaagtcttcatcaaaggataatatccgtgggaagcatgttagacactactacattgccgctgaggaaatcatctggaactatgctccctctggtatagacatcttcactaaagaaaacttaacagcacctggaagtgactcagcggtgttttttgaacaaggtaccacaagaattggaggctcttataaaaagctggtttatcgtgagtacacagatgcctccttcacaaatcgaaaggagagaggccctgaagaagagcatcttggcatcctgggtcctgtcatttgggcagaggtgggagacaccatcagagtaaccttccataacaaaggagcatatcccctcagtattgagccgattggggtgagattcaataagaacaacgagggcacatactattccccaaattacaacccccagagcagaagtgtgcctccttcagcctcccatgtggcacccacagaaacattcacctatgaatggactgtccccaaagaagtaggacccactaatgcagatcctgtgtgtctagctaagatgtattattctgctgtggatcccactaaagatatattcactgggcttattgggccaatgaaaatatgcaagaaaggaagtttacatgcaaatgggagacagaaagatgtagacaaggaattctatttgtttcctacagtatttgatgagaatgagagtttactcctggaagataatattagaatgtttacaactgcacctgatcaggtggataaggaagatgaagactttcaggaatctaataaaatgcactccatgaatggattcatgtatgggaatcagccgggtctcactatgtgcaaaggagattcggtcgtgtggtacttattcagcgccggaaatgaggccgatgtacatggaatatacttttcaggaaacacatatctgtggagaggagaacggagagacacagcaaacctcttccctcaaacaagtcttacgctccacatgtggcctgacacagaggggacttttaatgttgaatgccttacaactgatcattacacaggcggcatgaagcaaaaatatactgtgaaccaatgcaggcggcagtctgaggattccaccttctacctgggagagaggacatactatatcgcagcagtggaggtggaatgggattattccccacaaagggagtgggaaaaggagctgcatcatttacaagagcagaagtaattctccagactctgattcccaatttcagcagtaattttaggtttccttttcagagaagtaagaattacaccaaattttagaaaaaaaaaaaaagttgcattaaacaataacaacaacaacaacaacaacaacaaaacacttcctaggaacttgtccttattcatttccgcttctctcaatttccttaagggaaaatttccatttatcttctttgatcctttggagtcttgctttcttttctactggagtgtcttctcacattcatgtgccctcatgttgtcatttatattcaaacttaacaaaagttaatgcccaaattacaacccccagagcagaagtgtgcctccttcagcctcccatgtggcacccacagaaacattnacctatnaanggactgnccccaaagaagtaggacccactaatgcagatcctgtgtgtctagctaagatgtattattctgctgtggatcccactaaagatatattcactgggcttattgggccaatgtatgcaagaaaggaagtttacatgcaaatgggagacagaaagatgtagacaaggaattctatntgtttcctacagtatttgatgagaatgagagtttactcctggaagataatattagaatgtttacaactgcacctgatcaggtggataaggaagatgaagactttcaggaatctaattgcaaaggagattcggtcgtgtggtacttattcagcgccggaaatgaggccgatgtacatggtatacttttcaggcacattctgtgg

SEQ ID NO: 367526 - DNA, 1291 bp, Homo sapiens
  misc_feature (1221)..(1221): n is a, c, g, or t
  misc_feature (1235)..(1235): n is a, c, g, or t
agagaagcctggcaaccaagaactgtttttttggtggtttacgagaacttaactgaattggaaaatatttgctttaatgaaacaatttactcttgtgcaacactaaattgtgtcaatcaagcaaataaggaagaaagtcttatttataaaattgcctgctcctgattttacttcatttcttctcaggctccaagaaggggaaaaaaatgaagattttgatacttggtatttttctgtttttatgtagtaccccagcctgggcgaaagaaaagcattattacattggaattattgaaacgacttgggattatgcctctgaccatggggaaaagaaacttatttctgttgacacggaacattccaatatctatcttcaaaatggcccagatagaattgggagactatataagaaggccctttatcttcagtacacagatgaaacctttaggacaactatagaaaaaccggtctggcttgggtttttaggccctattatcaaagctgaaactggagataaagtttatgtacacttaaaaaaccttgcctctaggccctacacctttcattcacatggaataacttactataaggaacatgagggggccatctaccctgataacaccacagattttcaaagagcagatgacaaagtatatccaggagagcagtatacatacatgttgcttgccactgaagaacaaagtcctggggaaggagatggcaattgtgtgactaggatttaccattcccacattgatgctccaaaagatattgcctcaggactcatcggacctttaataatctgtaaaaaagattctctagataaagaaaaagaaaaacatattgaccgagaatttgtggtgatgttttctgtggtggatgaaaatttcagctggtacctagaagacaacattaaaacctactgctcagaaccagagaaagttgacaaagacaacgaagacttccaggagagtaacagaatgtattctgtgaatggatacacttttggaagtctcccaggactctccatgtgtgctgaagacagagtaaaatggtacctttttggtatgggtaatgaagttgatgtgcacgcagctttctttcacgggcaagcactgactaacaagaactaccgtattgacacaatcaacctctttcctgctaccctgtttgatgcttatatggtggcccagaaccctgggaaaaatgggatgcctccancttgttcaaaaatnctaaacccatcttgaaaaaccccggtttgccaaaccctttttttcccaggttccca

SEQ ID NO: 367527 - DNA, 14331 bp, Homo sapiens
  misc_feature (1383)..(1383): n is a, c, g, or t
  misc_feature (1392)..(1392): n is a, c, g, or t
  misc_feature (5192)..(5194): n is a, c, g, or t
  misc_feature (9022)..(9022): n is a, c, g, or t
  misc_feature (9066)..(9066): n is a, c, g, or t
ggccggcgagcgggcggctgcgggcggcgcggagcgggcggcgcggagcgagcgagcgagagagcggcgcgggccgggccatggggtggcgggcgccgggcgcgctgctgctggcgctgctgctgcacgggcggctgctggcggtgacccatgggctgagggcatacgatggcttgtctctgcctgaggacatagagaccgtcacagcaagccaaatgcgctggacacattcgtacctttctgatgatgaggacatgctggctgacagcatctcaggagacgacctgggcagtggggacctgggcagcggggacttccagatggtttatttccgagccctggtgaatttcactcgctccatcgagtacagccctcagctggaggatgcaggctccagagagtttcgagaggtgtccgaggctgtggtagacacgctggagtcggagtacttgaaaattcccggagaccaggttgtcagtgtggtgttcatcaaggagctggatggctgggtttttgtggagctcgatgtgggctcggaagggaatgcggatggtgctcagattcaggagatgctgctcagggtcatctccagcggctctgtggcctcctacgtcacctctccccagggattccagttccgacgcctgggcacagtgccccagttcccaagagcctgcacggaggccgagtttgcctgccacagctacaatgagtgtgtggccctggagtatcgctgtgaccggcggcccgactgcagggacatgtctgatgagctcaattgtgaggagccagtcctgggtatcagccccacattctctctccttgtggagacgacatctttaccgccccggccagagacaaccatcatgcgacagccaccagtcacccacgctcctcagcccctgcttcccggttccgtcaggcccctgccctgtgggccccaggaggccgcatgccgcaatgggcactgcatccccagagactacctctgcgacggacaggaggactgcgaggacggcagcgatgagctagactgtggccccccgccaccctgtgagcccaacgagttcccctgcgggaatggacattgtgccctcaagctgtggcgctgcgatggtgactttgactgtgaggaccgaactgatgaagccaactgccccaccaagcgtcctgaggaagtgtgcgggcccacacagttccgatgcgtctctaccaacatgtgcatcccagccagcttccactgtgacgaggagagcgactgtcctgaccggagcgacgagtttggctgcatgcccccccaggtggtgacacctccccgggagtccatccaggcttcccggggccagacagtgaccttcacctgcgtggccattggcgtccccnccccctttntcatcaattggaggctcaactggggccacatcccctctcatcccagggtgacagtgaccagcgagggtggccgtggcacactgatcatccgtgatgtgaaggagtcagaccagggtgcctacacctgtgaggccatgaacgcccggggcatggtgtttggcattcctgacggtgtccttgagctcgtcccacaacgaggcccctgccctgacggccacttctacctggagcacagcgccgcctgcctgccctgcttctgctttggcatcaccagcgtgtgccagagcacccgccgcttccgggaccagatcaggctgcgctttgaccaacccgatgacttcaagggtgtgaatgtgacaatgcctgcgcagcccggcacgccacccctctcctccacgcagctgcagatcgacccatccctgcacgagttccagctagtcgacctgtcccgccgcttcctcgtccacgactccttctgggctctgcctgaacagttcctgggcaacaaggtggactcctatggcggctccctgcgttacaacgtgcgctacgagttggcccgtggcatgctggagccagtgcagcggccggacgtggtcctcgtgggtgccgggtaccgcctcctctcccgaggccacacacccacccaacctggtgctctgaaccagcgccaggtccagttctctgaggagcactgggtccatgagtctggccggccggtgcagcgcgcggagctgctgcaggtgctgcagagcctggaggccgtgctcatccagaccgtgtacaacaccaagatggctagcgtgggacttagcgacatcgccatggataccaccgtcacccatgccaccagccatggccgtgcccacagtgtggaggagtgcagatgccccattggctattctggcttgtcctgcgagagctgtgatgcccacttcactcgggtgcctggtgggccctacctgggcacctgctctggttgcagttgcaatggccatgccagctcctgtgaccctgtgtatggccactgcctgaattgccagcacaacacggaggggccacagtgcaacaagtgcaaggctggcttctttggggacgccatgaaggccacggccacttcctgccggccctgcccttgcccatacatcgatgcctcccgcagattctcagacacttgcttcctggacacggatggccaagccacatgtgacgcctgtgccccaggctacactggccgccgctgtgagagctgtgcccccggatacgagggcaaccccatccagcccggcgggaagtgcaggcccgtcaaccaggagattgtgcgctgtgacgagcgtggcagcatggggacctccggggaggcctgccgctgtaagaacaatgtggtggggcgcttgtgcaatgaatgtgctgacggctctttccacctgagtacccgaaaccccgatggctgcctcaagtgcttctgcatgggtgtcagtcgccactgcaccagctcttcatggagccgtgcccagttgcatggggcctctgaggagcctggtcacttcagcctgaccaacgccgcaagcacccacaccaccaacgagggcatcttctcccccacgcccggggaactgggattctcctccttccacagactcttatctggaccctacttctggagcctcccttcacgcttcctgggggacaaggtgacctcctatggaggagagctgcgcttcacagtgacccagaggtcccagccgggctccacacccctgcacgggcagccgttggtggtgctgcaaggtaacaacatcatcctagagcaccatgtggcccaggagcccagccccggccagcccagcaccttcattgtgcctttccgggagcaagcatggcagcggcccgatgggcagccagccacacgggagcacctgctgatggcactggcaggcatcgacaccctcctgatccgagcatcctacgcccagcagcccgctgagagcagggtctctggcatcagcatggacgtggctgtgcccgaggaaaccggccaggaccccgcgctggaagtggaacagtgctcctgcccacccgggtaccgtgggccgtcctgccaggactgtgacacaggctacacacgcacgcccagtggcctctacctgggtacctgtgaacgctgcagctgccatggccactcagaggcctgcgagccagaaacaggtgcctgccagggctgccagcatcacacggagggccctcggtgtgagcagtgccagccaggatactacggggacgcccagcgggggacaccacaggactgccagctgtgcccctgctacggagaccctgctgccggccaggctgcccacacttgttttctggacacagacggccaccccacctgtgatgcgtgctccccaggccacagtgggcgtcactgtgagaggtgcgcccctggctactatggcaaccccagccagggccagccatgccagagagacagccaggtgccagggcccataggctgcaactgtgacccccaaggcagcgtcagcagccagtgtgatgctgctggtcagtgccagtgcaaggcccaggtggaaggcctcacttgcagccactgccggccccaccacttccacctgagtgccagcaacccagacggctgcctgccctgcttctgtatgggcatcacccagcagtgcgccagctctgcctacacacgccacctgatctccacccactttgcccctggggacttccaaggctttgccctggtgaacccacagcgaaacagccgcctgacaggagaattcactgtggaacccgtgcccgagggtgcccagctctcttttggcaactttgcccaactcggccatgagtccttctactggcagctgccggagacataccagggagacaaggtggcggcctacggtgggaagttgcgatacaccctctcctacacagcaggcccacagggcagcccactctctgaccccgatgtgcagatcacgggcaacaacatcatgctagtggcctcccagccagcgctgcagggccctgagaggaggagctacgagatcatgttccgagaggaattctggcgccggcccgatgggcagccggccacacgcgagcacctcctgatggcactggccgacctggatgagctcctgatccgggccacgttctcctccgtgccgctggtggccagcatcagcgcagtcagcctggaggtcgcccagccggggccctcaaacagaccccgcgccctcgaggtggaggagtgccgctgcccgccaggctacatcggtctgtcctgccaggactgtgcccccggctacacgcgcaccgggagtgggctctacctcggccactgcgagctatgtgaatgcaatggccactcagacctgtgccacccagagactggggcctgctcgcaatgccagcacaacgccgcaggggagttctgcgagctttgtgcccctggctactacggagatgccacagccgggacgcctgaggactgccagccctgtgcctgcccactgaccaacccagagaacatgttttcccgcacctgtgagagcctgggagccggcgggtaccgctgcacggcctgcgaacccggctacactggccagtactgtgagcagtgtggcccaggttacgtgggtaaccccagtgtgcaagggggccagtgcctgccagagacaaaccaagccccactggtggtcgaggtccatcctgctcgaagcatagtgccccaaggtggctcccactccctgcggtgtcaggtcagtgggagnnnaccccactacttctattggtcccgtgaggatgggcggcctgtgcccagcggcacccagcagcgacatcaaggctccgagctccacttccccagcgtccagccctcggatgctggggtctacatttgcacctgccgtaatctccaccaatccaataccagccgggcagagctgctggtcactgaggctccaagcaagcccatcacagtgactgtggaggagcagcggagccagagcgtgcgccccggagctgacgtcaccttcatctgcacagccaaaagcaagtccccagcctataccctggtgtggacccgcctgcacaacgggaaactgcccacccgagccatggatttcaatggcatcctgaccattcgcaacgtccagctgagtgatgcaggcacctacgtgtgcaccggctccaacatgtttgccatggaccagggcacagccactctacatgtgcaggcctcgggcaccttgtccgcccccgtggtctccatccatccgccacagctcacagtgcagcccgggcaactggcggagttccgctgcagcgccacagggagccccacgcccaccctcgagtggacagggggccccggcggccagctccctgcgaaggcacaaatccacggcggcatcctgcgcctgccagctgtcgagcccacggatcaggcccagtacttgtgccgagcccacagcagcgctgggcagcaggtggccagggctgtgctccacgtgcatgggggcggtgggcccagagtccaagtgagcccagagaggacccaggtccacgcaggccgcaccgtcaggctgtactgcagggctgcaggcgtgcctagcgccaccatcacctggaggaaggaagggggcagcctcccaccacaggcccggtcagagcgcacagacatcgcgacactgctcatcccagccatcacgactgctgacgccggcttctacctctgcgtggccaccagccctgcaggcactgcccaggcccggatccaagtggttgtcctttcagcctcagatgccagcccaccgccggtcaagattgagtcctcatcgccttctgtgacagaagggcaaacactcgacctcaactgtgtggtggcagggtcagcccatgcccaggtcacctggtacaggcgagggggtagcctgcctccccacacccaggtgcacggctcccgtctgcggctcccccaggtctcaccagctgattctggagaatatgtgtgccgtgtggagaatggatcgggccccaaggaggcctccattactgtgtctgtgctccacggcacccattctggccccagctacaccccagtgcccggcagcacccggcccatccgcatcgagccctcctcctcacacgtggcggaagggcagaccctggatctgaactgcgtggtgcccgggcaggcccacgcccaggtcacgtggcacaagcgtgggggcagcctccctgcccggcaccagacccacggctcgctgctgcggctgcaccaggtgaccccggccgactcaggcgagtatgtgtgccatgtggtgggcacctccggccccctagaggcctcagtcctggtcaccatcgaagcctctgtcatccctggacccatcccacctgtcaggatcgagtcttcatcctccacagtggccgagggccagaccctggatctgagctgcgtggtggcagggcaggcccacgcccaggtcacatggtacaagcgtgggggcagcctccctgcccggcaccaggttcgtggctcccgcctgtacatcttccaggcctcacctgccgatgcgggacagtacgtctgccgggccagcaacggcatggaggcctccatcacggtcacagtaactgggacccagggggccaacttagcctaccctgccggcagcacccagcccatccgcatcgagccctcctcctcgcaagtggcggaagggcagaccctggatctgaactgcgtggtgcccgggcagtcccatgcccaggtcacgtggcacaagcgtgggggcagcctccctgtccggcaccagacccacggctccctgctgagactctaccaagcgtcccccgccgactcgggcgagtacgtgtgccgagtgttgggcagctccgtgcctctagaggcctctgtcctggtcaccattgagcctgcgggctcagtgcctgcacttggggtcacccccacggtccggatcgagtcatcgtcttcgcaagtggccgaggggcagaccctggacctgaactgcctcgttgctggtcaggcccatgcccaggtcacgtggcacaagcgcgggggcagcctcccggcccggcaccaggtgcatggctcgaggctacgcctgctccaggtgaccccagctgattcaggggagtacgtgtgccgtgtggtcggcagctcaggtacccaggaagcctcagtccttgtcaccatccagcagcgccttagtggctcccactcccagggtgtggcgtaccccgtccgcatcgagtcctcctcagcctccctggccaatggacacaccctggacctcaactgcctggttgccagccaggctccccacaccatcacctggtataagcgtggaggcagcttacccagccggcaccagatcgtgggctcccggctgcggatccctcaggtgactccggcagactcgggcgagtacgtgtgtcacgtcagtaacggtgcaggctcccgggagacctcgctcatcgtcaccatccagggcagcggttcctcccacgtgcccagcgtctccccaccgatcaggatcgagtcgtcttcccccacggtggtggaagggcagaccttggatctgaactgcgtggtcgccaggcagccccaggctatcatcacatggtacaagcgtgggggcagccttccctcccgacaccagacccatggctcccacctgcggttgcaccaaatgtctgtggctgactcgggcgagtatgtgtgccgggccaacaacaacatcgatgccctggaggcctccatcgtcatctccgtctcccctagcgccggcagcccctccgcccctggcagctccatgcccatcagaattgagtcatcctcctcacacgtggccgaaggggagaccctggatctgaactgcgtggtccccgggcaggcccatgcccaggtcacttggcacaagcgtgggggcagcctccccagtcaccatcagacccgcggctcacggctgcggctgcaccatgtgtccccggccgactcgggtgaatacgtgtgccgggtgatgggcagctctggccccctggaggcctcagtcctggtcaccatcgaagcctctggctcaagtgctgtccacgtccccgccccaggtggagccccacccatccgcatcgagccctcctcctcccgagtggcagaagggcagaccctggatctgaagtgcgtggtgcccgggcaggcccacgcccaggtcacgtggcacaagcgtggaggaaacctccctgcccggcaccaggtccacggcccactgctgaggctgaaccaggtgtccccggctgactctggcgagtactcgtgccaagtgaccggaagctcaggcaccctggaggcatctgtcctggtcacaattgagccctccagcccaggacccattcctgctccaggactggcccagcccatctacatcgaggcctcctcttcacacgtgactgaagggcagactctggatctgaactgtgtggtgcccgggcaggcccatgcccaggtcacgtggtacaagcgcgggggcagcctccccgcccggcaccagacccatggctcccagctgcggctccaccncgtctcccctgccgactcaggcgagtatgtgtgtcgtgcagccngcggcccaggccctgagcaagaagcctccttcacagtcaccgtcccgcccagtgaggggtcttcctaccgccttaggagcccggtcatctccatcgacccgcccagcagcaccgtgcagcagggccaggatgccagcttcaagtgcctcatccatgacggggcagcccccatcagcctcgagtggaagacccggaaccaggagctggaggacaacgtccacatcagtcccaatggctccatcatcaccatcgtgggcacccggcccagcaaccacggtacctaccgctgcgtggcctccaatgcctacggtgtggcccagagtgtggtgaacctcagtgtgcacgggccccctacagtgtccgtgctccccgagggccccgtgtgggtgaaagtgggaaaggctgtcaccctggagtgtgtcagtgccggggagccccgctcctctgctcgttggacccggatcagcagcacccctgccaagttggagcagcggacatatgggctcatggacagccacgcggtgctgcagatttcatcagctaaaccatcagatgcgggcacttatgtgtgccttgctcagaatgcactaggcacagcacagaagcaggtggaggtgatcgtggacacgggcgccatggccccaggggcccctcaggtccaagctgaagaagctgagctgactgtggaggctggacacacggccaccttgcgctgctcagccacaggcagccccgcgcccaccatccactggtccaagctgcgttccccactgccctggcagcaccggctggaaggtgacacactcatcataccccgggtagcccagcaggactcgggccagtacatctgcaatgccactagccctgctgggcacgctgaggccaccatcatcctgcacgtggagagcccaccatatgccaccacggtcccagagcacgcttcggtgcaggcaggggagacggtgcagctccagtgcctggctcacgggacacccccactcaccttccagtggagccgcgtgggcagcagccttcctgggagggcgaccgccaggaacgagctgctgcactttgagcgtgcagcccctgaggactcaggccgctaccgctgccgggtcaccaacaaggtgggctcagccgaggcctttgcccagctgctcgtccaaggccctcccggctctctccctgccacctccatcccagcagggtccacgcccaccgtgcaggtcacgcctcagctagagaccaagagcattggggccagcgttgagttccactgtgctgtgcccagcgaccggggtacccagctccgttggttcaaggaagggggtcagctgcctccgggtcacagcgtgcaggatggggtgctccgaatccagaacttggaccagagctgccaagggacgtatatatgccaggcccatggaccttgggggaaggcccaggccagtgcccagctggttatccaagccctgccctcggtgctcatcaacatccggacctctgtgcagaccgtggtggttggccacgccgtggagttcgaatgcctggcactgggtgaccccaagcctcaggtgacatggagcaaagttggagggcacctgcggccaggcattgtgcagagcggaggtgtcgtcaggatcgcccacgtagagctggctgatgcgggacagtatcgctgcactgccaccaacgcagctggcaccacacaatcccacgtcctgctgcttgtgcaagccttgccccagatctcaatgccccaagaagtccgtgtgcctgctggttctgcagctgtcttcccctgcatagcctcaggctaccccactcctgacatcagctggagcaagctggatggcagcctgccacctgacagccgcctggagaacaacatgctgatgctgccctcagtccgaccccaggacgcaggtacctacgtctgcaccgccactaaccgccagggcaaggtcaaagcctttgcccacctgcaggtgccagagcgggtggtgccctacttcacgcagaccccctactccttcctaccgctgcccaccatcaaggatgcctacaggaagttcgagatcaagatcaccttccggcccgactcagccgatgggatgctgctgtacaatgggcagaagcgagtcccagggagccccaccaacctggccaaccggcagcccgacttcatctccttcggcctcgtggggggaaggcccgagttccggttcgatgcaggctcaggcatggccaccatccgccatcccacaccactggccctgggccatttccacaccgtgaccctgctgcgcagcctcacccagggctccctgattgtgggtgacctggccccggtcaatgggacctcccagggcaagttccagggcctggatctgaacgaggaactctacctgggtggctatcctgactatggtgccatccccaaggcggggctgagcagcggcttcataggctgtgtccgggagctgcgcatccagggcgaggagatcgtcttccatgacctcaacctcacggcgcacggcatctcccactgccccacctgtcgggaccggccctgccagaatggcggtcagtgccatgactctgagagcagcagctacgtgtgcgtctgcccagctggcttcaccgggagccgctgtgagcactcgcaggccctgcactgccatccagaggcctgtgggcccgacgccacctgtgtgaaccggcctgacggtcgaggctacacctgccgctgccacctgggccgctcggggttgcggtgtgaggaaggtgtgacagtgaccaccccctcgctgtcgggtgctggctcctacctggcactgcccgccctcaccaacacacaccacgagctacgcctggacgtggagttcaagccactcgcccctgacggggtcctgctgttcagcggggggaagagcgggcctgtggaggacttcgtgtccctggcgatggtgggcggccacctggagttccgctatgagttggggtcagggctggccgttctgcggagcgccgagccgctggccctgggccgctggcaccgtgtgtctgcagagcgtctcaacaaggacggcagcctgcgggtgaatggtggacgccctgtgctgcgctcctcgcccggcaagagccagggcctcaacctgcacaccctgctctacctggggggtgtggagccttccgtgccactgtccccggccaccaacatgagcgctcacttccgcggctgtgtgggcgaggtgtcagtgaatggcaaacggctggacctcacctacagtttcctaggcagccagggcatcgggcaatgctatgatagctccccatgtgagcgccagccttgccaacatggtgccacgtgcatgcccgctggcgagtatgagttccagtgcctgtgtcgagatggattcaaaggagacctgtgtgagcacgaggagaacccctgccagctccgtgaaccctgtctgcatgggggcacctgccagggcacccgctgcctctgcctccctggcttctctggcccacgctgccaacaaggctctggacatggcatagcagagtccgactggcatcttgaaggcagcgggggcaatgatgcccctgggcagtacggagcctatttccacgatgatggcttcctcgccttccctggccatgtcttctccaggagcctgcccgaggtgcccgagaccatcgagctggaggttcggaccagcacagccagtggcctcctgctctggcagggtgtggaggtgggagaggccggccaaggcaaggacttcatcagcctcgggcttcaagacgggcaccttgtcttcaggtaccagctgggtagtggggaggcccgcctggtctctgaggaccccatcaatgacggcgagtggcaccgggtgacagcactgcgggagggccgcagaggttccatccaagtcgacggtgaggagctggtcagcggccggtccccaggtcccaacgtggcagtcaacgccaagggcagcgtctacatcggcggagcccctgacgtggccacgctgaccgggggcagattctcctcgggcatcacaggctgtgtcaagaacctggtgctgcactcggcccgacccggcgccccgcccccacagcccctggacctgcagcaccgcgcccaggccggggccaacacacgcccctgcccctcgtaggcacctgcctgccccacacggactcccgggccacgccccagcccgacaatgtcgagtatattattattaatattattatgaatttttgtaagaaaccgaggcgatgccacgctttgctgctaccgccctgggctggactggaggtgggcatgccaccctcacacacacagctgggcaaagccacaaggctggccagcaaggcaggttggatgggagtgggcacctcagaaagtcaccaggacttggggtcaggaacagtggctgggtgggcccagaactgcccccactgtccccctacccaccgatggagcccccagatagagctgggtggcctgtttctgcagcccttgggcagttctcactcctaggagagccaacctcggcttgtgggctggtgccccacagctacctgagacgggcatcgcaggagtctctgccacccactcaggattgggaattgtctttagtgccggctgtggagcaaaaggcagctcacccctgggcaggcggtccccatccccaccagctcgtttttcagcacccccacccacctccacccagcccctggcacctcctctggcagactccccctcctaccacgtcctcctggcctgcattcccaccccctcctgccagcacacagcctggggtccctccctcaggggctgtaagggaaggcccaccccaactcttaccaggagctgctacaggcagagcccagcactgatagggccccgcccaccgggccccgcccaccccaggccacatccccacccatctggaagtgaaggcccagggactcctccaacagacaacggacggacggatgccgctggtgctcaggaagagctagtgccttaggtgggggaaggcaggactcacgactgagagagagaggagggggatatgaccaccctgccccatctgcaggagcctgaagatccagctcaagtgccatcctgccagtggcccccagactgtggggttgggacgcctggcctctgtgtcctagaagggaccctcctgtggtctttgtcttgatttttcttaataaacggtgctatccccgcca

SEQ ID NO: 367528 - DNA, 771 bp, Homo sapiens
tgtgctgcgtgatttagaggatcccctcagcacacggaggatgggaaggaagcctggcaccgcggaaaggcctatgggatgagtcgctgtgggtggaaattcaggaattggtcgggggatcattgggacctttagttgcccttctttgggtacaggctgtcccggaacagggcctgagcgtcggggcgggagcctcatggaggagctgagaacacaggtgtctcgctgaccctcctctcctgcctgtctccatccccagggagctggatggctgggtttttgtggagctcgatgtgggctcggaagggaatgcggatggtgctcagattcaggagatgctgctcagggtcatctccagcggctctgtggcctcctacgtcacctctccccagggattccagttccgacgcctgggcacaggtgagcctatcctggtgtctgggatcgcctcctccagactcgtggggtcccctttcagtgtctctgccataggctcccaacttgggcttgcacaccactagaaacagggagctcactactcctgagtctgccccatcgatctttacacaatcttggcttggtagagcacagactgtttcctctagcacatacccgttagacccgagttctgctccttccttctagacctctgcacattgacaataggtaatcaggcctttatttatcctgtacttccaagtccaaaacacattagtacttaataataatgagcaactgtttactgagcactgactgcctttatttccagcc

SEQ ID NO: 367529 - DNA, 380 bp, Homo sapiens
ctccaaggcctcccaggaggctggcctggccctcactagcccagccccccggggtgtgatgggcagacctctggcatcaggacccccctccctccagagtcacctccgtgtcttttcactggcctatgtgccccccagaggcctgtgggcccgacgccacctgtgtgaaccggcctgacggtcgaggctacacctgccgctgccacctgggccgctcggggttgcggtgtgaggaaggtgaggggagccaggcctgagacccccagggtcctagtgtcagctggggaggctgggtggggcactctgaggccatgatgggccctacggatgataaaacgattcccaagccagaggatctcgaagtcacctggccacatgtc

SEQ ID NO: 367530 - DNA, 14844 bp, Homo sapiens
  misc_feature (1383)..(1383): n is a, c, g, or t
  misc_feature (1392)..(1392): n is a, c, g, or t
  misc_feature (5192)..(5194): n is a, c, g, or t
  misc_feature (9022)..(9022): n is a, c, g, or t
  misc_feature (9066)..(9066): n is a, c, g, or t
  misc_feature (14844)..(14844): n is a, c, g, or t
ggccggcgagcgggcggctgcgggcggcgcggagcgggcggcgcggagcgagcgagcgagagagcggcgcgggccgggccatggggtggcgggcgccgggcgcgctgctgctggcgctgctgctgcacgggcggctgctggcggtgacccatgggctgagggcatacgatggcttgtctctgcctgaggacatagagaccgtcacagcaagccaaatgcgctggacacattcgtacctttctgatgatgaggacatgctggctgacagcatctcaggagacgacctgggcagtggggacctgggcagcggggacttccagatggtttatttccgagccctggtgaatttcactcgctccatcgagtacagccctcagctggaggatgcaggctccagagagtttcgagaggtgtccgaggctgtggtagacacgctggagtcggagtacttgaaaattcccggagaccaggttgtcagtgtggtgttcatcaaggagctggatggctgggtttttgtggagctcgatgtgggctcggaagggaatgcggatggtgctcagattcaggagatgctgctcagggtcatctccagcggctctgtggcctcctacgtcacctctccccagggattccagttccgacgcctgggcacagtgccccagttcccaagagcctgcacggaggccgagtttgcctgccacagctacaatgagtgtgtggccctggagtatcgctgtgaccggcggcccgactgcagggacatgtctgatgagctcaattgtgaggagccagtcctgggtatcagccccacattctctctccttgtggagacgacatctttaccgccccggccagagacaaccatcatgcgacagccaccagtcacccacgctcctcagcccctgcttcccggttccgtcaggcccctgccctgtgggccccaggaggccgcatgccgcaatgggcactgcatccccagagactacctctgcgacggacaggaggactgcgaggacggcagcgatgagctagactgtggccccccgccaccctgtgagcccaacgagttcccctgcgggaatggacattgtgccctcaagctgtggcgctgcgatggtgactttgactgtgaggaccgaactgatgaagccaactgccccaccaagcgtcctgaggaagtgtgcgggcccacacagttccgatgcgtctctaccaacatgtgcatcccagccagcttccactgtgacgaggagagcgactgtcctgaccggagcgacgagtttggctgcatgcccccccaggtggtgacacctccccgggagtccatccaggcttcccggggccagacagtgaccttcacctgcgtggccattggcgtccccnccccctttntcatcaattggaggctcaactggggccacatcccctctcatcccagggtgacagtgaccagcgagggtggccgtggcacactgatcatccgtgatgtgaaggagtcagaccagggtgcctacacctgtgaggccatgaacgcccggggcatggtgtttggcattcctgacggtgtccttgagctcgtcccacaacgaggcccctgccctgacggccacttctacctggagcacagcgccgcctgcctgccctgcttctgctttggcatcaccagcgtgtgccagagcacccgccgcttccgggaccagatcaggctgcgctttgaccaacccgatgacttcaagggtgtgaatgtgacaatgcctgcgcagcccggcacgccacccctctcctccacgcagctgcagatcgacccatccctgcacgagttccagctagtcgacctgtcccgccgcttcctcgtccacgactccttctgggctctgcctgaacagttcctgggcaacaaggtggactcctatggcggctccctgcgttacaacgtgcgctacgagttggcccgtggcatgctggagccagtgcagcggccggacgtggtcctcgtgggtgccgggtaccgcctcctctcccgaggccacacacccacccaacctggtgctctgaaccagcgccaggtccagttctctgaggagcactgggtccatgagtctggccggccggtgcagcgcgcggagctgctgcaggtgctgcagagcctggaggccgtgctcatccagaccgtgtacaacaccaagatggctagcgtgggacttagcgacatcgccatggataccaccgtcacccatgccaccagccatggccgtgcccacagtgtggaggagtgcagatgccccattggctattctggcttgtcctgcgagagctgtgatgcccacttcactcgggtgcctggtgggccctacctgggcacctgctctggttgcagttgcaatggccatgccagctcctgtgaccctgtgtatggccactgcctgaattgccagcacaacacggaggggccacagtgcaacaagtgcaaggctggcttctttggggacgccatgaaggccacggccacttcctgccggccctgcccttgcccatacatcgatgcctcccgcagattctcagacacttgcttcctggacacggatggccaagccacatgtgacgcctgtgccccaggctacactggccgccgctgtgagagctgtgcccccggatacgagggcaaccccatccagcccggcgggaagtgcaggcccgtcaaccaggagattgtgcgctgtgacgagcgtggcagcatggggacctccggggaggcctgccgctgtaagaacaatgtggtggggcgcttgtgcaatgaatgtgctgacggctctttccacctgagtacccgaaaccccgatggctgcctcaagtgcttctgcatgggtgtcagtcgccactgcaccagctcttcatggagccgtgcccagttgcatggggcctctgaggagcctggtcacttcagcctgaccaacgccgcaagcacccacaccaccaacgagggcatcttctcccccacgcccggggaactgggattctcctccttccacagactcttatctggaccctacttctggagcctcccttcacgcttcctgggggacaaggtgacctcctatggaggagagctgcgcttcacagtgacccagaggtcccagccgggctccacacccctgcacgggcagccgttggtggtgctgcaaggtaacaacatcatcctagagcaccatgtggcccaggagcccagccccggccagcccagcaccttcattgtgcctttccgggagcaagcatggcagcggcccgatgggcagccagccacacgggagcacctgctgatggcactggcaggcatcgacaccctcctgatccgagcatcctacgcccagcagcccgctgagagcagggtctctggcatcagcatggacgtggctgtgcccgaggaaaccggccaggaccccgcgctggaagtggaacagtgctcctgcccacccgggtaccgtgggccgtcctgccaggactgtgacacaggctacacacgcacgcccagtggcctctacctgggtacctgtgaacgctgcagctgccatggccactcagaggcctgcgagccagaaacaggtgcctgccagggctgccagcatcacacggagggccctcggtgtgagcagtgccagccaggatactacggggacgcccagcgggggacaccacaggactgccagctgtgcccctgctacggagaccctgctgccggccaggctgcccacacttgttttctggacacagacggccaccccacctgtgatgcgtgctccccaggccacagtgggcgtcactgtgagaggtgcgcccctggctactatggcaaccccagccagggccagccatgccagagagacagccaggtgccagggcccataggctgcaactgtgacccccaaggcagcgtcagcagccagtgtgatgctgctggtcagtgccagtgcaaggcccaggtggaaggcctcacttgcagccactgccggccccaccacttccacctgagtgccagcaacccagacggctgcctgccctgcttctgtatgggcatcacccagcagtgcgccagctctgcctacacacgccacctgatctccacccactttgcccctggggacttccaaggctttgccctggtgaacccacagcgaaacagccgcctgacaggagaattcactgtggaacccgtgcccgagggtgcccagctctcttttggcaactttgcccaactcggccatgagtccttctactggcagctgccggagacataccagggagacaaggtggcggcctacggtgggaagttgcgatacaccctctcctacacagcaggcccacagggcagcccactctctgaccccgatgtgcagatcacgggcaacaacatcatgctagtggcctcccagccagcgctgcagggccctgagaggaggagctacgagatcatgttccgagaggaattctggcgccggcccgatgggcagccggccacacgcgagcacctcctgatggcactggccgacctggatgagctcctgatccgggccacgttctcctccgtgccgctggtggccagcatcagcgcagtcagcctggaggtcgcccagccggggccctcaaacagaccccgcgccctcgaggtggaggagtgccgctgcccgccaggctacatcggtctgtcctgccaggactgtgcccccggctacacgcgcaccgggagtgggctctacctcggccactgcgagctatgtgaatgcaatggccactcagacctgtgccacccagagactggggcctgctcgcaatgccagcacaacgccgcaggggagttctgcgagctttgtgcccctggctactacggagatgccacagccgggacgcctgaggactgccagccctgtgcctgcccactgaccaacccagagaacatgttttcccgcacctgtgagagcctgggagccggcgggtaccgctgcacggcctgcgaacccggctacactggccagtactgtgagcagtgtggcccaggttacgtgggtaaccccagtgtgcaagggggccagtgcctgccagagacaaaccaagccccactggtggtcgaggtccatcctgctcgaagcatagtgccccaaggtggctcccactccctgcggtgtcaggtcagtgggagnnnaccccactacttctattggtcccgtgaggatgggcggcctgtgcccagcggcacccagcagcgacatcaaggctccgagctccacttccccagcgtccagccctcggatgctggggtctacatttgcacctgccgtaatctccaccaatccaataccagccgggcagagctgctggtcactgaggctccaagcaagcccatcacagtgactgtggaggagcagcggagccagagcgtgcgccccggagctgacgtcaccttcatctgcacagccaaaagcaagtccccagcctataccctggtgtggacccgcctgcacaacgggaaactgcccacccgagccatggatttcaatggcatcctgaccattcgcaacgtccagctgagtgatgcaggcacctacgtgtgcaccggctccaacatgtttgccatggaccagggcacagccactctacatgtgcaggcctcgggcaccttgtccgcccccgtggtctccatccatccgccacagctcacagtgcagcccgggcaactggcggagttccgctgcagcgccacagggagccccacgcccaccctcgagtggacagggggccccggcggccagctccctgcgaaggcacaaatccacggcggcatcctgcgcctgccagctgtcgagcccacggatcaggcccagtacttgtgccgagcccacagcagcgctgggcagcaggtggccagggctgtgctccacgtgcatgggggcggtgggcccagagtccaagtgagcccagagaggacccaggtccacgcaggccgcaccgtcaggctgtactgcagggctgcaggcgtgcctagcgccaccatcacctggaggaaggaagggggcagcctcccaccacaggcccggtcagagcgcacagacatcgcgacactgctcatcccagccatcacgactgctgacgccggcttctacctctgcgtggccaccagccctgcaggcactgcccaggcccggatccaagtggttgtcctttcagcctcagatgccagcccaccgccggtcaagattgagtcctcatcgccttctgtgacagaagggcaaacactcgacctcaactgtgtggtggcagggtcagcccatgcccaggtcacctggtacaggcgagggggtagcctgcctccccacacccaggtgcacggctcccgtctgcggctcccccaggtctcaccagctgattctggagaatatgtgtgccgtgtggagaatggatcgggccccaaggaggcctccattactgtgtctgtgctccacggcacccattctggccccagctacaccccagtgcccggcagcacccggcccatccgcatcgagccctcctcctcacacgtggcggaagggcagaccctggatctgaactgcgtggtgcccgggcaggcccacgcccaggtcacgtggcacaagcgtgggggcagcctccctgcccggcaccagacccacggctcgctgctgcggctgcaccaggtgaccccggccgactcaggcgagtatgtgtgccatgtggtgggcacctccggccccctagaggcctcagtcctggtcaccatcgaagcctctgtcatccctggacccatcccacctgtcaggatcgagtcttcatcctccacagtggccgagggccagaccctggatctgagctgcgtggtggcagggcaggcccacgcccaggtcacatggtacaagcgtgggggcagcctccctgcccggcaccaggttcgtggctcccgcctgtacatcttccaggcctcacctgccgatgcgggacagtacgtctgccgggccagcaacggcatggaggcctccatcacggtcacagtaactgggacccagggggccaacttagcctaccctgccggcagcacccagcccatccgcatcgagccctcctcctcgcaagtggcggaagggcagaccctggatctgaactgcgtggtgcccgggcagtcccatgcccaggtcacgtggcacaagcgtgggggcagcctccctgtccggcaccagacccacggctccctgctgagactctaccaagcgtcccccgccgactcgggcgagtacgtgtgccgagtgttgggcagctccgtgcctctagaggcctctgtcctggtcaccattgagcctgcgggctcagtgcctgcacttggggtcacccccacggtccggatcgagtcatcgtcttcgcaagtggccgaggggcagaccctggacctgaactgcctcgttgctggtcaggcccatgcccaggtcacgtggcacaagcgcgggggcagcctcccggcccggcaccaggtgcatggctcgaggctacgcctgctccaggtgaccccagctgattcaggggagtacgtgtgccgtgtggtcggcagctcaggtacccaggaagcctcagtccttgtcaccatccagcagcgccttagtggctcccactcccagggtgtggcgtaccccgtccgcatcgagtcctcctcagcctccctggccaatggacacaccctggacctcaactgcctggttgccagccaggctccccacaccatcacctggtataagcgtggaggcagcttacccagccggcaccagatcgtgggctcccggctgcggatccctcaggtgactccggcagactcgggcgagtacgtgtgtcacgtcagtaacggtgcaggctcccgggagacctcgctcatcgtcaccatccagggcagcggttcctcccacgtgcccagcgtctccccaccgatcaggatcgagtcgtcttcccccacggtggtggaagggcagaccttggatctgaactgcgtggtcgccaggcagccccaggctatcatcacatggtacaagcgtgggggcagccttccctcccgacaccagacccatggctcccacctgcggttgcaccaaatgtctgtggctgactcgggcgagtatgtgtgccgggccaacaacaacatcgatgccctggaggcctccatcgtcatctccgtctcccctagcgccggcagcccctccgcccctggcagctccatgcccatcagaattgagtcatcctcctcacacgtggccgaaggggagaccctggatctgaactgcgtggtccccgggcaggcccatgcccaggtcacttggcacaagcgtgggggcagcctccccagtcaccatcagacccgcggctcacggctgcggctgcaccatgtgtccccggccgactcgggtgaatacgtgtgccgggtgatgggcagctctggccccctggaggcctcagtcctggtcaccatcgaagcctctggctcaagtgctgtccacgtccccgccccaggtggagccccacccatccgcatcgagccctcctcctcccgagtggcagaagggcagaccctggatctgaagtgcgtggtgcccgggcaggcccacgcccaggtcacgtggcacaagcgtggaggaaacctccctgcccggcaccaggtccacggcccactgctgaggctgaaccaggtgtccccggctgactctggcgagtactcgtgccaagtgaccggaagctcaggcaccctggaggcatctgtcctggtcacaattgagccctccagcccaggacccattcctgctccaggactggcccagcccatctacatcgaggcctcctcttcacacgtgactgaagggcagactctggatctgaactgtgtggtgcccgggcaggcccatgcccaggtcacgtggtacaagcgcgggggcagcctccccgcccggcaccagacccatggctcccagctgcggctccaccncgtctcccctgccgactcaggcgagtatgtgtgtcgtgcagccngcggcccaggccctgagcaagaagcctccttcacagtcaccgtcccgcccagtgaggggtcttcctaccgccttaggagcccggtcatctccatcgacccgcccagcagcaccgtgcagcagggccaggatgccagcttcaagtgcctcatccatgacggggcagcccccatcagcctcgagtggaagacccggaaccaggagctggaggacaacgtccacatcagtcccaatggctccatcatcaccatcgtgggcacccggcccagcaaccacggtacctaccgctgcgtggcctccaatgcctacggtgtggcccagagtgtggtgaacctcagtgtgcacgggccccctacagtgtccgtgctccccgagggccccgtgtgggtgaaagtgggaaaggctgtcaccctggagtgtgtcagtgccggggagccccgctcctctgctcgttggacccggatcagcagcacccctgccaagttggagcagcggacatatgggctcatggacagccacgcggtgctgcagatttcatcagctaaaccatcagatgcgggcacttatgtgtgccttgctcagaatgcactaggcacagcacagaagcaggtggaggtgatcgtggacacgggcgccatggccccaggggcccctcaggtccaagctgaagaagctgagctgactgtggaggctggacacacggccaccttgcgctgctcagccacaggcagccccgcgcccaccatccactggtccaagctgcgttccccactgccctggcagcaccggctggaaggtgacacactcatcataccccgggtagcccagcaggactcgggccagtacatctgcaatgccactagccctgctgggcacgctgaggccaccatcatcctgcacgtggagagcccaccatatgccaccacggtcccagagcacgcttcggtgcaggcaggggagacggtgcagctccagtgcctggctcacgggacacccccactcaccttccagtggagccgcgtgggcagcagccttcctgggagggcgaccgccaggaacgagctgctgcactttgagcgtgcagcccctgaggactcaggccgctaccgctgccgggtcaccaacaaggtgggctcagccgaggcctttgcccagctgctcgtccaaggccctcccggctctctccctgccacctccatcccagcagggtccacgcccaccgtgcaggtcacgcctcagctagagaccaagagcattggggccagcgttgagttccactgtgctgtgcccagcgaccggggtacccagctccgttggttcaaggaagggggtcagctgcctccgggtcacagcgtgcaggatggggtgctccgaatccagaacttggaccagagctgccaagggacgtatatatgccaggcccatggaccttgggggaaggcccaggccagtgcccagctggttatccaagccctgccctcggtgctcatcaacatccggacctctgtgcagaccgtggtggttggccacgccgtggagttcgaatgcctggcactgggtgaccccaagcctcaggtgacatggagcaaagttggagggcacctgcggccaggcattgtgcagagcggaggtgtcgtcaggatcgcccacgtagagctggctgatgcgggacagtatcgctgcactgccaccaacgcagctggcaccacacaatcccacgtcctgctgcttgtgcaagccttgccccagatctcaatgccccaagaagtccgtgtgcctgctggttctgcagctgtcttcccctgcatagcctcaggctaccccactcctgacatcagctggagcaagctggatggcagcctgccacctgacagccgcctggagaacaacatgctgatgctgccctcagtccgaccccaggacgcaggtacctacgtctgcaccgccactaaccgccagggcaaggtcaaagcctttgcccacctgcaggtgccagagcgggtggtgccctacttcacgcagaccccctactccttcctaccgctgcccaccatcaaggatgcctacaggaagttcgagatcaagatcaccttccggcccgactcagccgatgggatgctgctgtacaatgggcagaagcgagtcccagggagccccaccaacctggccaaccggcagcccgacttcatctccttcggcctcgtggggggaaggcccgagttccggttcgatgcaggctcaggcatggccaccatccgccatcccacaccactggccctgggccatttccacaccgtgaccctgctgcgcagcctcacccagggctccctgattgtgggtgacctggccccggtcaatgggacctcccagggcaagttccagggcctggatctgaacgaggaactctacctgggtggctatcctgactatggtgccatccccaaggcggggctgagcagcggcttcataggctgtgtccgggagctgcgcatccagggcgaggagatcgtcttccatgacctcaacctcacggcgcacggcatctcccactgccccacctgtcgggaccggccctgccagaatggcggtcagtgccatgactctgagagcagcagctacgtgtgcgtctgcccagctggcttcaccgggagccgctgtgagcactcgcaggccctgcactgccatccagaggcctgtgggcccgacgccacctgtgtgaaccggcctgacggtcgaggctacacctgccgctgccacctgggccgctcggggttgcggtgtgaggaaggtgtgacagtgaccaccccctcgctgtcgggtgctggctcctacctggcactgcccgccctcaccaacacacaccacgagctacgcctggacgtggagttcaagccactcgcccctgacggggtcctgctgttcagcggggggaagagcgggcctgtggaggacttcgtgtccctggcgatggtgggcggccacctggagttccgctatgagttggggtcagggctggccgttctgcggagcgccgagccgctggccctgggccgctggcaccgtgtgtctgcagagcgtctcaacaaggacggcagcctgcgggtgaatggtggacgccctgtgctgcgctcctcgcccggcaagagccagggcctcaacctgcacaccctgctctacctggggggtgtggagccttccgtgccactgtccccggccaccaacatgagcgctcacttccgcggctgtgtgggcgaggtgtcagtgaatggcaaacggctggacctcacctacagtttcctaggcagccagggcatcgggcaatgctatgatagctccccatgtgagcgccagccttgccaacatggtgccacgtgcatgcccgctggcgagtatgagttccagtgcctgtgtcgagatggattcaaaggagacctgtgtgagcacgaggagaacccctgccagctccgtgaaccctgtctgcatgggggcacctgccagggcacccgctgcctctgcctccctggcttctctggcccacgctgccaacaaggctctggacatggcatagcagagtccgactggcatcttgaaggcagcgggggcaatgatgcccctgggcagtacggagcctatttccacgatgatggcttcctcgccttccctggccatgtcttctccaggagcctgcccgaggtgcccgagaccatcgagctggaggttcggaccagcacagccagtggcctcctgctctggcagggtgtggaggtgggagaggccggccaaggcaaggacttcatcagcctcgggcttcaagacgggcaccttgtcttcaggtaccagctgggtagtggggaggcccgcctggtctctgaggaccccatcaatgacggcgagtggcaccgggtgacagcactgcgggagggccgcagaggttccatccaagtcgacggtgaggagctggtcagcggccggtccccaggtcccaacgtggcagtcaacgccaagggcagcgtctacatcggcggagcccctgacgtggccacgctgaccgggggcagattctcctcgggcatcacaggctgtgtcaagaacctggtgctgcactcggcccgacccggcgccccgcccccacagcccctggacctgcagcaccgcgcccaggccggggccaacacacgcccctgcccctcgtaggcacctgcctgccccacacggactcccgggccacgccccagcccgacaatgtcgagtatattattattaatattattatgaatttttgtaagaaaccgaggcgatgccacgctttgctgctaccgccctgggctggactggaggtgggcatgccaccctcacacacacagctgggcaaagccacaaggctggccagcaaggcaggttggatgggagtgggcacctcagaaagtcaccaggacttggggtcaggaacagtggctgggtgggcccagaactgcccccactgtccccctacccaccgatggagcccccagatagagctgggtggcctgtttctgcagcccttgggcagttctcactcctaggagagccaacctcggcttgtgggctggtgccccacagctacctgagacgggcatcgcaggagtctctgccacccactcaggattgggaattgtctttagtgccggctgtggagcaaaaggcagctcacccctgggcaggcggtccccatccccaccagctcgtttttcagcacccccacccacctccacccagcccctggcacctcctctggcagactccccctcctaccacgtcctcctggcctgcattcccaccccctcctgccagcacacagcctggggtccctccctcaggggctgtaagggaaggcccaccccaactcttaccaggagctgctacaggcagagcccagcactgatagggccccgcccaccgggccccgcccaccccaggccacatccccacccatctggaagtgaaggcccagggactcctccaacagacaacggacggacggatgccgctggtgctcaggaagagctagtgccttaggtgggggaaggcaggactcacgactgagagagagaggagggggatatgaccaccctgccccatctgcaggagcctgaagatccagctcaagtgccatcctgccagtggcccccagactgtggggttgggacgcctggcctctgtgtcctagaagggaccctcctgtggtctttgtcttgatttttcttaataaacggtgctatccccgccaaaaaaaaaaaaaaaaaaaaaaaaaaaaaaaaaaaaaaaaaaaaaaaaaaaagggggggggggggggctataaaatatattcccccctcgggggggccccaaaattttagagggggtcaccgagttttttttgtgtaaaagggcggggcccctctaaaaggaggagaggggatttaataaaagaggagagaggcggaggggcgcgcggggttaaaaaaagagggggggagagagggggaaacacggtggctagatgcgggggaatctttggggggagagaggaaccctatttcttgcggggggggggggcaaacatagtggggcgaacaaaccatcccataaagagaagattttaagaggctcatggagggaaaacaatttaacactgagagggggtattagtggggggtcaaacacgaggggataattgtcctggcgggttaaaaaaagatttggataacagagagattatatttgtgaaacattttttcagggggcgtagtaataaaaatgn

SEQ ID NO: 367531 - DNA, 14382 bp, Homo sapiens
  misc_feature (1434)..(1434): n is a, c, g, or t
  misc_feature (1443)..(1443): n is a, c, g, or t
  misc_feature (5243)..(5245): n is a, c, g, or t
  misc_feature (9073)..(9073): n is a, c, g, or t
  misc_feature (9117)..(9117): n is a, c, g, or t
ggccggcgagcgggcggctgcgggcggcgcggagcgggcggcgcggagcgagcgagcgagagagcggcgcgggccgggccatggggtggcgggcgccgggcgcgctgctgctggcgctgctgctgcacgggcggctgctggcggtgacccatgggctgagggcatacgatggcttgtctctgcctgaggacatagagaccgtcacagcaagccaaatgcgctggacacattcgtacctttctgatgatgaggacatgctggctgacagcatctcaggagacgacctgggcagtggggacctgggcagcggggacttccagatggtttatttccgagccctggtgaatttcactcgctccatcgagtacagccctcagctggaggatgcaggctccagagagtttcgagaggtgtccgaggctgtggtagacacgctggagtcggagtacttgaaaattcccggagaccaggttgtcagtgtggtgttcatcaaggagctggatggctgggtttttgtggagctcgatgtgggctcggaagggaatgcggatggtgctcagattcaggagatgctgctcagggtcatctccagcggctctgtggcctcctacgtcacctctccccagggattccagttccgacgcctgggcacagcacagacccccccacccccgccggccgctgtggcggtcgcagtgacaccagtgccccagttcccaagagcctgcacggaggccgagtttgcctgccacagctacaatgagtgtgtggccctggagtatcgctgtgaccggcggcccgactgcagggacatgtctgatgagctcaattgtgaggagccagtcctgggtatcagccccacattctctctccttgtggagacgacatctttaccgccccggccagagacaaccatcatgcgacagccaccagtcacccacgctcctcagcccctgcttcccggttccgtcaggcccctgccctgtgggccccaggaggccgcatgccgcaatgggcactgcatccccagagactacctctgcgacggacaggaggactgcgaggacggcagcgatgagctagactgtggccccccgccaccctgtgagcccaacgagttcccctgcgggaatggacattgtgccctcaagctgtggcgctgcgatggtgactttgactgtgaggaccgaactgatgaagccaactgccccaccaagcgtcctgaggaagtgtgcgggcccacacagttccgatgcgtctctaccaacatgtgcatcccagccagcttccactgtgacgaggagagcgactgtcctgaccggagcgacgagtttggctgcatgcccccccaggtggtgacacctccccgggagtccatccaggcttcccggggccagacagtgaccttcacctgcgtggccattggcgtccccnccccctttntcatcaattggaggctcaactggggccacatcccctctcatcccagggtgacagtgaccagcgagggtggccgtggcacactgatcatccgtgatgtgaaggagtcagaccagggtgcctacacctgtgaggccatgaacgcccggggcatggtgtttggcattcctgacggtgtccttgagctcgtcccacaacgaggcccctgccctgacggccacttctacctggagcacagcgccgcctgcctgccctgcttctgctttggcatcaccagcgtgtgccagagcacccgccgcttccgggaccagatcaggctgcgctttgaccaacccgatgacttcaagggtgtgaatgtgacaatgcctgcgcagcccggcacgccacccctctcctccacgcagctgcagatcgacccatccctgcacgagttccagctagtcgacctgtcccgccgcttcctcgtccacgactccttctgggctctgcctgaacagttcctgggcaacaaggtggactcctatggcggctccctgcgttacaacgtgcgctacgagttggcccgtggcatgctggagccagtgcagcggccggacgtggtcctcgtgggtgccgggtaccgcctcctctcccgaggccacacacccacccaacctggtgctctgaaccagcgccaggtccagttctctgaggagcactgggtccatgagtctggccggccggtgcagcgcgcggagctgctgcaggtgctgcagagcctggaggccgtgctcatccagaccgtgtacaacaccaagatggctagcgtgggacttagcgacatcgccatggataccaccgtcacccatgccaccagccatggccgtgcccacagtgtggaggagtgcagatgccccattggctattctggcttgtcctgcgagagctgtgatgcccacttcactcgggtgcctggtgggccctacctgggcacctgctctggttgcagttgcaatggccatgccagctcctgtgaccctgtgtatggccactgcctgaattgccagcacaacacggaggggccacagtgcaacaagtgcaaggctggcttctttggggacgccatgaaggccacggccacttcctgccggccctgcccttgcccatacatcgatgcctcccgcagattctcagacacttgcttcctggacacggatggccaagccacatgtgacgcctgtgccccaggctacactggccgccgctgtgagagctgtgcccccggatacgagggcaaccccatccagcccggcgggaagtgcaggcccgtcaaccaggagattgtgcgctgtgacgagcgtggcagcatggggacctccggggaggcctgccgctgtaagaacaatgtggtggggcgcttgtgcaatgaatgtgctgacggctctttccacctgagtacccgaaaccccgatggctgcctcaagtgcttctgcatgggtgtcagtcgccactgcaccagctcttcatggagccgtgcccagttgcatggggcctctgaggagcctggtcacttcagcctgaccaacgccgcaagcacccacaccaccaacgagggcatcttctcccccacgcccggggaactgggattctcctccttccacagactcttatctggaccctacttctggagcctcccttcacgcttcctgggggacaaggtgacctcctatggaggagagctgcgcttcacagtgacccagaggtcccagccgggctccacacccctgcacgggcagccgttggtggtgctgcaaggtaacaacatcatcctagagcaccatgtggcccaggagcccagccccggccagcccagcaccttcattgtgcctttccgggagcaagcatggcagcggcccgatgggcagccagccacacgggagcacctgctgatggcactggcaggcatcgacaccctcctgatccgagcatcctacgcccagcagcccgctgagagcagggtctctggcatcagcatggacgtggctgtgcccgaggaaaccggccaggaccccgcgctggaagtggaacagtgctcctgcccacccgggtaccgtgggccgtcctgccaggactgtgacacaggctacacacgcacgcccagtggcctctacctgggtacctgtgaacgctgcagctgccatggccactcagaggcctgcgagccagaaacaggtgcctgccagggctgccagcatcacacggagggccctcggtgtgagcagtgccagccaggatactacggggacgcccagcgggggacaccacaggactgccagctgtgcccctgctacggagaccctgctgccggccaggctgcccacacttgttttctggacacagacggccaccccacctgtgatgcgtgctccccaggccacagtgggcgtcactgtgagaggtgcgcccctggctactatggcaaccccagccagggccagccatgccagagagacagccaggtgccagggcccataggctgcaactgtgacccccaaggcagcgtcagcagccagtgtgatgctgctggtcagtgccagtgcaaggcccaggtggaaggcctcacttgcagccactgccggccccaccacttccacctgagtgccagcaacccagacggctgcctgccctgcttctgtatgggcatcacccagcagtgcgccagctctgcctacacacgccacctgatctccacccactttgcccctggggacttccaaggctttgccctggtgaacccacagcgaaacagccgcctgacaggagaattcactgtggaacccgtgcccgagggtgcccagctctcttttggcaactttgcccaactcggccatgagtccttctactggcagctgccggagacataccagggagacaaggtggcggcctacggtgggaagttgcgatacaccctctcctacacagcaggcccacagggcagcccactctctgaccccgatgtgcagatcacgggcaacaacatcatgctagtggcctcccagccagcgctgcagggccctgagaggaggagctacgagatcatgttccgagaggaattctggcgccggcccgatgggcagccggccacacgcgagcacctcctgatggcactggccgacctggatgagctcctgatccgggccacgttctcctccgtgccgctggtggccagcatcagcgcagtcagcctggaggtcgcccagccggggccctcaaacagaccccgcgccctcgaggtggaggagtgccgctgcccgccaggctacatcggtctgtcctgccaggactgtgcccccggctacacgcgcaccgggagtgggctctacctcggccactgcgagctatgtgaatgcaatggccactcagacctgtgccacccagagactggggcctgctcgcaatgccagcacaacgccgcaggggagttctgcgagctttgtgcccctggctactacggagatgccacagccgggacgcctgaggactgccagccctgtgcctgcccactgaccaacccagagaacatgttttcccgcacctgtgagagcctgggagccggcgggtaccgctgcacggcctgcgaacccggctacactggccagtactgtgagcagtgtggcccaggttacgtgggtaaccccagtgtgcaagggggccagtgcctgccagagacaaaccaagccccactggtggtcgaggtccatcctgctcgaagcatagtgccccaaggtggctcccactccctgcggtgtcaggtcagtgggagnnnaccccactacttctattggtcccgtgaggatgggcggcctgtgcccagcggcacccagcagcgacatcaaggctccgagctccacttccccagcgtccagccctcggatgctggggtctacatttgcacctgccgtaatctccaccaatccaataccagccgggcagagctgctggtcactgaggctccaagcaagcccatcacagtgactgtggaggagcagcggagccagagcgtgcgccccggagctgacgtcaccttcatctgcacagccaaaagcaagtccccagcctataccctggtgtggacccgcctgcacaacgggaaactgcccacccgagccatggatttcaatggcatcctgaccattcgcaacgtccagctgagtgatgcaggcacctacgtgtgcaccggctccaacatgtttgccatggaccagggcacagccactctacatgtgcaggcctcgggcaccttgtccgcccccgtggtctccatccatccgccacagctcacagtgcagcccgggcaactggcggagttccgctgcagcgccacagggagccccacgcccaccctcgagtggacagggggccccggcggccagctccctgcgaaggcacaaatccacggcggcatcctgcgcctgccagctgtcgagcccacggatcaggcccagtacttgtgccgagcccacagcagcgctgggcagcaggtggccagggctgtgctccacgtgcatgggggcggtgggcccagagtccaagtgagcccagagaggacccaggtccacgcaggccgcaccgtcaggctgtactgcagggctgcaggcgtgcctagcgccaccatcacctggaggaaggaagggggcagcctcccaccacaggcccggtcagagcgcacagacatcgcgacactgctcatcccagccatcacgactgctgacgccggcttctacctctgcgtggccaccagccctgcaggcactgcccaggcccggatccaagtggttgtcctttcagcctcagatgccagcccaccgccggtcaagattgagtcctcatcgccttctgtgacagaagggcaaacactcgacctcaactgtgtggtggcagggtcagcccatgcccaggtcacctggtacaggcgagggggtagcctgcctccccacacccaggtgcacggctcccgtctgcggctcccccaggtctcaccagctgattctggagaatatgtgtgccgtgtggagaatggatcgggccccaaggaggcctccattactgtgtctgtgctccacggcacccattctggccccagctacaccccagtgcccggcagcacccggcccatccgcatcgagccctcctcctcacacgtggcggaagggcagaccctggatctgaactgcgtggtgcccgggcaggcccacgcccaggtcacgtggcacaagcgtgggggcagcctccctgcccggcaccagacccacggctcgctgctgcggctgcaccaggtgaccccggccgactcaggcgagtatgtgtgccatgtggtgggcacctccggccccctagaggcctcagtcctggtcaccatcgaagcctctgtcatccctggacccatcccacctgtcaggatcgagtcttcatcctccacagtggccgagggccagaccctggatctgagctgcgtggtggcagggcaggcccacgcccaggtcacatggtacaagcgtgggggcagcctccctgcccggcaccaggttcgtggctcccgcctgtacatcttccaggcctcacctgccgatgcgggacagtacgtctgccgggccagcaacggcatggaggcctccatcacggtcacagtaactgggacccagggggccaacttagcctaccctgccggcagcacccagcccatccgcatcgagccctcctcctcgcaagtggcggaagggcagaccctggatctgaactgcgtggtgcccgggcagtcccatgcccaggtcacgtggcacaagcgtgggggcagcctccctgtccggcaccagacccacggctccctgctgagactctaccaagcgtcccccgccgactcgggcgagtacgtgtgccgagtgttgggcagctccgtgcctctagaggcctctgtcctggtcaccattgagcctgcgggctcagtgcctgcacttggggtcacccccacggtccggatcgagtcatcgtcttcgcaagtggccgaggggcagaccctggacctgaactgcctcgttgctggtcaggcccatgcccaggtcacgtggcacaagcgcgggggcagcctcccggcccggcaccaggtgcatggctcgaggctacgcctgctccaggtgaccccagctgattcaggggagtacgtgtgccgtgtggtcggcagctcaggtacccaggaagcctcagtccttgtcaccatccagcagcgccttagtggctcccactcccagggtgtggcgtaccccgtccgcatcgagtcctcctcagcctccctggccaatggacacaccctggacctcaactgcctggttgccagccaggctccccacaccatcacctggtataagcgtggaggcagcttacccagccggcaccagatcgtgggctcccggctgcggatccctcaggtgactccggcagactcgggcgagtacgtgtgtcacgtcagtaacggtgcaggctcccgggagacctcgctcatcgtcaccatccagggcagcggttcctcccacgtgcccagcgtctccccaccgatcaggatcgagtcgtcttcccccacggtggtggaagggcagaccttggatctgaactgcgtggtcgccaggcagccccaggctatcatcacatggtacaagcgtgggggcagccttccctcccgacaccagacccatggctcccacctgcggttgcaccaaatgtctgtggctgactcgggcgagtatgtgtgccgggccaacaacaacatcgatgccctggaggcctccatcgtcatctccgtctcccctagcgccggcagcccctccgcccctggcagctccatgcccatcagaattgagtcatcctcctcacacgtggccgaaggggagaccctggatctgaactgcgtggtccccgggcaggcccatgcccaggtcacttggcacaagcgtgggggcagcctccccagtcaccatcagacccgcggctcacggctgcggctgcaccatgtgtccccggccgactcgggtgaatacgtgtgccgggtgatgggcagctctggccccctggaggcctcagtcctggtcaccatcgaagcctctggctcaagtgctgtccacgtccccgccccaggtggagccccacccatccgcatcgagccctcctcctcccgagtggcagaagggcagaccctggatctgaagtgcgtggtgcccgggcaggcccacgcccaggtcacgtggcacaagcgtggaggaaacctccctgcccggcaccaggtccacggcccactgctgaggctgaaccaggtgtccccggctgactctggcgagtactcgtgccaagtgaccggaagctcaggcaccctggaggcatctgtcctggtcacaattgagccctccagcccaggacccattcctgctccaggactggcccagcccatctacatcgaggcctcctcttcacacgtgactgaagggcagactctggatctgaactgtgtggtgcccgggcaggcccatgcccaggtcacgtggtacaagcgcgggggcagcctccccgcccggcaccagacccatggctcccagctgcggctccaccncgtctcccctgccgactcaggcgagtatgtgtgtcgtgcagccngcggcccaggccctgagcaagaagcctccttcacagtcaccgtcccgcccagtgaggggtcttcctaccgccttaggagcccggtcatctccatcgacccgcccagcagcaccgtgcagcagggccaggatgccagcttcaagtgcctcatccatgacggggcagcccccatcagcctcgagtggaagacccggaaccaggagctggaggacaacgtccacatcagtcccaatggctccatcatcaccatcgtgggcacccggcccagcaaccacggtacctaccgctgcgtggcctccaatgcctacggtgtggcccagagtgtggtgaacctcagtgtgcacgggccccctacagtgtccgtgctccccgagggccccgtgtgggtgaaagtgggaaaggctgtcaccctggagtgtgtcagtgccggggagccccgctcctctgctcgttggacccggatcagcagcacccctgccaagttggagcagcggacatatgggctcatggacagccacgcggtgctgcagatttcatcagctaaaccatcagatgcgggcacttatgtgtgccttgctcagaatgcactaggcacagcacagaagcaggtggaggtgatcgtggacacgggcgccatggccccaggggcccctcaggtccaagctgaagaagctgagctgactgtggaggctggacacacggccaccttgcgctgctcagccacaggcagccccgcgcccaccatccactggtccaagctgcgttccccactgccctggcagcaccggctggaaggtgacacactcatcataccccgggtagcccagcaggactcgggccagtacatctgcaatgccactagccctgctgggcacgctgaggccaccatcatcctgcacgtggagagcccaccatatgccaccacggtcccagagcacgcttcggtgcaggcaggggagacggtgcagctccagtgcctggctcacgggacacccccactcaccttccagtggagccgcgtgggcagcagccttcctgggagggcgaccgccaggaacgagctgctgcactttgagcgtgcagcccctgaggactcaggccgctaccgctgccgggtcaccaacaaggtgggctcagccgaggcctttgcccagctgctcgtccaaggccctcccggctctctccctgccacctccatcccagcagggtccacgcccaccgtgcaggtcacgcctcagctagagaccaagagcattggggccagcgttgagttccactgtgctgtgcccagcgaccggggtacccagctccgttggttcaaggaagggggtcagctgcctccgggtcacagcgtgcaggatggggtgctccgaatccagaacttggaccagagctgccaagggacgtatatatgccaggcccatggaccttgggggaaggcccaggccagtgcccagctggttatccaagccctgccctcggtgctcatcaacatccggacctctgtgcagaccgtggtggttggccacgccgtggagttcgaatgcctggcactgggtgaccccaagcctcaggtgacatggagcaaagttggagggcacctgcggccaggcattgtgcagagcggaggtgtcgtcaggatcgcccacgtagagctggctgatgcgggacagtatcgctgcactgccaccaacgcagctggcaccacacaatcccacgtcctgctgcttgtgcaagccttgccccagatctcaatgccccaagaagtccgtgtgcctgctggttctgcagctgtcttcccctgcatagcctcaggctaccccactcctgacatcagctggagcaagctggatggcagcctgccacctgacagccgcctggagaacaacatgctgatgctgccctcagtccgaccccaggacgcaggtacctacgtctgcaccgccactaaccgccagggcaaggtcaaagcctttgcccacctgcaggtgccagagcgggtggtgccctacttcacgcagaccccctactccttcctaccgctgcccaccatcaaggatgcctacaggaagttcgagatcaagatcaccttccggcccgactcagccgatgggatgctgctgtacaatgggcagaagcgagtcccagggagccccaccaacctggccaaccggcagcccgacttcatctccttcggcctcgtggggggaaggcccgagttccggttcgatgcaggctcaggcatggccaccatccgccatcccacaccactggccctgggccatttccacaccgtgaccctgctgcgcagcctcacccagggctccctgattgtgggtgacctggccccggtcaatgggacctcccagggcaagttccagggcctggatctgaacgaggaactctacctgggtggctatcctgactatggtgccatccccaaggcggggctgagcagcggcttcataggctgtgtccgggagctgcgcatccagggcgaggagatcgtcttccatgacctcaacctcacggcgcacggcatctcccactgccccacctgtcgggaccggccctgccagaatggcggtcagtgccatgactctgagagcagcagctacgtgtgcgtctgcccagctggcttcaccgggagccgctgtgagcactcgcaggccctgcactgccatccagaggcctgtgggcccgacgccacctgtgtgaaccggcctgacggtcgaggctacacctgccgctgccacctgggccgctcggggttgcggtgtgaggaaggtgtgacagtgaccaccccctcgctgtcgggtgctggctcctacctggcactgcccgccctcaccaacacacaccacgagctacgcctggacgtggagttcaagccactcgcccctgacggggtcctgctgttcagcggggggaagagcgggcctgtggaggacttcgtgtccctggcgatggtgggcggccacctggagttccgctatgagttggggtcagggctggccgttctgcggagcgccgagccgctggccctgggccgctggcaccgtgtgtctgcagagcgtctcaacaaggacggcagcctgcgggtgaatggtggacgccctgtgctgcgctcctcgcccggcaagagccagggcctcaacctgcacaccctgctctacctggggggtgtggagccttccgtgccactgtccccggccaccaacatgagcgctcacttccgcggctgtgtgggcgaggtgtcagtgaatggcaaacggctggacctcacctacagtttcctaggcagccagggcatcgggcaatgctatgatagctccccatgtgagcgccagccttgccaacatggtgccacgtgcatgcccgctggcgagtatgagttccagtgcctgtgtcgagatggattcaaaggagacctgtgtgagcacgaggagaacccctgccagctccgtgaaccctgtctgcatgggggcacctgccagggcacccgctgcctctgcctccctggcttctctggcccacgctgccaacaaggctctggacatggcatagcagagtccgactggcatcttgaaggcagcgggggcaatgatgcccctgggcagtacggagcctatttccacgatgatggcttcctcgccttccctggccatgtcttctccaggagcctgcccgaggtgcccgagaccatcgagctggaggttcggaccagcacagccagtggcctcctgctctggcagggtgtggaggtgggagaggccggccaaggcaaggacttcatcagcctcgggcttcaagacgggcaccttgtcttcaggtaccagctgggtagtggggaggcccgcctggtctctgaggaccccatcaatgacggcgagtggcaccgggtgacagcactgcgggagggccgcagaggttccatccaagtcgacggtgaggagctggtcagcggccggtccccaggtcccaacgtggcagtcaacgccaagggcagcgtctacatcggcggagcccctgacgtggccacgctgaccgggggcagattctcctcgggcatcacaggctgtgtcaagaacctggtgctgcactcggcccgacccggcgccccgcccccacagcccctggacctgcagcaccgcgcccaggccggggccaacacacgcccctgcccctcgtaggcacctgcctgccccacacggactcccgggccacgccccagcccgacaatgtcgagtatattattattaatattattatgaatttttgtaagaaaccgaggcgatgccacgctttgctgctaccgccctgggctggactggaggtgggcatgccaccctcacacacacagctgggcaaagccacaaggctggccagcaaggcaggttggatgggagtgggcacctcagaaagtcaccaggacttggggtcaggaacagtggctgggtgggcccagaactgcccccactgtccccctacccaccgatggagcccccagatagagctgggtggcctgtttctgcagcccttgggcagttctcactcctaggagagccaacctcggcttgtgggctggtgccccacagctacctgagacgggcatcgcaggagtctctgccacccactcaggattgggaattgtctttagtgccggctgtggagcaaaaggcagctcacccctgggcaggcggtccccatccccaccagctcgtttttcagcacccccacccacctccacccagcccctggcacctcctctggcagactccccctcctaccacgtcctcctggcctgcattcccaccccctcctgccagcacacagcctggggtccctccctcaggggctgtaagggaaggcccaccccaactcttaccaggagctgctacaggcagagcccagcactgatagggccccgcccaccgggccccgcccaccccaggccacatccccacccatctggaagtgaaggcccagggactcctccaacagacaacggacggacggatgccgctggtgctcaggaagagctagtgccttaggtgggggaaggcaggactcacgactgagagagagaggagggggatatgaccaccctgccccatctgcaggagcctgaagatccagctcaagtgccatcctgccagtggcccccagactgtggggttgggacgcctggcctctgtgtcctagaagggaccctcctgtggtctttgtcttgatttttcttaataaacggtgctatccccgcca

SEQ ID NO: 367532 - DNA, 14047 bp, Homo sapiens
  misc_feature (1099)..(1099): n is a, c, g, or t
  misc_feature (1108)..(1108): n is a, c, g, or t
  misc_feature (4908)..(4910): n is a, c, g, or t
  misc_feature (8738)..(8738): n is a, c, g, or t
  misc_feature (8782)..(8782): n is a, c, g, or t
ctctctgtttgggaccgtgggcgcggggacttccagatggtttatttccgagccctggtgaatttcactcgctccatcgagtacagccctcagctggaggatgcaggctccagagagtttcgagaggtgtccgaggctgtggtagacacgctggagtcggagtacttgaaaattcccggagaccaggttgtcagtgtggtgttcatcaaggagctggatggctgggtttttgtggagctcgatgtgggctcggaagggaatgcggatggtgctcagattcaggagatgctgctcagggtcatctccagcggctctgtggcctcctacgtcacctctccccagggattccagttccgacgcctgggcacagtgccccagttcccaagagcctgcacggaggccgagtttgcctgccacagctacaatgagtgtgtggccctggagtatcgctgtgaccggcggcccgactgcagggacatgtctgatgagctcaattgtgaggagccagtcctgggtatcagccccacattctctctccttgtggagacgacatctttaccgccccggccagagacaaccatcatgcgacagccaccagtcacccacgctcctcagcccctgcttcccggttccgtcaggcccctgccctgtgggccccaggaggccgcatgccgcaatgggcactgcatccccagagactacctctgcgacggacaggaggactgcgaggacggcagcgatgagctagactgtggccccccgccaccctgtgagcccaacgagttcccctgcgggaatggacattgtgccctcaagctgtggcgctgcgatggtgactttgactgtgaggaccgaactgatgaagccaactgccccaccaagcgtcctgaggaagtgtgcgggcccacacagttccgatgcgtctctaccaacatgtgcatcccagccagcttccactgtgacgaggagagcgactgtcctgaccggagcgacgagtttggctgcatgcccccccaggtggtgacacctccccgggagtccatccaggcttcccggggccagacagtgaccttcacctgcgtggccattggcgtccccnccccctttntcatcaattggaggctcaactggggccacatcccctctcatcccagggtgacagtgaccagcgagggtggccgtggcacactgatcatccgtgatgtgaaggagtcagaccagggtgcctacacctgtgaggccatgaacgcccggggcatggtgtttggcattcctgacggtgtccttgagctcgtcccacaacgaggcccctgccctgacggccacttctacctggagcacagcgccgcctgcctgccctgcttctgctttggcatcaccagcgtgtgccagagcacccgccgcttccgggaccagatcaggctgcgctttgaccaacccgatgacttcaagggtgtgaatgtgacaatgcctgcgcagcccggcacgccacccctctcctccacgcagctgcagatcgacccatccctgcacgagttccagctagtcgacctgtcccgccgcttcctcgtccacgactccttctgggctctgcctgaacagttcctgggcaacaaggtggactcctatggcggctccctgcgttacaacgtgcgctacgagttggcccgtggcatgctggagccagtgcagcggccggacgtggtcctcgtgggtgccgggtaccgcctcctctcccgaggccacacacccacccaacctggtgctctgaaccagcgccaggtccagttctctgaggagcactgggtccatgagtctggccggccggtgcagcgcgcggagctgctgcaggtgctgcagagcctggaggccgtgctcatccagaccgtgtacaacaccaagatggctagcgtgggacttagcgacatcgccatggataccaccgtcacccatgccaccagccatggccgtgcccacagtgtggaggagtgcagatgccccattggctattctggcttgtcctgcgagagctgtgatgcccacttcactcgggtgcctggtgggccctacctgggcacctgctctggttgcagttgcaatggccatgccagctcctgtgaccctgtgtatggccactgcctgaattgccagcacaacacggaggggccacagtgcaacaagtgcaaggctggcttctttggggacgccatgaaggccacggccacttcctgccggccctgcccttgcccatacatcgatgcctcccgcagattctcagacacttgcttcctggacacggatggccaagccacatgtgacgcctgtgccccaggctacactggccgccgctgtgagagctgtgcccccggatacgagggcaaccccatccagcccggcgggaagtgcaggcccgtcaaccaggagattgtgcgctgtgacgagcgtggcagcatggggacctccggggaggcctgccgctgtaagaacaatgtggtggggcgcttgtgcaatgaatgtgctgacggctctttccacctgagtacccgaaaccccgatggctgcctcaagtgcttctgcatgggtgtcagtcgccactgcaccagctcttcatggagccgtgcccagttgcatggggcctctgaggagcctggtcacttcagcctgaccaacgccgcaagcacccacaccaccaacgagggcatcttctcccccacgcccggggaactgggattctcctccttccacagactcttatctggaccctacttctggagcctcccttcacgcttcctgggggacaaggtgacctcctatggaggagagctgcgcttcacagtgacccagaggtcccagccgggctccacacccctgcacgggcagccgttggtggtgctgcaaggtaacaacatcatcctagagcaccatgtggcccaggagcccagccccggccagcccagcaccttcattgtgcctttccgggagcaagcatggcagcggcccgatgggcagccagccacacgggagcacctgctgatggcactggcaggcatcgacaccctcctgatccgagcatcctacgcccagcagcccgctgagagcagggtctctggcatcagcatggacgtggctgtgcccgaggaaaccggccaggaccccgcgctggaagtggaacagtgctcctgcccacccgggtaccgtgggccgtcctgccaggactgtgacacaggctacacacgcacgcccagtggcctctacctgggtacctgtgaacgctgcagctgccatggccactcagaggcctgcgagccagaaacaggtgcctgccagggctgccagcatcacacggagggccctcggtgtgagcagtgccagccaggatactacggggacgcccagcgggggacaccacaggactgccagctgtgcccctgctacggagaccctgctgccggccaggctgcccacacttgttttctggacacagacggccaccccacctgtgatgcgtgctccccaggccacagtgggcgtcactgtgagaggtgcgcccctggctactatggcaaccccagccagggccagccatgccagagagacagccaggtgccagggcccataggctgcaactgtgacccccaaggcagcgtcagcagccagtgtgatgctgctggtcagtgccagtgcaaggcccaggtggaaggcctcacttgcagccactgccggccccaccacttccacctgagtgccagcaacccagacggctgcctgccctgcttctgtatgggcatcacccagcagtgcgccagctctgcctacacacgccacctgatctccacccactttgcccctggggacttccaaggctttgccctggtgaacccacagcgaaacagccgcctgacaggagaattcactgtggaacccgtgcccgagggtgcccagctctcttttggcaactttgcccaactcggccatgagtccttctactggcagctgccggagacataccagggagacaaggtggcggcctacggtgggaagttgcgatacaccctctcctacacagcaggcccacagggcagcccactctctgaccccgatgtgcagatcacgggcaacaacatcatgctagtggcctcccagccagcgctgcagggccctgagaggaggagctacgagatcatgttccgagaggaattctggcgccggcccgatgggcagccggccacacgcgagcacctcctgatggcactggccgacctggatgagctcctgatccgggccacgttctcctccgtgccgctggtggccagcatcagcgcagtcagcctggaggtcgcccagccggggccctcaaacagaccccgcgccctcgaggtggaggagtgccgctgcccgccaggctacatcggtctgtcctgccaggactgtgcccccggctacacgcgcaccgggagtgggctctacctcggccactgcgagctatgtgaatgcaatggccactcagacctgtgccacccagagactggggcctgctcgcaatgccagcacaacgccgcaggggagttctgcgagctttgtgcccctggctactacggagatgccacagccgggacgcctgaggactgccagccctgtgcctgcccactgaccaacccagagaacatgttttcccgcacctgtgagagcctgggagccggcgggtaccgctgcacggcctgcgaacccggctacactggccagtactgtgagcagtgtggcccaggttacgtgggtaaccccagtgtgcaagggggccagtgcctgccagagacaaaccaagccccactggtggtcgaggtccatcctgctcgaagcatagtgccccaaggtggctcccactccctgcggtgtcaggtcagtgggagnnnaccccactacttctattggtcccgtgaggatgggcggcctgtgcccagcggcacccagcagcgacatcaaggctccgagctccacttccccagcgtccagccctcggatgctggggtctacatttgcacctgccgtaatctccaccaatccaataccagccgggcagagctgctggtcactgaggctccaagcaagcccatcacagtgactgtggaggagcagcggagccagagcgtgcgccccggagctgacgtcaccttcatctgcacagccaaaagcaagtccccagcctataccctggtgtggacccgcctgcacaacgggaaactgcccacccgagccatggatttcaatggcatcctgaccattcgcaacgtccagctgagtgatgcaggcacctacgtgtgcaccggctccaacatgtttgccatggaccagggcacagccactctacatgtgcaggcctcgggcaccttgtccgcccccgtggtctccatccatccgccacagctcacagtgcagcccgggcaactggcggagttccgctgcagcgccacagggagccccacgcccaccctcgagtggacagggggccccggcggccagctccctgcgaaggcacaaatccacggcggcatcctgcgcctgccagctgtcgagcccacggatcaggcccagtacttgtgccgagcccacagcagcgctgggcagcaggtggccagggctgtgctccacgtgcatgggggcggtgggcccagagtccaagtgagcccagagaggacccaggtccacgcaggccgcaccgtcaggctgtactgcagggctgcaggcgtgcctagcgccaccatcacctggaggaaggaagggggcagcctcccaccacaggcccggtcagagcgcacagacatcgcgacactgctcatcccagccatcacgactgctgacgccggcttctacctctgcgtggccaccagccctgcaggcactgcccaggcccggatccaagtggttgtcctttcagcctcagatgccagcccaccgccggtcaagattgagtcctcatcgccttctgtgacagaagggcaaacactcgacctcaactgtgtggtggcagggtcagcccatgcccaggtcacctggtacaggcgagggggtagcctgcctccccacacccaggtgcacggctcccgtctgcggctcccccaggtctcaccagctgattctggagaatatgtgtgccgtgtggagaatggatcgggccccaaggaggcctccattactgtgtctgtgctccacggcacccattctggccccagctacaccccagtgcccggcagcacccggcccatccgcatcgagccctcctcctcacacgtggcggaagggcagaccctggatctgaactgcgtggtgcccgggcaggcccacgcccaggtcacgtggcacaagcgtgggggcagcctccctgcccggcaccagacccacggctcgctgctgcggctgcaccaggtgaccccggccgactcaggcgagtatgtgtgccatgtggtgggcacctccggccccctagaggcctcagtcctggtcaccatcgaagcctctgtcatccctggacccatcccacctgtcaggatcgagtcttcatcctccacagtggccgagggccagaccctggatctgagctgcgtggtggcagggcaggcccacgcccaggtcacatggtacaagcgtgggggcagcctccctgcccggcaccaggttcgtggctcccgcctgtacatcttccaggcctcacctgccgatgcgggacagtacgtctgccgggccagcaacggcatggaggcctccatcacggtcacagtaactgggacccagggggccaacttagcctaccctgccggcagcacccagcccatccgcatcgagccctcctcctcgcaagtggcggaagggcagaccctggatctgaactgcgtggtgcccgggcagtcccatgcccaggtcacgtggcacaagcgtgggggcagcctccctgtccggcaccagacccacggctccctgctgagactctaccaagcgtcccccgccgactcgggcgagtacgtgtgccgagtgttgggcagctccgtgcctctagaggcctctgtcctggtcaccattgagcctgcgggctcagtgcctgcacttggggtcacccccacggtccggatcgagtcatcgtcttcgcaagtggccgaggggcagaccctggacctgaactgcctcgttgctggtcaggcccatgcccaggtcacgtggcacaagcgcgggggcagcctcccggcccggcaccaggtgcatggctcgaggctacgcctgctccaggtgaccccagctgattcaggggagtacgtgtgccgtgtggtcggcagctcaggtacccaggaagcctcagtccttgtcaccatccagcagcgccttagtggctcccactcccagggtgtggcgtaccccgtccgcatcgagtcctcctcagcctccctggccaatggacacaccctggacctcaactgcctggttgccagccaggctccccacaccatcacctggtataagcgtggaggcagcttacccagccggcaccagatcgtgggctcccggctgcggatccctcaggtgactccggcagactcgggcgagtacgtgtgtcacgtcagtaacggtgcaggctcccgggagacctcgctcatcgtcaccatccagggcagcggttcctcccacgtgcccagcgtctccccaccgatcaggatcgagtcgtcttcccccacggtggtggaagggcagaccttggatctgaactgcgtggtcgccaggcagccccaggctatcatcacatggtacaagcgtgggggcagccttccctcccgacaccagacccatggctcccacctgcggttgcaccaaatgtctgtggctgactcgggcgagtatgtgtgccgggccaacaacaacatcgatgccctggaggcctccatcgtcatctccgtctcccctagcgccggcagcccctccgcccctggcagctccatgcccatcagaattgagtcatcctcctcacacgtggccgaaggggagaccctggatctgaactgcgtggtccccgggcaggcccatgcccaggtcacttggcacaagcgtgggggcagcctccccagtcaccatcagacccgcggctcacggctgcggctgcaccatgtgtccccggccgactcgggtgaatacgtgtgccgggtgatgggcagctctggccccctggaggcctcagtcctggtcaccatcgaagcctctggctcaagtgctgtccacgtccccgccccaggtggagccccacccatccgcatcgagccctcctcctcccgagtggcagaagggcagaccctggatctgaagtgcgtggtgcccgggcaggcccacgcccaggtcacgtggcacaagcgtggaggaaacctccctgcccggcaccaggtccacggcccactgctgaggctgaaccaggtgtccccggctgactctggcgagtactcgtgccaagtgaccggaagctcaggcaccctggaggcatctgtcctggtcacaattgagccctccagcccaggacccattcctgctccaggactggcccagcccatctacatcgaggcctcctcttcacacgtgactgaagggcagactctggatctgaactgtgtggtgcccgggcaggcccatgcccaggtcacgtggtacaagcgcgggggcagcctccccgcccggcaccagacccatggctcccagctgcggctccaccncgtctcccctgccgactcaggcgagtatgtgtgtcgtgcagccngcggcccaggccctgagcaagaagcctccttcacagtcaccgtcccgcccagtgaggggtcttcctaccgccttaggagcccggtcatctccatcgacccgcccagcagcaccgtgcagcagggccaggatgccagcttcaagtgcctcatccatgacggggcagcccccatcagcctcgagtggaagacccggaaccaggagctggaggacaacgtccacatcagtcccaatggctccatcatcaccatcgtgggcacccggcccagcaaccacggtacctaccgctgcgtggcctccaatgcctacggtgtggcccagagtgtggtgaacctcagtgtgcacgggccccctacagtgtccgtgctccccgagggccccgtgtgggtgaaagtgggaaaggctgtcaccctggagtgtgtcagtgccggggagccccgctcctctgctcgttggacccggatcagcagcacccctgccaagttggagcagcggacatatgggctcatggacagccacgcggtgctgcagatttcatcagctaaaccatcagatgcgggcacttatgtgtgccttgctcagaatgcactaggcacagcacagaagcaggtggaggtgatcgtggacacgggcgccatggccccaggggcccctcaggtccaagctgaagaagctgagctgactgtggaggctggacacacggccaccttgcgctgctcagccacaggcagccccgcgcccaccatccactggtccaagctgcgttccccactgccctggcagcaccggctggaaggtgacacactcatcataccccgggtagcccagcaggactcgggccagtacatctgcaatgccactagccctgctgggcacgctgaggccaccatcatcctgcacgtggagagcccaccatatgccaccacggtcccagagcacgcttcggtgcaggcaggggagacggtgcagctccagtgcctggctcacgggacacccccactcaccttccagtggagccgcgtgggcagcagccttcctgggagggcgaccgccaggaacgagctgctgcactttgagcgtgcagcccctgaggactcaggccgctaccgctgccgggtcaccaacaaggtgggctcagccgaggcctttgcccagctgctcgtccaaggccctcccggctctctccctgccacctccatcccagcagggtccacgcccaccgtgcaggtcacgcctcagctagagaccaagagcattggggccagcgttgagttccactgtgctgtgcccagcgaccggggtacccagctccgttggttcaaggaagggggtcagctgcctccgggtcacagcgtgcaggatggggtgctccgaatccagaacttggaccagagctgccaagggacgtatatatgccaggcccatggaccttgggggaaggcccaggccagtgcccagctggttatccaagccctgccctcggtgctcatcaacatccggacctctgtgcagaccgtggtggttggccacgccgtggagttcgaatgcctggcactgggtgaccccaagcctcaggtgacatggagcaaagttggagggcacctgcggccaggcattgtgcagagcggaggtgtcgtcaggatcgcccacgtagagctggctgatgcgggacagtatcgctgcactgccaccaacgcagctggcaccacacaatcccacgtcctgctgcttgtgcaagccttgccccagatctcaatgccccaagaagtccgtgtgcctgctggttctgcagctgtcttcccctgcatagcctcaggctaccccactcctgacatcagctggagcaagctggatggcagcctgccacctgacagccgcctggagaacaacatgctgatgctgccctcagtccgaccccaggacgcaggtacctacgtctgcaccgccactaaccgccagggcaaggtcaaagcctttgcccacctgcaggtgccagagcgggtggtgccctacttcacgcagaccccctactccttcctaccgctgcccaccatcaaggatgcctacaggaagttcgagatcaagatcaccttccggcccgactcagccgatgggatgctgctgtacaatgggcagaagcgagtcccagggagccccaccaacctggccaaccggcagcccgacttcatctccttcggcctcgtggggggaaggcccgagttccggttcgatgcaggctcaggcatggccaccatccgccatcccacaccactggccctgggccatttccacaccgtgaccctgctgcgcagcctcacccagggctccctgattgtgggtgacctggccccggtcaatgggacctcccagggcaagttccagggcctggatctgaacgaggaactctacctgggtggctatcctgactatggtgccatccccaaggcggggctgagcagcggcttcataggctgtgtccgggagctgcgcatccagggcgaggagatcgtcttccatgacctcaacctcacggcgcacggcatctcccactgccccacctgtcgggaccggccctgccagaatggcggtcagtgccatgactctgagagcagcagctacgtgtgcgtctgcccagctggcttcaccgggagccgctgtgagcactcgcaggccctgcactgccatccagaggcctgtgggcccgacgccacctgtgtgaaccggcctgacggtcgaggctacacctgccgctgccacctgggccgctcggggttgcggtgtgaggaaggtgtgacagtgaccaccccctcgctgtcgggtgctggctcctacctggcactgcccgccctcaccaacacacaccacgagctacgcctggacgtggagttcaagccactcgcccctgacggggtcctgctgttcagcggggggaagagcgggcctgtggaggacttcgtgtccctggcgatggtgggcggccacctggagttccgctatgagttggggtcagggctggccgttctgcggagcgccgagccgctggccctgggccgctggcaccgtgtgtctgcagagcgtctcaacaaggacggcagcctgcgggtgaatggtggacgccctgtgctgcgctcctcgcccggcaagagccagggcctcaacctgcacaccctgctctacctggggggtgtggagccttccgtgccactgtccccggccaccaacatgagcgctcacttccgcggctgtgtgggcgaggtgtcagtgaatggcaaacggctggacctcacctacagtttcctaggcagccagggcatcgggcaatgctatgatagctccccatgtgagcgccagccttgccaacatggtgccacgtgcatgcccgctggcgagtatgagttccagtgcctgtgtcgagatggattcaaaggagacctgtgtgagcacgaggagaacccctgccagctccgtgaaccctgtctgcatgggggcacctgccagggcacccgctgcctctgcctccctggcttctctggcccacgctgccaacaaggctctggacatggcatagcagagtccgactggcatcttgaaggcagcgggggcaatgatgcccctgggcagtacggagcctatttccacgatgatggcttcctcgccttccctggccatgtcttctccaggagcctgcccgaggtgcccgagaccatcgagctggaggttcggaccagcacagccagtggcctcctgctctggcagggtgtggaggtgggagaggccggccaaggcaaggacttcatcagcctcgggcttcaagacgggcaccttgtcttcaggtaccagctgggtagtggggaggcccgcctggtctctgaggaccccatcaatgacggcgagtggcaccgggtgacagcactgcgggagggccgcagaggttccatccaagtcgacggtgaggagctggtcagcggccggtccccaggtcccaacgtggcagtcaacgccaagggcagcgtctacatcggcggagcccctgacgtggccacgctgaccgggggcagattctcctcgggcatcacaggctgtgtcaagaacctggtgctgcactcggcccgacccggcgccccgcccccacagcccctggacctgcagcaccgcgcccaggccggggccaacacacgcccctgcccctcgtaggcacctgcctgccccacacggactcccgggccacgccccagcccgacaatgtcgagtatattattattaatattattatgaatttttgtaagaaaccgaggcgatgccacgctttgctgctaccgccctgggctggactggaggtgggcatgccaccctcacacacacagctgggcaaagccacaaggctggccagcaaggcaggttggatgggagtgggcacctcagaaagtcaccaggacttggggtcaggaacagtggctgggtgggcccagaactgcccccactgtccccctacccaccgatggagcccccagatagagctgggtggcctgtttctgcagcccttgggcagttctcactcctaggagagccaacctcggcttgtgggctggtgccccacagctacctgagacgggcatcgcaggagtctctgccacccactcaggattgggaattgtctttagtgccggctgtggagcaaaaggcagctcacccctgggcaggcggtccccatccccaccagctcgtttttcagcacccccacccacctccacccagcccctggcacctcctctggcagactccccctcctaccacgtcctcctggcctgcattcccaccccctcctgccagcacacagcctggggtccctccctcaggggctgtaagggaaggcccaccccaactcttaccaggagctgctacaggcagagcccagcactgatagggccccgcccaccgggccccgcccaccccaggccacatccccacccatctggaagtgaaggcccagggactcctccaacagacaacggacggacggatgccgctggtgctcaggaagagctagtgccttaggtgggggaaggcaggactcacgactgagagagagaggagggggatatgaccaccctgccccatctgcaggagcctgaagatccagctcaagtgccatcctgccagtggcccccagactgtggggttgggacgcctggcctctgtgtcctagaagggaccctcctgtggtctttgtcttgatttttcttaataaacggtgctatccccgcca

SEQ ID NO: 367533 - DNA, 12638 bp, Homo sapiens
  misc_feature (3499)..(3501): n is a, c, g, or t
  misc_feature (7329)..(7329): n is a, c, g, or t
  misc_feature (7373)..(7373): n is a, c, g, or t
actaatgggtgtgtcatgcaaagggagaatgagagcctgccgagaataaagcaggaagagcccagcagagagaggagcagcaagaagaaccaatgagagcttggaacggttccaatatgggacagggaaccagggataatgaccacagcaactccttccagccatacccagcacttaacatacacagcgcttccgacagaactttctggtgcaatggaaatgttgcgtgcctgcactcatccaataagatagctactaagcgcttcaaatgaggctagtaccatcaagaaactgaatttctggccggccggtgcagcgcgcggagctgctgcaggtgctgcagagcctggaggccgtgctcatccagaccgtgtacaacaccaagatggctagcgtgggacttagcgacatcgccatggataccaccgtcacccatgccaccagccatggccgtgcccacagtgtggaggagtgcaggtgcctgagccggcagggctgggaaccacagagaccctagcaaggatagaggagaaacggcagggcctcaccgtccttgcagcgactcttttggtcctgtccccacagatgccccattggctattctggcttgtcctgcgagagctgtgatgcccacttcactcgggtgcctggtgggccctacctgggcacctgctctggttgcagttgcaatggccatgccagctcctgtgaccctgtgtatggccactgcctgaattgccagcacaacacggaggggccacagtgcaacaagtgcaaggctggcttctttggggacgccatgaaggccacggccacttcctgccggccctgcccttgcccatacatcgatgcctcccgcagattctcagacacttgcttcctggacacggatggccaagccacatgtgacgcctgtgccccaggctacactggccgccgctgtgagagctgtgcccccggatacgagggcaaccccatccagcccggcgggaagtgcaggcccgtcaaccaggagattgtgcgctgtgacgagcgtggcagcatggggacctccggggaggcctgccgctgtaagaacaatgtggtggggcgcttgtgcaatgaatgtgctgacggctctttccacctgagtacccgaaaccccgatggctgcctcaagtgcttctgcatgggtgtcagtcgccactgcaccagctcttcatggagccgtgcccagttgcatggggcctctgaggagcctggtcacttcagcctgaccaacgccgcaagcacccacaccaccaacgagggcatcttctcccccacgcccggggaactgggattctcctccttccacagactcttatctggaccctacttctggagcctcccttcacgcttcctgggggacaaggtgacctcctatggaggagagctgcgcttcacagtgacccagaggtcccagccgggctccacacccctgcacgggcagccgttggtggtgctgcaaggtaacaacatcatcctagagcaccatgtggcccaggagcccagccccggccagcccagcaccttcattgtgcctttccgggagcaagcatggcagcggcccgatgggcagccagccacacgggagcacctgctgatggcactggcaggcatcgacaccctcctgatccgagcatcctacgcccagcagcccgctgagagcagggtctctggcatcagcatggacgtggctgtgcccgaggaaaccggccaggaccccgcgctggaagtggaacagtgctcctgcccacccgggtaccgtgggccgtcctgccaggactgtgacacaggctacacacgcacgcccagtggcctctacctgggtacctgtgaacgctgcagctgccatggccactcagaggcctgcgagccagaaacaggtgcctgccagggctgccagcatcacacggagggccctcggtgtgagcagtgccagccaggatactacggggacgcccagcgggggacaccacaggactgccagctgtgcccctgctacggagaccctgctgccggccaggctgcccacacttgttttctggacacagacggccaccccacctgtgatgcgtgctccccaggccacagtgggcgtcactgtgagaggtgcgcccctggctactatggcaaccccagccagggccagccatgccagagagacagccaggtgccagggcccataggctgcaactgtgacccccaaggcagcgtcagcagccagtgtgatgctgctggtcagtgccagtgcaaggcccaggtggaaggcctcacttgcagccactgccggccccaccacttccacctgagtgccagcaacccagacggctgcctgccctgcttctgtatgggcatcacccagcagtgcgccagctctgcctacacacgccacctgatctccacccactttgcccctggggacttccaaggctttgccctggtgaacccacagcgaaacagccgcctgacaggagaattcactgtggaacccgtgcccgagggtgcccagctctcttttggcaactttgcccaactcggccatgagtccttctactggcagctgccggagacataccagggagacaaggtggcggcctacggtgggaagttgcgatacaccctctcctacacagcaggcccacagggcagcccactctctgaccccgatgtgcagatcacgggcaacaacatcatgctagtggcctcccagccagcgctgcagggccctgagaggaggagctacgagatcatgttccgagaggaattctggcgccggcccgatgggcagccggccacacgcgagcacctcctgatggcactggccgacctggatgagctcctgatccgggccacgttctcctccgtgccgctggtggccagcatcagcgcagtcagcctggaggtcgcccagccggggccctcaaacagaccccgcgccctcgaggtggaggagtgccgctgcccgccaggctacatcggtctgtcctgccaggactgtgcccccggctacacgcgcaccgggagtgggctctacctcggccactgcgagctatgtgaatgcaatggccactcagacctgtgccacccagagactggggcctgctcgcaatgccagcacaacgccgcaggggagttctgcgagctttgtgcccctggctactacggagatgccacagccgggacgcctgaggactgccagccctgtgcctgcccactgaccaacccagagaacatgttttcccgcacctgtgagagcctgggagccggcgggtaccgctgcacggcctgcgaacccggctacactggccagtactgtgagcagtgtggcccaggttacgtgggtaaccccagtgtgcaagggggccagtgcctgccagagacaaaccaagccccactggtggtcgaggtccatcctgctcgaagcatagtgccccaaggtggctcccactccctgcggtgtcaggtcagtgggagnnnaccccactacttctattggtcccgtgaggatgggcggcctgtgcccagcggcacccagcagcgacatcaaggctccgagctccacttccccagcgtccagccctcggatgctggggtctacatttgcacctgccgtaatctccaccaatccaataccagccgggcagagctgctggtcactgaggctccaagcaagcccatcacagtgactgtggaggagcagcggagccagagcgtgcgccccggagctgacgtcaccttcatctgcacagccaaaagcaagtccccagcctataccctggtgtggacccgcctgcacaacgggaaactgcccacccgagccatggatttcaatggcatcctgaccattcgcaacgtccagctgagtgatgcaggcacctacgtgtgcaccggctccaacatgtttgccatggaccagggcacagccactctacatgtgcaggcctcgggcaccttgtccgcccccgtggtctccatccatccgccacagctcacagtgcagcccgggcaactggcggagttccgctgcagcgccacagggagccccacgcccaccctcgagtggacagggggccccggcggccagctccctgcgaaggcacaaatccacggcggcatcctgcgcctgccagctgtcgagcccacggatcaggcccagtacttgtgccgagcccacagcagcgctgggcagcaggtggccagggctgtgctccacgtgcatgggggcggtgggcccagagtccaagtgagcccagagaggacccaggtccacgcaggccgcaccgtcaggctgtactgcagggctgcaggcgtgcctagcgccaccatcacctggaggaaggaagggggcagcctcccaccacaggcccggtcagagcgcacagacatcgcgacactgctcatcccagccatcacgactgctgacgccggcttctacctctgcgtggccaccagccctgcaggcactgcccaggcccggatccaagtggttgtcctttcagcctcagatgccagcccaccgccggtcaagattgagtcctcatcgccttctgtgacagaagggcaaacactcgacctcaactgtgtggtggcagggtcagcccatgcccaggtcacctggtacaggcgagggggtagcctgcctccccacacccaggtgcacggctcccgtctgcggctcccccaggtctcaccagctgattctggagaatatgtgtgccgtgtggagaatggatcgggccccaaggaggcctccattactgtgtctgtgctccacggcacccattctggccccagctacaccccagtgcccggcagcacccggcccatccgcatcgagccctcctcctcacacgtggcggaagggcagaccctggatctgaactgcgtggtgcccgggcaggcccacgcccaggtcacgtggcacaagcgtgggggcagcctccctgcccggcaccagacccacggctcgctgctgcggctgcaccaggtgaccccggccgactcaggcgagtatgtgtgccatgtggtgggcacctccggccccctagaggcctcagtcctggtcaccatcgaagcctctgtcatccctggacccatcccacctgtcaggatcgagtcttcatcctccacagtggccgagggccagaccctggatctgagctgcgtggtggcagggcaggcccacgcccaggtcacatggtacaagcgtgggggcagcctccctgcccggcaccaggttcgtggctcccgcctgtacatcttccaggcctcacctgccgatgcgggacagtacgtctgccgggccagcaacggcatggaggcctccatcacggtcacagtaactgggacccagggggccaacttagcctaccctgccggcagcacccagcccatccgcatcgagccctcctcctcgcaagtggcggaagggcagaccctggatctgaactgcgtggtgcccgggcagtcccatgcccaggtcacgtggcacaagcgtgggggcagcctccctgtccggcaccagacccacggctccctgctgagactctaccaagcgtcccccgccgactcgggcgagtacgtgtgccgagtgttgggcagctccgtgcctctagaggcctctgtcctggtcaccattgagcctgcgggctcagtgcctgcacttggggtcacccccacggtccggatcgagtcatcgtcttcgcaagtggccgaggggcagaccctggacctgaactgcctcgttgctggtcaggcccatgcccaggtcacgtggcacaagcgcgggggcagcctcccggcccggcaccaggtgcatggctcgaggctacgcctgctccaggtgaccccagctgattcaggggagtacgtgtgccgtgtggtcggcagctcaggtacccaggaagcctcagtccttgtcaccatccagcagcgccttagtggctcccactcccagggtgtggcgtaccccgtccgcatcgagtcctcctcagcctccctggccaatggacacaccctggacctcaactgcctggttgccagccaggctccccacaccatcacctggtataagcgtggaggcagcttacccagccggcaccagatcgtgggctcccggctgcggatccctcaggtgactccggcagactcgggcgagtacgtgtgtcacgtcagtaacggtgcaggctcccgggagacctcgctcatcgtcaccatccagggcagcggttcctcccacgtgcccagcgtctccccaccgatcaggatcgagtcgtcttcccccacggtggtggaagggcagaccttggatctgaactgcgtggtcgccaggcagccccaggctatcatcacatggtacaagcgtgggggcagccttccctcccgacaccagacccatggctcccacctgcggttgcaccaaatgtctgtggctgactcgggcgagtatgtgtgccgggccaacaacaacatcgatgccctggaggcctccatcgtcatctccgtctcccctagcgccggcagcccctccgcccctggcagctccatgcccatcagaattgagtcatcctcctcacacgtggccgaaggggagaccctggatctgaactgcgtggtccccgggcaggcccatgcccaggtcacttggcacaagcgtgggggcagcctccccagtcaccatcagacccgcggctcacggctgcggctgcaccatgtgtccccggccgactcgggtgaatacgtgtgccgggtgatgggcagctctggccccctggaggcctcagtcctggtcaccatcgaagcctctggctcaagtgctgtccacgtccccgccccaggtggagccccacccatccgcatcgagccctcctcctcccgagtggcagaagggcagaccctggatctgaagtgcgtggtgcccgggcaggcccacgcccaggtcacgtggcacaagcgtggaggaaacctccctgcccggcaccaggtccacggcccactgctgaggctgaaccaggtgtccccggctgactctggcgagtactcgtgccaagtgaccggaagctcaggcaccctggaggcatctgtcctggtcacaattgagccctccagcccaggacccattcctgctccaggactggcccagcccatctacatcgaggcctcctcttcacacgtgactgaagggcagactctggatctgaactgtgtggtgcccgggcaggcccatgcccaggtcacgtggtacaagcgcgggggcagcctccccgcccggcaccagacccatggctcccagctgcggctccaccncgtctcccctgccgactcaggcgagtatgtgtgtcgtgcagccngcggcccaggccctgagcaagaagcctccttcacagtcaccgtcccgcccagtgaggggtcttcctaccgccttaggagcccggtcatctccatcgacccgcccagcagcaccgtgcagcagggccaggatgccagcttcaagtgcctcatccatgacggggcagcccccatcagcctcgagtggaagacccggaaccaggagctggaggacaacgtccacatcagtcccaatggctccatcatcaccatcgtgggcacccggcccagcaaccacggtacctaccgctgcgtggcctccaatgcctacggtgtggcccagagtgtggtgaacctcagtgtgcacgggccccctacagtgtccgtgctccccgagggccccgtgtgggtgaaagtgggaaaggctgtcaccctggagtgtgtcagtgccggggagccccgctcctctgctcgttggacccggatcagcagcacccctgccaagttggagcagcggacatatgggctcatggacagccacgcggtgctgcagatttcatcagctaaaccatcagatgcgggcacttatgtgtgccttgctcagaatgcactaggcacagcacagaagcaggtggaggtgatcgtggacacgggcgccatggccccaggggcccctcaggtccaagctgaagaagctgagctgactgtggaggctggacacacggccaccttgcgctgctcagccacaggcagccccgcgcccaccatccactggtccaagctgcgttccccactgccctggcagcaccggctggaaggtgacacactcatcataccccgggtagcccagcaggactcgggccagtacatctgcaatgccactagccctgctgggcacgctgaggccaccatcatcctgcacgtggagagcccaccatatgccaccacggtcccagagcacgcttcggtgcaggcaggggagacggtgcagctccagtgcctggctcacgggacacccccactcaccttccagtggagccgcgtgggcagcagccttcctgggagggcgaccgccaggaacgagctgctgcactttgagcgtgcagcccctgaggactcaggccgctaccgctgccgggtcaccaacaaggtgggctcagccgaggcctttgcccagctgctcgtccaaggccctcccggctctctccctgccacctccatcccagcagggtccacgcccaccgtgcaggtcacgcctcagctagagaccaagagcattggggccagcgttgagttccactgtgctgtgcccagcgaccggggtacccagctccgttggttcaaggaagggggtcagctgcctccgggtcacagcgtgcaggatggggtgctccgaatccagaacttggaccagagctgccaagggacgtatatatgccaggcccatggaccttgggggaaggcccaggccagtgcccagctggttatccaagccctgccctcggtgctcatcaacatccggacctctgtgcagaccgtggtggttggccacgccgtggagttcgaatgcctggcactgggtgaccccaagcctcaggtgacatggagcaaagttggagggcacctgcggccaggcattgtgcagagcggaggtgtcgtcaggatcgcccacgtagagctggctgatgcgggacagtatcgctgcactgccaccaacgcagctggcaccacacaatcccacgtcctgctgcttgtgcaagccttgccccagatctcaatgccccaagaagtccgtgtgcctgctggttctgcagctgtcttcccctgcatagcctcaggctaccccactcctgacatcagctggagcaagctggatggcagcctgccacctgacagccgcctggagaacaacatgctgatgctgccctcagtccgaccccaggacgcaggtacctacgtctgcaccgccactaaccgccagggcaaggtcaaagcctttgcccacctgcaggtgccagagcgggtggtgccctacttcacgcagaccccctactccttcctaccgctgcccaccatcaaggatgcctacaggaagttcgagatcaagatcaccttccggcccgactcagccgatgggatgctgctgtacaatgggcagaagcgagtcccagggagccccaccaacctggccaaccggcagcccgacttcatctccttcggcctcgtggggggaaggcccgagttccggttcgatgcaggctcaggcatggccaccatccgccatcccacaccactggccctgggccatttccacaccgtgaccctgctgcgcagcctcacccagggctccctgattgtgggtgacctggccccggtcaatgggacctcccagggcaagttccagggcctggatctgaacgaggaactctacctgggtggctatcctgactatggtgccatccccaaggcggggctgagcagcggcttcataggctgtgtccgggagctgcgcatccagggcgaggagatcgtcttccatgacctcaacctcacggcgcacggcatctcccactgccccacctgtcgggaccggccctgccagaatggcggtcagtgccatgactctgagagcagcagctacgtgtgcgtctgcccagctggcttcaccgggagccgctgtgagcactcgcaggccctgcactgccatccagaggcctgtgggcccgacgccacctgtgtgaaccggcctgacggtcgaggctacacctgccgctgccacctgggccgctcggggttgcggtgtgaggaaggtgtgacagtgaccaccccctcgctgtcgggtgctggctcctacctggcactgcccgccctcaccaacacacaccacgagctacgcctggacgtggagttcaagccactcgcccctgacggggtcctgctgttcagcggggggaagagcgggcctgtggaggacttcgtgtccctggcgatggtgggcggccacctggagttccgctatgagttggggtcagggctggccgttctgcggagcgccgagccgctggccctgggccgctggcaccgtgtgtctgcagagcgtctcaacaaggacggcagcctgcgggtgaatggtggacgccctgtgctgcgctcctcgcccggcaagagccagggcctcaacctgcacaccctgctctacctggggggtgtggagccttccgtgccactgtccccggccaccaacatgagcgctcacttccgcggctgtgtgggcgaggtgtcagtgaatggcaaacggctggacctcacctacagtttcctaggcagccagggcatcgggcaatgctatgatagctccccatgtgagcgccagccttgccaacatggtgccacgtgcatgcccgctggcgagtatgagttccagtgcctgtgtcgagatggattcaaaggagacctgtgtgagcacgaggagaacccctgccagctccgtgaaccctgtctgcatgggggcacctgccagggcacccgctgcctctgcctccctggcttctctggcccacgctgccaacaaggctctggacatggcatagcagagtccgactggcatcttgaaggcagcgggggcaatgatgcccctgggcagtacggagcctatttccacgatgatggcttcctcgccttccctggccatgtcttctccaggagcctgcccgaggtgcccgagaccatcgagctggaggttcggaccagcacagccagtggcctcctgctctggcagggtgtggaggtgggagaggccggccaaggcaaggacttcatcagcctcgggcttcaagacgggcaccttgtcttcaggtaccagctgggtagtggggaggcccgcctggtctctgaggaccccatcaatgacggcgagtggcaccgggtgacagcactgcgggagggccgcagaggttccatccaagtcgacggtgaggagctggtcagcggccggtccccaggtcccaacgtggcagtcaacgccaagggcagcgtctacatcggcggagcccctgacgtggccacgctgaccgggggcagattctcctcgggcatcacaggctgtgtcaagaacctggtgctgcactcggcccgacccggcgccccgcccccacagcccctggacctgcagcaccgcgcccaggccggggccaacacacgcccctgcccctcgtaggcacctgcctgccccacacggactcccgggccacgccccagcccgacaatgtcgagtatattattattaatattattatgaatttttgtaagaaaccgaggcgatgccacgctttgctgctaccgccctgggctggactggaggtgggcatgccaccctcacacacacagctgggcaaagccacaaggctggccagcaaggcaggttggatgggagtgggcacctcagaaagtcaccaggacttggggtcaggaacagtggctgggtgggcccagaactgcccccactgtccccctacccaccgatggagcccccagatagagctgggtggcctgtttctgcagcccttgggcagttctcactcctaggagagccaacctcggcttgtgggctggtgccccacagctacctgagacgggcatcgcaggagtctctgccacccactcaggattgggaattgtctttagtgccggctgtggagcaaaaggcagctcacccctgggcaggcggtccccatccccaccagctcgtttttcagcacccccacccacctccacccagcccctggcacctcctctggcagactccccctcctaccacgtcctcctggcctgcattcccaccccctcctgccagcacacagcctggggtccctccctcaggggctgtaagggaaggcccaccccaactcttaccaggagctgctacaggcagagcccagcactgatagggccccgcccaccgggccccgcccaccccaggccacatccccacccatctggaagtgaaggcccagggactcctccaacagacaacggacggacggatgccgctggtgctcaggaagagctagtgccttaggtgggggaaggcaggactcacgactgagagagagaggagggggatatgaccaccctgccccatctgcaggagcctgaagatccagctcaagtgccatcctgccagtggcccccagactgtggggttgggacgcctggcctctgtgtcctagaagggaccctcctgtggtctttgtcttgatttttcttaataaacggtgctatccccgcca

SEQ ID NO: 367534 - DNA, 11050 bp, Homo sapiens
  misc_feature (1911)..(1913): n is a, c, g, or t
  misc_feature (5741)..(5741): n is a, c, g, or t
  misc_feature (5785)..(5785): n is a, c, g, or t
acagggctgtcgggaggactaataagaccctgccagtggaggactccaggcgtgcctggcacagagccagcactcctattcacgctgggtcttgtcacgcccagggtctctggcatcagcatggacgtggctgtgcccgaggaaaccggccaggaccccgcgctggaagtggaacagtgctcctgcccacccgggtaccgtgggccgtcctgccaggactgtgacacaggctacacacgcacgcccagtggcctctacctgggtacctgtgaacgctgcagctgccatggccactcagaggcctgcgagccagaaacaggtgcctgccagggctgccagcatcacacggagggccctcggtgtgagcagtgccagccaggatactacggggacgcccagcgggggacaccacaggactgccagctgtgcccctgctacggagaccctgctgccggccaggctgcccacacttgttttctggacacagacggccaccccacctgtgatgcgtgctccccaggccacagtgggcgtcactgtgagaggtgcgcccctggctactatggcaaccccagccagggccagccatgccagagagacagccaggtgccagggcccataggctgcaactgtgacccccaaggcagcgtcagcagccagtgtgatgctgctggtcagtgccagtgcaaggcccaggtggaaggcctcacttgcagccactgccggccccaccacttccacctgagtgccagcaacccagacggctgcctgccctgcttctgtatgggcatcacccagcagtgcgccagctctgcctacacacgccacctgatctccacccactttgcccctggggacttccaaggctttgccctggtgaacccacagcgaaacagccgcctgacaggagaattcactgtggaacccgtgcccgagggtgcccagctctcttttggcaactttgcccaactcggccatgagtccttctactggcagctgccggagacataccagggagacaaggtggcggcctacggtgggaagttgcgatacaccctctcctacacagcaggcccacagggcagcccactctctgaccccgatgtgcagatcacgggcaacaacatcatgctagtggcctcccagccagcgctgcagggccctgagaggaggagctacgagatcatgttccgagaggaattctggcgccggcccgatgggcagccggccacacgcgagcacctcctgatggcactggccgacctggatgagctcctgatccgggccacgttctcctccgtgccgctggtggccagcatcagcgcagtcagcctggaggtcgcccagccggggccctcaaacagaccccgcgccctcgaggtggaggagtgccgctgcccgccaggctacatcggtctgtcctgccaggactgtgcccccggctacacgcgcaccgggagtgggctctacctcggccactgcgagctatgtgaatgcaatggccactcagacctgtgccacccagagactggggcctgctcgcaatgccagcacaacgccgcaggggagttctgcgagctttgtgcccctggctactacggagatgccacagccgggacgcctgaggactgccagccctgtgcctgcccactgaccaacccagagaacatgttttcccgcacctgtgagagcctgggagccggcgggtaccgctgcacggcctgcgaacccggctacactggccagtactgtgagcagtgtggcccaggttacgtgggtaaccccagtgtgcaagggggccagtgcctgccagagacaaaccaagccccactggtggtcgaggtccatcctgctcgaagcatagtgccccaaggtggctcccactccctgcggtgtcaggtcagtgggagnnnaccccactacttctattggtcccgtgaggatgggcggcctgtgcccagcggcacccagcagcgacatcaaggctccgagctccacttccccagcgtccagccctcggatgctggggtctacatttgcacctgccgtaatctccaccaatccaataccagccgggcagagctgctggtcactgaggctccaagcaagcccatcacagtgactgtggaggagcagcggagccagagcgtgcgccccggagctgacgtcaccttcatctgcacagccaaaagcaagtccccagcctataccctggtgtggacccgcctgcacaacgggaaactgcccacccgagccatggatttcaatggcatcctgaccattcgcaacgtccagctgagtgatgcaggcacctacgtgtgcaccggctccaacatgtttgccatggaccagggcacagccactctacatgtgcaggcctcgggcaccttgtccgcccccgtggtctccatccatccgccacagctcacagtgcagcccgggcaactggcggagttccgctgcagcgccacagggagccccacgcccaccctcgagtggacagggggccccggcggccagctccctgcgaaggcacaaatccacggcggcatcctgcgcctgccagctgtcgagcccacggatcaggcccagtacttgtgccgagcccacagcagcgctgggcagcaggtggccagggctgtgctccacgtgcatgggggcggtgggcccagagtccaagtgagcccagagaggacccaggtccacgcaggccgcaccgtcaggctgtactgcagggctgcaggcgtgcctagcgccaccatcacctggaggaaggaagggggcagcctcccaccacaggcccggtcagagcgcacagacatcgcgacactgctcatcccagccatcacgactgctgacgccggcttctacctctgcgtggccaccagccctgcaggcactgcccaggcccggatccaagtggttgtcctttcagcctcagatgccagcccaccgccggtcaagattgagtcctcatcgccttctgtgacagaagggcaaacactcgacctcaactgtgtggtggcagggtcagcccatgcccaggtcacctggtacaggcgagggggtagcctgcctccccacacccaggtgcacggctcccgtctgcggctcccccaggtctcaccagctgattctggagaatatgtgtgccgtgtggagaatggatcgggccccaaggaggcctccattactgtgtctgtgctccacggcacccattctggccccagctacaccccagtgcccggcagcacccggcccatccgcatcgagccctcctcctcacacgtggcggaagggcagaccctggatctgaactgcgtggtgcccgggcaggcccacgcccaggtcacgtggcacaagcgtgggggcagcctccctgcccggcaccagacccacggctcgctgctgcggctgcaccaggtgaccccggccgactcaggcgagtatgtgtgccatgtggtgggcacctccggccccctagaggcctcagtcctggtcaccatcgaagcctctgtcatccctggacccatcccacctgtcaggatcgagtcttcatcctccacagtggccgagggccagaccctggatctgagctgcgtggtggcagggcaggcccacgcccaggtcacatggtacaagcgtgggggcagcctccctgcccggcaccaggttcgtggctcccgcctgtacatcttccaggcctcacctgccgatgcgggacagtacgtctgccgggccagcaacggcatggaggcctccatcacggtcacagtaactgggacccagggggccaacttagcctaccctgccggcagcacccagcccatccgcatcgagccctcctcctcgcaagtggcggaagggcagaccctggatctgaactgcgtggtgcccgggcagtcccatgcccaggtcacgtggcacaagcgtgggggcagcctccctgtccggcaccagacccacggctccctgctgagactctaccaagcgtcccccgccgactcgggcgagtacgtgtgccgagtgttgggcagctccgtgcctctagaggcctctgtcctggtcaccattgagcctgcgggctcagtgcctgcacttggggtcacccccacggtccggatcgagtcatcgtcttcgcaagtggccgaggggcagaccctggacctgaactgcctcgttgctggtcaggcccatgcccaggtcacgtggcacaagcgcgggggcagcctcccggcccggcaccaggtgcatggctcgaggctacgcctgctccaggtgaccccagctgattcaggggagtacgtgtgccgtgtggtcggcagctcaggtacccaggaagcctcagtccttgtcaccatccagcagcgccttagtggctcccactcccagggtgtggcgtaccccgtccgcatcgagtcctcctcagcctccctggccaatggacacaccctggacctcaactgcctggttgccagccaggctccccacaccatcacctggtataagcgtggaggcagcttacccagccggcaccagatcgtgggctcccggctgcggatccctcaggtgactccggcagactcgggcgagtacgtgtgtcacgtcagtaacggtgcaggctcccgggagacctcgctcatcgtcaccatccagggcagcggttcctcccacgtgcccagcgtctccccaccgatcaggatcgagtcgtcttcccccacggtggtggaagggcagaccttggatctgaactgcgtggtcgccaggcagccccaggctatcatcacatggtacaagcgtgggggcagccttccctcccgacaccagacccatggctcccacctgcggttgcaccaaatgtctgtggctgactcgggcgagtatgtgtgccgggccaacaacaacatcgatgccctggaggcctccatcgtcatctccgtctcccctagcgccggcagcccctccgcccctggcagctccatgcccatcagaattgagtcatcctcctcacacgtggccgaaggggagaccctggatctgaactgcgtggtccccgggcaggcccatgcccaggtcacttggcacaagcgtgggggcagcctccccagtcaccatcagacccgcggctcacggctgcggctgcaccatgtgtccccggccgactcgggtgaatacgtgtgccgggtgatgggcagctctggccccctggaggcctcagtcctggtcaccatcgaagcctctggctcaagtgctgtccacgtccccgccccaggtggagccccacccatccgcatcgagccctcctcctcccgagtggcagaagggcagaccctggatctgaagtgcgtggtgcccgggcaggcccacgcccaggtcacgtggcacaagcgtggaggaaacctccctgcccggcaccaggtccacggcccactgctgaggctgaaccaggtgtccccggctgactctggcgagtactcgtgccaagtgaccggaagctcaggcaccctggaggcatctgtcctggtcacaattgagccctccagcccaggacccattcctgctccaggactggcccagcccatctacatcgaggcctcctcttcacacgtgactgaagggcagactctggatctgaactgtgtggtgcccgggcaggcccatgcccaggtcacgtggtacaagcgcgggggcagcctccccgcccggcaccagacccatggctcccagctgcggctccaccncgtctcccctgccgactcaggcgagtatgtgtgtcgtgcagccngcggcccaggccctgagcaagaagcctccttcacagtcaccgtcccgcccagtgaggggtcttcctaccgccttaggagcccggtcatctccatcgacccgcccagcagcaccgtgcagcagggccaggatgccagcttcaagtgcctcatccatgacggggcagcccccatcagcctcgagtggaagacccggaaccaggagctggaggacaacgtccacatcagtcccaatggctccatcatcaccatcgtgggcacccggcccagcaaccacggtacctaccgctgcgtggcctccaatgcctacggtgtggcccagagtgtggtgaacctcagtgtgcacgggccccctacagtgtccgtgctccccgagggccccgtgtgggtgaaagtgggaaaggctgtcaccctggagtgtgtcagtgccggggagccccgctcctctgctcgttggacccggatcagcagcacccctgccaagttggagcagcggacatatgggctcatggacagccacgcggtgctgcagatttcatcagctaaaccatcagatgcgggcacttatgtgtgccttgctcagaatgcactaggcacagcacagaagcaggtggaggtgatcgtggacacgggcgccatggccccaggggcccctcaggtccaagctgaagaagctgagctgactgtggaggctggacacacggccaccttgcgctgctcagccacaggcagccccgcgcccaccatccactggtccaagctgcgttccccactgccctggcagcaccggctggaaggtgacacactcatcataccccgggtagcccagcaggactcgggccagtacatctgcaatgccactagccctgctgggcacgctgaggccaccatcatcctgcacgtggagagcccaccatatgccaccacggtcccagagcacgcttcggtgcaggcaggggagacggtgcagctccagtgcctggctcacgggacacccccactcaccttccagtggagccgcgtgggcagcagccttcctgggagggcgaccgccaggaacgagctgctgcactttgagcgtgcagcccctgaggactcaggccgctaccgctgccgggtcaccaacaaggtgggctcagccgaggcctttgcccagctgctcgtccaaggccctcccggctctctccctgccacctccatcccagcagggtccacgcccaccgtgcaggtcacgcctcagctagagaccaagagcattggggccagcgttgagttccactgtgctgtgcccagcgaccggggtacccagctccgttggttcaaggaagggggtcagctgcctccgggtcacagcgtgcaggatggggtgctccgaatccagaacttggaccagagctgccaagggacgtatatatgccaggcccatggaccttgggggaaggcccaggccagtgcccagctggttatccaagccctgccctcggtgctcatcaacatccggacctctgtgcagaccgtggtggttggccacgccgtggagttcgaatgcctggcactgggtgaccccaagcctcaggtgacatggagcaaagttggagggcacctgcggccaggcattgtgcagagcggaggtgtcgtcaggatcgcccacgtagagctggctgatgcgggacagtatcgctgcactgccaccaacgcagctggcaccacacaatcccacgtcctgctgcttgtgcaagccttgccccagatctcaatgccccaagaagtccgtgtgcctgctggttctgcagctgtcttcccctgcatagcctcaggctaccccactcctgacatcagctggagcaagctggatggcagcctgccacctgacagccgcctggagaacaacatgctgatgctgccctcagtccgaccccaggacgcaggtacctacgtctgcaccgccactaaccgccagggcaaggtcaaagcctttgcccacctgcaggtgccagagcgggtggtgccctacttcacgcagaccccctactccttcctaccgctgcccaccatcaaggatgcctacaggaagttcgagatcaagatcaccttccggcccgactcagccgatgggatgctgctgtacaatgggcagaagcgagtcccagggagccccaccaacctggccaaccggcagcccgacttcatctccttcggcctcgtggggggaaggcccgagttccggttcgatgcaggctcaggcatggccaccatccgccatcccacaccactggccctgggccatttccacaccgtgaccctgctgcgcagcctcacccagggctccctgattgtgggtgacctggccccggtcaatgggacctcccagggcaagttccagggcctggatctgaacgaggaactctacctgggtggctatcctgactatggtgccatccccaaggcggggctgagcagcggcttcataggctgtgtccgggagctgcgcatccagggcgaggagatcgtcttccatgacctcaacctcacggcgcacggcatctcccactgccccacctgtcgggaccggccctgccagaatggcggtcagtgccatgactctgagagcagcagctacgtgtgcgtctgcccagctggcttcaccgggagccgctgtgagcactcgcaggccctgcactgccatccagaggcctgtgggcccgacgccacctgtgtgaaccggcctgacggtcgaggctacacctgccgctgccacctgggccgctcggggttgcggtgtgaggaaggtgtgacagtgaccaccccctcgctgtcgggtgctggctcctacctggcactgcccgccctcaccaacacacaccacgagctacgcctggacgtggagttcaagccactcgcccctgacggggtcctgctgttcagcggggggaagagcgggcctgtggaggacttcgtgtccctggcgatggtgggcggccacctggagttccgctatgagttggggtcagggctggccgttctgcggagcgccgagccgctggccctgggccgctggcaccgtgtgtctgcagagcgtctcaacaaggacggcagcctgcgggtgaatggtggacgccctgtgctgcgctcctcgcccggcaagagccagggcctcaacctgcacaccctgctctacctggggggtgtggagccttccgtgccactgtccccggccaccaacatgagcgctcacttccgcggctgtgtgggcgaggtgtcagtgaatggcaaacggctggacctcacctacagtttcctaggcagccagggcatcgggcaatgctatgatagctccccatgtgagcgccagccttgccaacatggtgccacgtgcatgcccgctggcgagtatgagttccagtgcctgtgtcgagatggattcaaaggagacctgtgtgagcacgaggagaacccctgccagctccgtgaaccctgtctgcatgggggcacctgccagggcacccgctgcctctgcctccctggcttctctggcccacgctgccaacaaggctctggacatggcatagcagagtccgactggcatcttgaaggcagcgggggcaatgatgcccctgggcagtacggagcctatttccacgatgatggcttcctcgccttccctggccatgtcttctccaggagcctgcccgaggtgcccgagaccatcgagctggaggttcggaccagcacagccagtggcctcctgctctggcagggtgtggaggtgggagaggccggccaaggcaaggacttcatcagcctcgggcttcaagacgggcaccttgtcttcaggtaccagctgggtagtggggaggcccgcctggtctctgaggaccccatcaatgacggcgagtggcaccgggtgacagcactgcgggagggccgcagaggttccatccaagtcgacggtgaggagctggtcagcggccggtccccaggtcccaacgtggcagtcaacgccaagggcagcgtctacatcggcggagcccctgacgtggccacgctgaccgggggcagattctcctcgggcatcacaggctgtgtcaagaacctggtgctgcactcggcccgacccggcgccccgcccccacagcccctggacctgcagcaccgcgcccaggccggggccaacacacgcccctgcccctcgtaggcacctgcctgccccacacggactcccgggccacgccccagcccgacaatgtcgagtatattattattaatattattatgaatttttgtaagaaaccgaggcgatgccacgctttgctgctaccgccctgggctggactggaggtgggcatgccaccctcacacacacagctgggcaaagccacaaggctggccagcaaggcaggttggatgggagtgggcacctcagaaagtcaccaggacttggggtcaggaacagtggctgggtgggcccagaactgcccccactgtccccctacccaccgatggagcccccagatagagctgggtggcctgtttctgcagcccttgggcagttctcactcctaggagagccaacctcggcttgtgggctggtgccccacagctacctgagacgggcatcgcaggagtctctgccacccactcaggattgggaattgtctttagtgccggctgtggagcaaaaggcagctcacccctgggcaggcggtccccatccccaccagctcgtttttcagcacccccacccacctccacccagcccctggcacctcctctggcagactccccctcctaccacgtcctcctggcctgcattcccaccccctcctgccagcacacagcctggggtccctccctcaggggctgtaagggaaggcccaccccaactcttaccaggagctgctacaggcagagcccagcactgatagggccccgcccaccgggccccgcccaccccaggccacatccccacccatctggaagtgaaggcccagggactcctccaacagacaacggacggacggatgccgctggtgctcaggaagagctagtgccttaggtgggggaaggcaggactcacgactgagagagagaggagggggatatgaccaccctgccccatctgcaggagcctgaagatccagctcaagtgccatcctgccagtggcccccagactgtggggttgggacgcctggcctctgtgtcctagaagggaccctcctgtggtctttgtcttgatttttcttaataaacggtgctatccccgcca

SEQ ID NO: 367535 - DNA, 13971 bp, Homo sapiens
  misc_feature (1383)..(1383): n is a, c, g, or t
  misc_feature (1392)..(1392): n is a, c, g, or t
  misc_feature (5192)..(5194): n is a, c, g, or t
  misc_feature (9022)..(9022): n is a, c, g, or t
  misc_feature (9066)..(9066): n is a, c, g, or t
ggccggcgagcgggcggctgcgggcggcgcggagcgggcggcgcggagcgagcgagcgagagagcggcgcgggccgggccatggggtggcgggcgccgggcgcgctgctgctggcgctgctgctgcacgggcggctgctggcggtgacccatgggctgagggcatacgatggcttgtctctgcctgaggacatagagaccgtcacagcaagccaaatgcgctggacacattcgtacctttctgatgatgaggacatgctggctgacagcatctcaggagacgacctgggcagtggggacctgggcagcggggacttccagatggtttatttccgagccctggtgaatttcactcgctccatcgagtacagccctcagctggaggatgcaggctccagagagtttcgagaggtgtccgaggctgtggtagacacgctggagtcggagtacttgaaaattcccggagaccaggttgtcagtgtggtgttcatcaaggagctggatggctgggtttttgtggagctcgatgtgggctcggaagggaatgcggatggtgctcagattcaggagatgctgctcagggtcatctccagcggctctgtggcctcctacgtcacctctccccagggattccagttccgacgcctgggcacagtgccccagttcccaagagcctgcacggaggccgagtttgcctgccacagctacaatgagtgtgtggccctggagtatcgctgtgaccggcggcccgactgcagggacatgtctgatgagctcaattgtgaggagccagtcctgggtatcagccccacattctctctccttgtggagacgacatctttaccgccccggccagagacaaccatcatgcgacagccaccagtcacccacgctcctcagcccctgcttcccggttccgtcaggcccctgccctgtgggccccaggaggccgcatgccgcaatgggcactgcatccccagagactacctctgcgacggacaggaggactgcgaggacggcagcgatgagctagactgtggccccccgccaccctgtgagcccaacgagttcccctgcgggaatggacattgtgccctcaagctgtggcgctgcgatggtgactttgactgtgaggaccgaactgatgaagccaactgccccaccaagcgtcctgaggaagtgtgcgggcccacacagttccgatgcgtctctaccaacatgtgcatcccagccagcttccactgtgacgaggagagcgactgtcctgaccggagcgacgagtttggctgcatgcccccccaggtggtgacacctccccgggagtccatccaggcttcccggggccagacagtgaccttcacctgcgtggccattggcgtccccnccccctttntcatcaattggaggctcaactggggccacatcccctctcatcccagggtgacagtgaccagcgagggtggccgtggcacactgatcatccgtgatgtgaaggagtcagaccagggtgcctacacctgtgaggccatgaacgcccggggcatggtgtttggcattcctgacggtgtccttgagctcgtcccacaacgaggcccctgccctgacggccacttctacctggagcacagcgccgcctgcctgccctgcttctgctttggcatcaccagcgtgtgccagagcacccgccgcttccgggaccagatcaggctgcgctttgaccaacccgatgacttcaagggtgtgaatgtgacaatgcctgcgcagcccggcacgccacccctctcctccacgcagctgcagatcgacccatccctgcacgagttccagctagtcgacctgtcccgccgcttcctcgtccacgactccttctgggctctgcctgaacagttcctgggcaacaaggtggactcctatggcggctccctgcgttacaacgtgcgctacgagttggcccgtggcatgctggagccagtgcagcggccggacgtggtcctcgtgggtgccgggtaccgcctcctctcccgaggccacacacccacccaacctggtgctctgaaccagcgccaggtccagttctctgaggagcactgggtccatgagtctggccggccggtgcagcgcgcggagctgctgcaggtgctgcagagcctggaggccgtgctcatccagaccgtgtacaacaccaagatggctagcgtgggacttagcgacatcgccatggataccaccgtcacccatgccaccagccatggccgtgcccacagtgtggaggagtgcagatgccccattggctattctggcttgtcctgcgagagctgtgatgcccacttcactcgggtgcctggtgggccctacctgggcacctgctctggttgcagttgcaatggccatgccagctcctgtgaccctgtgtatggccactgcctgaattgccagcacaacacggaggggccacagtgcaacaagtgcaaggctggcttctttggggacgccatgaaggccacggccacttcctgccggccctgcccttgcccatacatcgatgcctcccgcagattctcagacacttgcttcctggacacggatggccaagccacatgtgacgcctgtgccccaggctacactggccgccgctgtgagagctgtgcccccggatacgagggcaaccccatccagcccggcgggaagtgcaggcccgtcaaccaggagattgtgcgctgtgacgagcgtggcagcatggggacctccggggaggcctgccgctgtaagaacaatgtggtggggcgcttgtgcaatgaatgtgctgacggctctttccacctgagtacccgaaaccccgatggctgcctcaagtgcttctgcatgggtgtcagtcgccactgcaccagctcttcatggagccgtgcccagttgcatggggcctctgaggagcctggtcacttcagcctgaccaacgccgcaagcacccacaccaccaacgagggcatcttctcccccacgcccggggaactgggattctcctccttccacagactcttatctggaccctacttctggagcctcccttcacgcttcctgggggacaaggtgacctcctatggaggagagctgcgcttcacagtgacccagaggtcccagccgggctccacacccctgcacgggcagccgttggtggtgctgcaaggtaacaacatcatcctagagcaccatgtggcccaggagcccagccccggccagcccagcaccttcattgtgcctttccgggagcaagcatggcagcggcccgatgggcagccagccacacgggagcacctgctgatggcactggcaggcatcgacaccctcctgatccgagcatcctacgcccagcagcccgctgagagcagggtctctggcatcagcatggacgtggctgtgcccgaggaaaccggccaggaccccgcgctggaagtggaacagtgctcctgcccacccgggtaccgtgggccgtcctgccaggactgtgacacaggctacacacgcacgcccagtggcctctacctgggtacctgtgaacgctgcagctgccatggccactcagaggcctgcgagccagaaacaggtgcctgccagggctgccagcatcacacggagggccctcggtgtgagcagtgccagccaggatactacggggacgcccagcgggggacaccacaggactgccagctgtgcccctgctacggagaccctgctgccggccaggctgcccacacttgttttctggacacagacggccaccccacctgtgatgcgtgctccccaggccacagtgggcgtcactgtgagaggtgcgcccctggctactatggcaaccccagccagggccagccatgccagagagacagccaggtgccagggcccataggctgcaactgtgacccccaaggcagcgtcagcagccagtgtgatgctgctggtcagtgccagtgcaaggcccaggtggaaggcctcacttgcagccactgccggccccaccacttccacctgagtgccagcaacccagacggctgcctgccctgcttctgtatgggcatcacccagcagtgcgccagctctgcctacacacgccacctgatctccacccactttgcccctggggacttccaaggctttgccctggtgaacccacagcgaaacagccgcctgacaggagaattcactgtggaacccgtgcccgagggtgcccagctctcttttggcaactttgcccaactcggccatgagtccttctactggcagctgccggagacataccagggagacaaggtggcggcctacggtgggaagttgcgatacaccctctcctacacagcaggcccacagggcagcccactctctgaccccgatgtgcagatcacgggcaacaacatcatgctagtggcctcccagccagcgctgcagggccctgagaggaggagctacgagatcatgttccgagaggaattctggcgccggcccgatgggcagccggccacacgcgagcacctcctgatggcactggccgacctggatgagctcctgatccgggccacgttctcctccgtgccgctggtggccagcatcagcgcagtcagcctggaggtcgcccagccggggccctcaaacagaccccgcgccctcgaggtggaggagtgccgctgcccgccaggctacatcggtctgtcctgccaggactgtgcccccggctacacgcgcaccgggagtgggctctacctcggccactgcgagctatgtgaatgcaatggccactcagacctgtgccacccagagactggggcctgctcgcaatgccagcacaacgccgcaggggagttctgcgagctttgtgcccctggctactacggagatgccacagccgggacgcctgaggactgccagccctgtgcctgcccactgaccaacccagagaacatgttttcccgcacctgtgagagcctgggagccggcgggtaccgctgcacggcctgcgaacccggctacactggccagtactgtgagcagtgtggcccaggttacgtgggtaaccccagtgtgcaagggggccagtgcctgccagagacaaaccaagccccactggtggtcgaggtccatcctgctcgaagcatagtgccccaaggtggctcccactccctgcggtgtcaggtcagtgggagnnnaccccactacttctattggtcccgtgaggatgggcggcctgtgcccagcggcacccagcagcgacatcaaggctccgagctccacttccccagcgtccagccctcggatgctggggtctacatttgcacctgccgtaatctccaccaatccaataccagccgggcagagctgctggtcactgaggctccaagcaagcccatcacagtgactgtggaggagcagcggagccagagcgtgcgccccggagctgacgtcaccttcatctgcacagccaaaagcaagtccccagcctataccctggtgtggacccgcctgcacaacgggaaactgcccacccgagccatggatttcaatggcatcctgaccattcgcaacgtccagctgagtgatgcaggcacctacgtgtgcaccggctccaacatgtttgccatggaccagggcacagccactctacatgtgcaggcctcgggcaccttgtccgcccccgtggtctccatccatccgccacagctcacagtgcagcccgggcaactggcggagttccgctgcagcgccacagggagccccacgcccaccctcgagtggacagggggccccggcggccagctccctgcgaaggcacaaatccacggcggcatcctgcgcctgccagctgtcgagcccacggatcaggcccagtacttgtgccgagcccacagcagcgctgggcagcaggtggccagggctgtgctccacgtgcatgggggcggtgggcccagagtccaagtgagcccagagaggacccaggtccacgcaggccgcaccgtcaggctgtactgcagggctgcaggcgtgcctagcgccaccatcacctggaggaaggaagggggcagcctcccaccacaggcccggtcagagcgcacagacatcgcgacactgctcatcccagccatcacgactgctgacgccggcttctacctctgcgtggccaccagccctgcaggcactgcccaggcccggatccaagtggttgtcctttcagcctcagatgccagcccaccgccggtcaagattgagtcctcatcgccttctgtgacagaagggcaaacactcgacctcaactgtgtggtggcagggtcagcccatgcccaggtcacctggtacaggcgagggggtagcctgcctccccacacccaggtgcacggctcccgtctgcggctcccccaggtctcaccagctgattctggagaatatgtgtgccgtgtggagaatggatcgggccccaaggaggcctccattactgtgtctgtgctccacggcacccattctggccccagctacaccccagtgcccggcagcacccggcccatccgcatcgagccctcctcctcacacgtggcggaagggcagaccctggatctgaactgcgtggtgcccgggcaggcccacgcccaggtcacgtggcacaagcgtgggggcagcctccctgcccggcaccagacccacggctcgctgctgcggctgcaccaggtgaccccggccgactcaggcgagtatgtgtgccatgtggtgggcacctccggccccctagaggcctcagtcctggtcaccatcgaagcctctgtcatccctggacccatcccacctgtcaggatcgagtcttcatcctccacagtggccgagggccagaccctggatctgagctgcgtggtggcagggcaggcccacgcccaggtcacatggtacaagcgtgggggcagcctccctgcccggcaccaggttcgtggctcccgcctgtacatcttccaggcctcacctgccgatgcgggacagtacgtctgccgggccagcaacggcatggaggcctccatcacggtcacagtaactgggacccagggggccaacttagcctaccctgccggcagcacccagcccatccgcatcgagccctcctcctcgcaagtggcggaagggcagaccctggatctgaactgcgtggtgcccgggcagtcccatgcccaggtcacgtggcacaagcgtgggggcagcctccctgtccggcaccagacccacggctccctgctgagactctaccaagcgtcccccgccgactcgggcgagtacgtgtgccgagtgttgggcagctccgtgcctctagaggcctctgtcctggtcaccattgagcctgcgggctcagtgcctgcacttggggtcacccccacggtccggatcgagtcatcgtcttcgcaagtggccgaggggcagaccctggacctgaactgcctcgttgctggtcaggcccatgcccaggtcacgtggcacaagcgcgggggcagcctcccggcccggcaccaggtgcatggctcgaggctacgcctgctccaggtgaccccagctgattcaggggagtacgtgtgccgtgtggtcggcagctcaggtacccaggaagcctcagtccttgtcaccatccagcagcgccttagtggctcccactcccagggtgtggcgtaccccgtccgcatcgagtcctcctcagcctccctggccaatggacacaccctggacctcaactgcctggttgccagccaggctccccacaccatcacctggtataagcgtggaggcagcttacccagccggcaccagatcgtgggctcccggctgcggatccctcaggtgactccggcagactcgggcgagtacgtgtgtcacgtcagtaacggtgcaggctcccgggagacctcgctcatcgtcaccatccagggcagcggttcctcccacgtgcccagcgtctccccaccgatcaggatcgagtcgtcttcccccacggtggtggaagggcagaccttggatctgaactgcgtggtcgccaggcagccccaggctatcatcacatggtacaagcgtgggggcagccttccctcccgacaccagacccatggctcccacctgcggttgcaccaaatgtctgtggctgactcgggcgagtatgtgtgccgggccaacaacaacatcgatgccctggaggcctccatcgtcatctccgtctcccctagcgccggcagcccctccgcccctggcagctccatgcccatcagaattgagtcatcctcctcacacgtggccgaaggggagaccctggatctgaactgcgtggtccccgggcaggcccatgcccaggtcacttggcacaagcgtgggggcagcctccccagtcaccatcagacccgcggctcacggctgcggctgcaccatgtgtccccggccgactcgggtgaatacgtgtgccgggtgatgggcagctctggccccctggaggcctcagtcctggtcaccatcgaagcctctggctcaagtgctgtccacgtccccgccccaggtggagccccacccatccgcatcgagccctcctcctcccgagtggcagaagggcagaccctggatctgaagtgcgtggtgcccgggcaggcccacgcccaggtcacgtggcacaagcgtggaggaaacctccctgcccggcaccaggtccacggcccactgctgaggctgaaccaggtgtccccggctgactctggcgagtactcgtgccaagtgaccggaagctcaggcaccctggaggcatctgtcctggtcacaattgagccctccagcccaggacccattcctgctccaggactggcccagcccatctacatcgaggcctcctcttcacacgtgactgaagggcagactctggatctgaactgtgtggtgcccgggcaggcccatgcccaggtcacgtggtacaagcgcgggggcagcctccccgcccggcaccagacccatggctcccagctgcggctccaccncgtctcccctgccgactcaggcgagtatgtgtgtcgtgcagccngcggcccaggccctgagcaagaagcctccttcacagtcaccgtcccgcccagtgaggggtcttcctaccgccttaggagcccggtcatctccatcgacccgcccagcagcaccgtgcagcagggccaggatgccagcttcaagtgcctcatccatgacggggcagcccccatcagcctcgagtggaagacccggaaccaggagctggaggacaacgtccacatcagtcccaatggctccatcatcaccatcgtgggcacccggcccagcaaccacggtacctaccgctgcgtggcctccaatgcctacggtgtggcccagagtgtggtgaacctcagtgtgcacgggccccctacagtgtccgtgctccccgagggccccgtgtgggtgaaagtgggaaaggctgtcaccctggagtgtgtcagtgccggggagccccgctcctctgctcgttggacccggatcagcagcacccctgccaagttggagcagcggacatatgggctcatggacagccacgcggtgctgcagatttcatcagctaaaccatcagatgcgggcacttatgtgtgccttgctcagaatgcactaggcacagcacagaagcaggtggaggtgatcgtggacacgggcgccatggccccaggggcccctcaggtccaagctgaagaagctgagctgactgtggaggctggacacacggccaccttgcgctgctcagccacaggcagccccgcgcccaccatccactggtccaagctgcgttccccactgccctggcagcaccggctggaaggtgacacactcatcataccccgggtagcccagcaggactcgggccagtacatctgcaatgccactagccctgctgggcacgctgaggccaccatcatcctgcacgtggagagcccaccatatgccaccacggtcccagagcacgcttcggtgcaggcaggggagacggtgcagctccagtgcctggctcacgggacacccccactcaccttccagtggagccgcgtgggcagcagccttcctgggagggcgaccgccaggaacgagctgctgcactttgagcgtgcagcccctgaggactcaggccgctaccgctgccgggtcaccaacaaggtgggctcagccgaggcctttgcccagctgctcgtccaaggccctcccggctctctccctgccacctccatcccagcagggtccacgcccaccgtgcaggtcacgcctcagctagagaccaagagcattggggccagcgttgagttccactgtgctgtgcccagcgaccggggtacccagctccgttggttcaaggaagggggtcagctgcctccgggtcacagcgtgcaggatggggtgctccgaatccagaacttggaccagagctgccaagggacgtatatatgccaggcccatggaccttgggggaaggcccaggccagtgcccagctggttatccaagccctgccctcggtgctcatcaacatccggacctctgtgcagaccgtggtggttggccacgccgtggagttcgaatgcctggcactgggtgaccccaagcctcaggtgacatggagcaaagttggagggcacctgcggccaggcattgtgcagagcggaggtgtcgtcaggatcgcccacgtagagctggctgatgcgggacagtatcgctgcactgccaccaacgcagctggcaccacacaatcccacgtcctgctgcttgtgcaagccttgccccagatctcaatgccccaagaagtccgtgtgcctgctggttctgcagctgtcttcccctgcatagcctcaggctaccccactcctgacatcagctggagcaagctggatggcagcctgccacctgacagccgcctggagaacaacatgctgatgctgccctcagtccgaccccaggacgcaggtacctacgtctgcaccgccactaaccgccagggcaaggtcaaagcctttgcccacctgcaggtgccagagcgggtggtgccctacttcacgcagaccccctactccttcctaccgctgcccaccatcaaggatgcctacaggaagttcgagatcaagatcaccttccggcccgactcagccgatgggatgctgctgtacaatgggcagaagcgagtcccagggagccccaccaacctggccaaccggcagcccgacttcatctccttcggcctcgtggggggaaggcccgagttccggttcgatgcaggctcaggcatggccaccatccgccatcccacaccactggccctgggccatttccacaccgtgaccctgctgcgcagcctcacccagggctccctgattgtgggtgacctggccccggtcaatgggacctcccagggcaagttccagggcctggatctgaacgaggaactctacctgggtggctatcctgactatggtgccatccccaaggcggggctgagcagcggcttcataggctgtgtccgggagctgcgcatccagggcgaggagatcgtcttccatgacctcaacctcacggcgcacggcatctcccactgccccacctgtcgggaccggccctgccagaatggcggtcagtgccatgactctgagagcagcagctacgtgtgcgtctgcccagctggcttcaccgggagccgctgtgagcactcgcaggccctgcactgccatccagaggcctgtgggcccgacgccacctgtgtgaaccggcctgacggtcgaggctacacctgccgctgccacctgggccgctcggggttgcggtgtgaggaaggtgtgacagtgaccaccccctcgctgtcgggtgctggctcctacctggcactgcccgccctcaccaacacacaccacgagctacgcctggacgtggagttcaagccactcgcccctgacggggtcctgctgttcagcggggggaagagcgggcctgtggaggacttcgtgtccctggcgatggtgggcggccacctggagttccgctatgagttggggtcagggctggccgttctgcggagcgccgagccgctggccctgggccgctggcaccgtgtgtctgcagagcgtctcaacaaggacggcagcctgcgggtgaatggtggacgccctgtgctgcgctcctcgcccggcaagagccagggcctcaacctgcacaccctgctctacctggggggtgtggagccttccgtgccactgtccccggccaccaacatgagcgctcacttccgcggctgtgtgggcgaggtgtcagtgaatggcaaacggctggacctcacctacagtttcctaggcagccagggcatcgggcaatgctatgatagctccccatgtgagcgccagccttgccaacatggtgccacgtgcatgcccgctggcgagtatgagttccagtgcctgtgtcgagatggattcaaaggagacctgtgtgagcacgaggagaacccctgccagctccgtgaaccctgtctgcatgggggcacctgccagggcacccgctgcctctgcctccctggcttctctggcccacgctgccaacaaggctctggacatggcatagcagagtccgactggcatcttgaaggcagcgggggcaatgatgcccctgggcagtacggagcctatttccacgatgatggcttcctcgccttccctggccatgtcttctccaggagcctgcccgaggtgcccgagaccatcgagctggaggttcggaccagcacagccagtggcctcctgctctggcagggtgtggaggtgggagaggccggccaaggcaaggacttcatcagcgccggggccaacacacgcccctgcccctcgtaggcacctgcctgccccacacggactcccgggccacgccccagcccgacaatgtcgagtatattattattaatattattatgaatttttgtaagaaaccgaggcgatgccacgctttgctgctaccgccctgggctggactggaggtgggcatgccaccctcacacacacagctgggcaaagccacaaggctggccagcaaggcaggttggatgggagtgggcacctcagaaagtcaccaggacttggggtcaggaacagtggctgggtgggcccagaactgcccccactgtccccctacccaccgatggagcccccagatagagctgggtggcctgtttctgcagcccttgggcagttctcactcctaggagagccaacctcggcttgtgggctggtgccccacagctacctgagacgggcatcgcaggagtctctgccacccactcaggattgggaattgtctttagtgccggctgtggagcaaaaggcagctcacccctgggcaggcggtccccatccccaccagctcgtttttcagcacccccacccacctccacccagcccctggcacctcctctggcagactccccctcctaccacgtcctcctggcctgcattcccaccccctcctgccagcacacagcctggggtccctccctcaggggctgtaagggaaggcccaccccaactcttaccaggagctgctacaggcagagcccagcactgatagggccccgcccaccgggccccgcccaccccaggccacatccccacccatctggaagtgaaggcccagggactcctccaacagacaacggacggacggatgccgctggtgctcaggaagagctagtgccttaggtgggggaaggcaggactcacgactgagagagagaggagggggatatgaccaccctgccccatctgcaggagcctgaagatccagctcaagtgccatcctgccagtggcccccagactgtggggttgggacgcctggcctctgtgtcctagaagggaccctcctgtggtctttgtcttgatttttcttaataaacggtgctatccccgcca

SEQ ID NO: 367536 - DNA, 4248 bp, Homo sapiens
gagttgcgcatccttacatcatgtgatgtgcctgtagcccccttgcttgctgcattcgtagaaagctccatgaggtttggccagaagctgagcagatgccagcactatgtttcctgtaaagcctgcagaacctcatacatgtccccgcaggccctcccggctctctccctgccacctccatcccagcagggtccacgcccaccgtgcaggtcacgcctcagctagagaccaagagcattggggccagcgttgagttccactgtgctgtgcccagcgaccggggtacccagctccgttggttcaaggaagggggtcagctgcctccgggtcacagcgtgcaggatggggtgctccgaatccagaacttggaccagagctgccaagggacgtatatatgccaggcccatggaccttgggggaaggcccaggccagtgcccagctggttatccaagccctgccctcggtgctcatcaacatccggacctctgtgcagaccgtggtggttggccacgccgtggagttcgaatgcctggcactgggtgaccccaagcctcaggtgacatggagcaaagttggagggcacctgcggccaggcattgtgcagagcggaggtgtcgtcaggatcgcccacgtagagctggctgatgcgggacagtatcgctgcactgccaccaacgcagctggcaccacacaatcccacgtcctgctgcttgtgcaagccttgccccagatctcaatgccccaagaagtccgtgtgcctgctggttctgcagctgtcttcccctgcatagcctcaggctaccccactcctgacatcagctggagcaagctggatggcagcctgccacctgacagccgcctggagaacaacatgctgatgctgccctcagtccgaccccaggacgcaggtacctacgtctgcaccgccactaaccgccagggcaaggtcaaagcctttgcccacctgcaggtgccagagcgggtggtgccctacttcacgcagaccccctactccttcctaccgctgcccaccatcaaggatgcctacaggaagttcgagatcaagatcaccttccggcccgactcagccgatgggatgctgctgtacaatgggcagaagcgagtcccagggagccccaccaacctggccaaccggcagcccgacttcatctccttcggcctcgtggggggaaggcccgagttccggttcgatgcaggctcaggcatggccaccatccgccatcccacaccactggccctgggccatttccacaccgtgaccctgctgcgcagcctcacccagggctccctgattgtgggtgacctggccccggtcaatgggacctcccagggcaagttccagggcctggatctgaacgaggaactctacctgggtggctatcctgactatggtgccatccccaaggcggggctgagcagcggcttcataggctgtgtccgggagctgcgcatccagggcgaggagatcgtcttccatgacctcaacctcacggcgcacggcatctcccactgccccacctgtcgggaccggccctgccagaatggcggtcagtgccatgactctgagagcagcagctacgtgtgcgtctgcccagctggcttcaccgggagccgctgtgagcactcgcaggccctgcactgccatccagaggcctgtgggcccgacgccacctgtgtgaaccggcctgacggtcgaggctacacctgccgctgccacctgggccgctcggggttgcggtgtgaggaaggtgtgacagtgaccaccccctcgctgtcgggtgctggctcctacctggcactgcccgccctcaccaacacacaccacgagctacgcctggacgtggagttcaagccactcgcccctgacggggtcctgctgttcagcggggggaagagcgggcctgtggaggacttcgtgtccctggcgatggtgggcggccacctggagttccgctatgagttggggtcagggctggccgttctgcggagcgccgagccgctggccctgggccgctggcaccgtgtgtctgcagagcgtctcaacaaggacggcagcctgcgggtgaatggtggacgccctgtgctgcgctcctcgcccggcaagagccagggcctcaacctgcacaccctgctctacctggggggtgtggagccttccgtgccactgtccccggccaccaacatgagcgctcacttccgcggctgtgtgggcgaggtgtcagtgaatggcaaacggctggacctcacctacagtttcctaggcagccagggcatcgggcaatgctatgatagctccccatgtgagcgccagccttgccaacatggtgccacgtgcatgcccgctggcgagtatgagttccagtgcctgtgtcgagatggattcaaaggagacctgtgtgagcacgaggagaacccctgccagctccgtgaaccctgtctgcatgggggcacctgccagggcacccgctgcctctgcctccctggcttctctggcccacgctgccaacaaggctctggacatggcatagcagagtccgactggcatcttgaaggcagcgggggcaatgatgcccctgggcagtacggagcctatttccacgatgatggcttcctcgccttccctggccatgtcttctccaggagcctgcccgaggtgcccgagaccatcgagctggaggttcggaccagcacagccagtggcctcctgctctggcagggtgtggaggtgggagaggccggccaaggcaaggacttcatcagcctcgggcttcaagacgggcaccttgtcttcaggtaccagctgggtagtggggaggcccgcctggtctctgaggaccccatcaatgacggcgagtggcaccgggtgacagcactgcgggagggccgcagaggttccatccaagtcgacggtgaggagctggtcagcggccggtccccaggtcccaacgtggcagtcaacgccaagggcagcgtctacatcggcggagcccctgacgtggccacgctgaccgggggcagattctcctcgggcatcacaggctgtgtcaagaacctggtgctgcactcggcccgacccggcgccccgcccccacagcccctggacctgcagcaccgcgcccaggccggggccaacacacgcccctgcccctcgtaggcacctgcctgccccacacggactcccgggccacgccccagcccgacaatgtcgagtatattattattaatattattatgaatttttgtaagaaaccgaggcgatgccacgctttgctgctaccgccctgggctggactggaggtgggcatgccaccctcacacacacagctgggcaaagccacaaggctggccagcaaggcaggttggatgggagtgggcacctcagaaagtcaccaggacttggggtcaggaacagtggctgggtgggcccagaactgcccccactgtccccctacccaccgatggagcccccagatagagctgggtggcctgtttctgcagcccttgggcagttctcactcctaggagagccaacctcggcttgtgggctggtgccccacagctacctgagacgggcatcgcaggagtctctgccacccactcaggattgggaattgtctttagtgccggctgtggagcaaaaggcagctcacccctgggcaggcggtccccatccccaccagctcgtttttcagcacccccacccacctccacccagcccctggcacctcctctggcagactccccctcctaccacgtcctcctggcctgcattcccaccccctcctgccagcacacagcctggggtccctccctcaggggctgtaagggaaggcccaccccaactcttaccaggagctgctacaggcagagcccagcactgatagggccccgcccaccgggccccgcccaccccaggccacatccccacccatctggaagtgaaggcccagggactcctccaacagacaacggacggacggatgccgctggtgctcaggaagagctagtgccttaggtgggggaaggcaggactcacgactgagagagagaggagggggatatgaccaccctgccccatctgcaggagcctgaagatccagctcaagtgccatcctgccagtggcccccagactgtggggttgggacgcctggcctctgtgtcctagaagggaccctcctgtggtctttgtcttgatttttcttaataaacggtgctatccccgcca

SEQ ID NO: 367537 - DNA, 14067 bp, Homo sapiens
  misc_feature (1383)..(1383): n is a, c, g, or t
  misc_feature (1392)..(1392): n is a, c, g, or t
  misc_feature (5192)..(5194): n is a, c, g, or t
  misc_feature (9022)..(9022): n is a, c, g, or t
  misc_feature (9066)..(9066): n is a, c, g, or t
ggccggcgagcgggcggctgcgggcggcgcggagcgggcggcgcggagcgagcgagcgagagagcggcgcgggccgggccatggggtggcgggcgccgggcgcgctgctgctggcgctgctgctgcacgggcggctgctggcggtgacccatgggctgagggcatacgatggcttgtctctgcctgaggacatagagaccgtcacagcaagccaaatgcgctggacacattcgtacctttctgatgatgaggacatgctggctgacagcatctcaggagacgacctgggcagtggggacctgggcagcggggacttccagatggtttatttccgagccctggtgaatttcactcgctccatcgagtacagccctcagctggaggatgcaggctccagagagtttcgagaggtgtccgaggctgtggtagacacgctggagtcggagtacttgaaaattcccggagaccaggttgtcagtgtggtgttcatcaaggagctggatggctgggtttttgtggagctcgatgtgggctcggaagggaatgcggatggtgctcagattcaggagatgctgctcagggtcatctccagcggctctgtggcctcctacgtcacctctccccagggattccagttccgacgcctgggcacagtgccccagttcccaagagcctgcacggaggccgagtttgcctgccacagctacaatgagtgtgtggccctggagtatcgctgtgaccggcggcccgactgcagggacatgtctgatgagctcaattgtgaggagccagtcctgggtatcagccccacattctctctccttgtggagacgacatctttaccgccccggccagagacaaccatcatgcgacagccaccagtcacccacgctcctcagcccctgcttcccggttccgtcaggcccctgccctgtgggccccaggaggccgcatgccgcaatgggcactgcatccccagagactacctctgcgacggacaggaggactgcgaggacggcagcgatgagctagactgtggccccccgccaccctgtgagcccaacgagttcccctgcgggaatggacattgtgccctcaagctgtggcgctgcgatggtgactttgactgtgaggaccgaactgatgaagccaactgccccaccaagcgtcctgaggaagtgtgcgggcccacacagttccgatgcgtctctaccaacatgtgcatcccagccagcttccactgtgacgaggagagcgactgtcctgaccggagcgacgagtttggctgcatgcccccccaggtggtgacacctccccgggagtccatccaggcttcccggggccagacagtgaccttcacctgcgtggccattggcgtccccnccccctttntcatcaattggaggctcaactggggccacatcccctctcatcccagggtgacagtgaccagcgagggtggccgtggcacactgatcatccgtgatgtgaaggagtcagaccagggtgcctacacctgtgaggccatgaacgcccggggcatggtgtttggcattcctgacggtgtccttgagctcgtcccacaacgaggcccctgccctgacggccacttctacctggagcacagcgccgcctgcctgccctgcttctgctttggcatcaccagcgtgtgccagagcacccgccgcttccgggaccagatcaggctgcgctttgaccaacccgatgacttcaagggtgtgaatgtgacaatgcctgcgcagcccggcacgccacccctctcctccacgcagctgcagatcgacccatccctgcacgagttccagctagtcgacctgtcccgccgcttcctcgtccacgactccttctgggctctgcctgaacagttcctgggcaacaaggtggactcctatggcggctccctgcgttacaacgtgcgctacgagttggcccgtggcatgctggagccagtgcagcggccggacgtggtcctcgtgggtgccgggtaccgcctcctctcccgaggccacacacccacccaacctggtgctctgaaccagcgccaggtccagttctctgaggagcactgggtccatgagtctggccggccggtgcagcgcgcggagctgctgcaggtgctgcagagcctggaggccgtgctcatccagaccgtgtacaacaccaagatggctagcgtgggacttagcgacatcgccatggataccaccgtcacccatgccaccagccatggccgtgcccacagtgtggaggagtgcagatgccccattggctattctggcttgtcctgcgagagctgtgatgcccacttcactcgggtgcctggtgggccctacctgggcacctgctctggttgcagttgcaatggccatgccagctcctgtgaccctgtgtatggccactgcctgaattgccagcacaacacggaggggccacagtgcaacaagtgcaaggctggcttctttggggacgccatgaaggccacggccacttcctgccggccctgcccttgcccatacatcgatgcctcccgcagattctcagacacttgcttcctggacacggatggccaagccacatgtgacgcctgtgccccaggctacactggccgccgctgtgagagctgtgcccccggatacgagggcaaccccatccagcccggcgggaagtgcaggcccgtcaaccaggagattgtgcgctgtgacgagcgtggcagcatggggacctccggggaggcctgccgctgtaagaacaatgtggtggggcgcttgtgcaatgaatgtgctgacggctctttccacctgagtacccgaaaccccgatggctgcctcaagtgcttctgcatgggtgtcagtcgccactgcaccagctcttcatggagccgtgcccagttgcatggggcctctgaggagcctggtcacttcagcctgaccaacgccgcaagcacccacaccaccaacgagggcatcttctcccccacgcccggggaactgggattctcctccttccacagactcttatctggaccctacttctggagcctcccttcacgcttcctgggggacaaggtgacctcctatggaggagagctgcgcttcacagtgacccagaggtcccagccgggctccacacccctgcacgggcagccgttggtggtgctgcaaggtaacaacatcatcctagagcaccatgtggcccaggagcccagccccggccagcccagcaccttcattgtgcctttccgggagcaagcatggcagcggcccgatgggcagccagccacacgggagcacctgctgatggcactggcaggcatcgacaccctcctgatccgagcatcctacgcccagcagcccgctgagagcagggtctctggcatcagcatggacgtggctgtgcccgaggaaaccggccaggaccccgcgctggaagtggaacagtgctcctgcccacccgggtaccgtgggccgtcctgccaggactgtgacacaggctacacacgcacgcccagtggcctctacctgggtacctgtgaacgctgcagctgccatggccactcagaggcctgcgagccagaaacaggtgcctgccagggctgccagcatcacacggagggccctcggtgtgagcagtgccagccaggatactacggggacgcccagcgggggacaccacaggactgccagctgtgcccctgctacggagaccctgctgccggccaggctgcccacacttgttttctggacacagacggccaccccacctgtgatgcgtgctccccaggccacagtgggcgtcactgtgagaggtgcgcccctggctactatggcaaccccagccagggccagccatgccagagagacagccaggtgccagggcccataggctgcaactgtgacccccaaggcagcgtcagcagccagtgtgatgctgctggtcagtgccagtgcaaggcccaggtggaaggcctcacttgcagccactgccggccccaccacttccacctgagtgccagcaacccagacggctgcctgccctgcttctgtatgggcatcacccagcagtgcgccagctctgcctacacacgccacctgatctccacccactttgcccctggggacttccaaggctttgccctggtgaacccacagcgaaacagccgcctgacaggagaattcactgtggaacccgtgcccgagggtgcccagctctcttttggcaactttgcccaactcggccatgagtccttctactggcagctgccggagacataccagggagacaaggtggcggcctacggtgggaagttgcgatacaccctctcctacacagcaggcccacagggcagcccactctctgaccccgatgtgcagatcacgggcaacaacatcatgctagtggcctcccagccagcgctgcagggccctgagaggaggagctacgagatcatgttccgagaggaattctggcgccggcccgatgggcagccggccacacgcgagcacctcctgatggcactggccgacctggatgagctcctgatccgggccacgttctcctccgtgccgctggtggccagcatcagcgcagtcagcctggaggtcgcccagccggggccctcaaacagaccccgcgccctcgaggtggaggagtgccgctgcccgccaggctacatcggtctgtcctgccaggactgtgcccccggctacacgcgcaccgggagtgggctctacctcggccactgcgagctatgtgaatgcaatggccactcagacctgtgccacccagagactggggcctgctcgcaatgccagcacaacgccgcaggggagttctgcgagctttgtgcccctggctactacggagatgccacagccgggacgcctgaggactgccagccctgtgcctgcccactgaccaacccagagaacatgttttcccgcacctgtgagagcctgggagccggcgggtaccgctgcacggcctgcgaacccggctacactggccagtactgtgagcagtgtggcccaggttacgtgggtaaccccagtgtgcaagggggccagtgcctgccagagacaaaccaagccccactggtggtcgaggtccatcctgctcgaagcatagtgccccaaggtggctcccactccctgcggtgtcaggtcagtgggagnnnaccccactacttctattggtcccgtgaggatgggcggcctgtgcccagcggcacccagcagcgacatcaaggctccgagctccacttccccagcgtccagccctcggatgctggggtctacatttgcacctgccgtaatctccaccaatccaataccagccgggcagagctgctggtcactgaggctccaagcaagcccatcacagtgactgtggaggagcagcggagccagagcgtgcgccccggagctgacgtcaccttcatctgcacagccaaaagcaagtccccagcctataccctggtgtggacccgcctgcacaacgggaaactgcccacccgagccatggatttcaatggcatcctgaccattcgcaacgtccagctgagtgatgcaggcacctacgtgtgcaccggctccaacatgtttgccatggaccagggcacagccactctacatgtgcaggcctcgggcaccttgtccgcccccgtggtctccatccatccgccacagctcacagtgcagcccgggcaactggcggagttccgctgcagcgccacagggagccccacgcccaccctcgagtggacagggggccccggcggccagctccctgcgaaggcacaaatccacggcggcatcctgcgcctgccagctgtcgagcccacggatcaggcccagtacttgtgccgagcccacagcagcgctgggcagcaggtggccagggctgtgctccacgtgcatgggggcggtgggcccagagtccaagtgagcccagagaggacccaggtccacgcaggccgcaccgtcaggctgtactgcagggctgcaggcgtgcctagcgccaccatcacctggaggaaggaagggggcagcctcccaccacaggcccggtcagagcgcacagacatcgcgacactgctcatcccagccatcacgactgctgacgccggcttctacctctgcgtggccaccagccctgcaggcactgcccaggcccggatccaagtggttgtcctttcagcctcagatgccagcccaccgccggtcaagattgagtcctcatcgccttctgtgacagaagggcaaacactcgacctcaactgtgtggtggcagggtcagcccatgcccaggtcacctggtacaggcgagggggtagcctgcctccccacacccaggtgcacggctcccgtctgcggctcccccaggtctcaccagctgattctggagaatatgtgtgccgtgtggagaatggatcgggccccaaggaggcctccattactgtgtctgtgctccacggcacccattctggccccagctacaccccagtgcccggcagcacccggcccatccgcatcgagccctcctcctcacacgtggcggaagggcagaccctggatctgaactgcgtggtgcccgggcaggcccacgcccaggtcacgtggcacaagcgtgggggcagcctccctgcccggcaccagacccacggctcgctgctgcggctgcaccaggtgaccccggccgactcaggcgagtatgtgtgccatgtggtgggcacctccggccccctagaggcctcagtcctggtcaccatcgaagcctctgtcatccctggacccatcccacctgtcaggatcgagtcttcatcctccacagtggccgagggccagaccctggatctgagctgcgtggtggcagggcaggcccacgcccaggtcacatggtacaagcgtgggggcagcctccctgcccggcaccaggttcgtggctcccgcctgtacatcttccaggcctcacctgccgatgcgggacagtacgtctgccgggccagcaacggcatggaggcctccatcacggtcacagtaactgggacccagggggccaacttagcctaccctgccggcagcacccagcccatccgcatcgagccctcctcctcgcaagtggcggaagggcagaccctggatctgaactgcgtggtgcccgggcagtcccatgcccaggtcacgtggcacaagcgtgggggcagcctccctgtccggcaccagacccacggctccctgctgagactctaccaagcgtcccccgccgactcgggcgagtacgtgtgccgagtgttgggcagctccgtgcctctagaggcctctgtcctggtcaccattgagcctgcgggctcagtgcctgcacttggggtcacccccacggtccggatcgagtcatcgtcttcgcaagtggccgaggggcagaccctggacctgaactgcctcgttgctggtcaggcccatgcccaggtcacgtggcacaagcgcgggggcagcctcccggcccggcaccaggtgcatggctcgaggctacgcctgctccaggtgaccccagctgattcaggggagtacgtgtgccgtgtggtcggcagctcaggtacccaggaagcctcagtccttgtcaccatccagcagcgccttagtggctcccactcccagggtgtggcgtaccccgtccgcatcgagtcctcctcagcctccctggccaatggacacaccctggacctcaactgcctggttgccagccaggctccccacaccatcacctggtataagcgtggaggcagcttacccagccggcaccagatcgtgggctcccggctgcggatccctcaggtgactccggcagactcgggcgagtacgtgtgtcacgtcagtaacggtgcaggctcccgggagacctcgctcatcgtcaccatccagggcagcggttcctcccacgtgcccagcgtctccccaccgatcaggatcgagtcgtcttcccccacggtggtggaagggcagaccttggatctgaactgcgtggtcgccaggcagccccaggctatcatcacatggtacaagcgtgggggcagccttccctcccgacaccagacccatggctcccacctgcggttgcaccaaatgtctgtggctgactcgggcgagtatgtgtgccgggccaacaacaacatcgatgccctggaggcctccatcgtcatctccgtctcccctagcgccggcagcccctccgcccctggcagctccatgcccatcagaattgagtcatcctcctcacacgtggccgaaggggagaccctggatctgaactgcgtggtccccgggcaggcccatgcccaggtcacttggcacaagcgtgggggcagcctccccagtcaccatcagacccgcggctcacggctgcggctgcaccatgtgtccccggccgactcgggtgaatacgtgtgccgggtgatgggcagctctggccccctggaggcctcagtcctggtcaccatcgaagcctctggctcaagtgctgtccacgtccccgccccaggtggagccccacccatccgcatcgagccctcctcctcccgagtggcagaagggcagaccctggatctgaagtgcgtggtgcccgggcaggcccacgcccaggtcacgtggcacaagcgtggaggaaacctccctgcccggcaccaggtccacggcccactgctgaggctgaaccaggtgtccccggctgactctggcgagtactcgtgccaagtgaccggaagctcaggcaccctggaggcatctgtcctggtcacaattgagccctccagcccaggacccattcctgctccaggactggcccagcccatctacatcgaggcctcctcttcacacgtgactgaagggcagactctggatctgaactgtgtggtgcccgggcaggcccatgcccaggtcacgtggtacaagcgcgggggcagcctccccgcccggcaccagacccatggctcccagctgcggctccaccncgtctcccctgccgactcaggcgagtatgtgtgtcgtgcagccngcggcccaggccctgagcaagaagcctccttcacagtcaccgtcccgcccagtgaggggtcttcctaccgccttaggagcccggtcatctccatcgacccgcccagcagcaccgtgcagcagggccaggatgccagcttcaagtgcctcatccatgacggggcagcccccatcagcctcgagtggaagacccggaaccaggagctggaggacaacgtccacatcagtcccaatggctccatcatcaccatcgtgggcacccggcccagcaaccacggtacctaccgctgcgtggcctccaatgcctacggtgtggcccagagtgtggtgaacctcagtgtgcacgggccccctacagtgtccgtgctccccgagggccccgtgtgggtgaaagtgggaaaggctgtcaccctggagtgtgtcagtgccggggagccccgctcctctgctcgttggacccggatcagcagcacccctgccaagttggagcagcggacatatgggctcatggacagccacgcggtgctgcagatttcatcagctaaaccatcagatgcgggcacttatgtgtgccttgctcagaatgcactaggcacagcacagaagcaggtggaggtgatcgtggacacgggcgccatggccccaggggcccctcaggtccaagctgaagaagctgagctgactgtggaggctggacacacggccaccttgcgctgctcagccacaggcagccccgcgcccaccatccactggtccaagctgcgttccccactgccctggcagcaccggctggaaggtgacacactcatcataccccgggtagcccagcaggactcgggccagtacatctgcaatgccactagccctgctgggcacgctgaggccaccatcatcctgcacgtggagagcccaccatatgccaccacggtcccagagcacgcttcggtgcaggcaggggagacggtgcagctccagtgcctggctcacgggacacccccactcaccttccagtggagccgcgtgggcagcagccttcctgggagggcgaccgccaggaacgagctgctgcactttgagcgtgcagcccctgaggactcaggccgctaccgctgccgggtcaccaacaaggtgggctcagccgaggcctttgcccagctgctcgtccaaggccctcccggctctctccctgccacctccatcccagcagggtccacgcccaccgtgcaggtcacgcctcagctagagaccaagagcattggggccagcgttgagttccactgtgctgtgcccagcgaccggggtacccagctccgttggttcaaggaagggggtcagctgcctccgggtcacagcgtgcaggatggggtgctccgaatccagaacttggaccagagctgccaagggacgtatatatgccaggcccatggaccttgggggaaggcccaggccagtgcccagctggttatccaagccctgccctcggtgctcatcaacatccggacctctgtgcagaccgtggtggttggccacgccgtggagttcgaatgcctggcactgggtgaccccaagcctcaggtgacatggagcaaagttggagggcacctgcggccaggcattgtgcagagcggaggtgtcgtcaggatcgcccacgtagagctggctgatgcgggacagtatcgctgcactgccaccaacgcagctggcaccacacaatcccacgtcctgctgcttgtgcaagccttgccccagatctcaatgccccaagaagtccgtgtgcctgctggttctgcagctgtcttcccctgcatagcctcaggctaccccactcctgacatcagctggagcaagctggatggcagcctgccacctgacagccgcctggagaacaacatgctgatgctgccctcagtccgaccccaggacgcaggtacctacgtctgcaccgccactaaccgccagggcaaggtcaaagcctttgcccacctgcaggtgccagagcgggtggtgccctacttcacgcagaccccctactccttcctaccgctgcccaccatcaaggatgcctacaggaagttcgagatcaagatcaccttccggcccgactcagccgatgggatgctgctgtacaatgggcagaagcgagtcccagggagccccaccaacctggccaaccggcagcccgacttcatctccttcggcctcgtggggggaaggcccgagttccggttcgatgcaggctcaggcatggccaccatccgccatcccacaccactggccctgggccatttccacaccgtgaccctgctgcgcagcctcacccagggctccctgattgtgggtgacctggccccggtcaatgggacctcccagggcaagttccagggcctggatctgaacgaggaactctacctgggtggctatcctgactatggtgccatccccaaggcggggctgagcagcggcttcataggctgtgtccgggagctgcgcatccagggcgaggagatcgtcttccatgacctcaacctcacggcgcacggcatctcccactgccccacctgtcgggaccggccctgccagaatggcggtcagtgccatgactctgagagcagcagctacgtgtgcgtctgcccagctggcttcaccgggagccgctgtgagcactcgcaggccctgcactgccatccagaggcctgtgggcccgacgccacctgtgtgaaccggcctgacggtcgaggctacacctgccgctgccacctgggccgctcggggttgcggtgtgaggaaggtgtgacagtgaccaccccctcgctgtcgggtgctggctcctacctggcactgcccgccctcaccaacacacaccacgagctacgcctggacgtggagttcaagccactcgcccctgacggggtcctgctgttcagcggggggaagagcgggcctgtggaggacttcgtgtccctggcgatggtgggcggccacctggagttccgctatgagttggggtcagggctggccgttctgcggagcgccgagccgctggccctgggccgctggcaccgtgtgtctgcagagcgtctcaacaaggacggcagcctgcgggtgaatggtggacgccctgtgctgcgctcctcgcccggcaagagccagggcctcaacctgcacaccctgctctacctggggggtgtggagccttccgtgccactgtccccggccaccaacatgagcgctcacttccgcggctgtgtgggcgaggtgtcagtgaatggcaaacggctggacctcacctacagtttcctaggcagccagggcatcgggcaatgctatgatagctccccatgtgagcgccagccttgccaacatggtgccacgtgcatgcccgctggcgagtatgagttccagtgcctgtgtcgagatggattcaaaggagacctgtgtgagcacgaggagaacccctgccagctccgtgaaccctgtctgcatgggggcacctgccagggcacccgctgcctctgcctccctggcttctctggcccacgctgccaacaaggctctggacatggcatagcagagtccgactggcatcttgaaggcagcgggggcaatgatgcccctgggcagtacggagcctatttccacgatgatggcttcctcgccttccctggccatgtcttctccaggagcctgcccgaggtgcccgagaccatcgagctggaggttcggaccagcacagccagtggcctcctgctctggcagggtgtggaggtgggagaggccggccaaggcaaggacttcatcagcctcgggcttcaagacgggcaccttgtcttcaggtaccagctgggtagtggggaggcccgcctggtctctgaggaccccatcaatgacggcgagtggcaccgggtgacagcactgcgggagggccgcagaggttccatccaagtcgacggtgaggagctggtcagcggccggtccccaggtcccaacgtggcagtcaacgccaagggcagcgtctacatcggcggagcccctgacgtggccacgctgaccgggggcagattctcctcgggcatcacaggctgtgtcaagaacctggtgctgcactcggcccgacccggcgccccgcccccacagcccctggacctgcagcaccgcgcccaggccggggccaacacacgcccctgcccctcgtaggcacctgcctgccccacacggactcccgggccacgccccagcccgacaatgtcgagtatattattattaatattattatgaatttttgtaagaaaccgaggcgatgccacgctttgctgctaccgccctgggctggactggaggtgggcatgccaccctcacacacacagctgggcaaagccacaaggctggccagcaaggcaggttggatgggagtgggcacctcagaaagtcaccaggacttggggtcaggaacagtggctgggtgggcccagaactgcccccactgtccccctacccaccgatggagcccccagatagagctgggtggcctgtttctgcagcccttgggcagttctcactcctaggagagccaacctcggcttgtgggctggtgccccacagctacctgagacgggcatcgcaggagtctctgccacccactcaggattgggaattgtctttagtgccggctgtggagcaaaaggcagctcacccccacatccccacccatctggaagtgaaggcccagggactcctccaacagacaacggacggacggatgccgctggtgctcaggaagagctagtgccttaggtgggggaaggcaggactcacgactgagagagagaggagggggatatgaccaccctgccccatctgcaggagcctgaagatccagctcaagtgccatcctgccagtggcccccagactgtggggttgggacgcctggcctctgtgtcctagaagggaccctcctgtggtctttgtcttgatttttcttaataaacggtgctatccccgcca

SEQ ID NO: 367538 - DNA, 1992 bp, Homo sapiens
  misc_feature (43)..(43): n is a, c, g, or t
  misc_feature (45)..(46): n is a, c, g, or t
aactcacacccatcaaccctcaataagctaggtacgagctggntnnaatcggccgaggctccccatgtgagcgccagccttgccaacatggtgccacgtgcatgcccgctggcgagtatgagttccagtgcctgtgtcgagatggattcaaaggagacctgtgtgagcacgaggagaacccctgccagctccgtgaaccctgtctgcatgggggcacctgccagggcacccgctgcctctgcctccctggcttctctggcccacgctgccaacaaggctctggacatggcatagcagagtccgactggcatcttgaaggcagcgggggcaatgatgcccctgggcagtacggagcctatttccacgatgatggcttcctcgccttccctggccatgtcttctccaggagcctgcccgaggtgcccgagaccatcgagctggaggttcggaccagcacagccagtggcctcctgctctggcagggtgtggaggtgggagaggccggccaaggcaaggacttcatcagcctcgggcttcaagacgggcaccttgtcttcaggtaccagctgggtagtggggaggcccgcctggtctctgaggaccccatcaatgacggcgagtggcaccgggtgacagcactgcgggagggccgcagaggttccatccaagtcgacggtgaggagctggtcagcggccggtccccaggtcccaacgtggcagtcaacgccaagggcagcgtctacatcggcggagcccctgacgtggccacgctgaccgggggcagattctcctcgggcatcacaggctgtgtcaagaacctggtgctgcactcggcccgacccggcgccccgcccccacagcccctggacctgcagcaccgcgcccaggccggggccaacacacgcccctgcccctcgtaggcacctgcctgccccacacggactcccgggccacgccccagcccgacaatgtcgagtatattattattaatattattatgaatttttgtaagaaaccgaggcgatgccacgctttgctgctaccgccctgggctggactggaggtgggcatgccaccctcacacacacagctgggcaaagccacaaggctggccagcaaggcaggttggatgggagtgggcacctcagaaagtcaccaggacttggggtcaggaacagtggctgggtgggcccagaactgcccccactgtccccctacccaccgatggagcccccagatagagctgggtggcctgtttctgcagcccttgggcagttctcactcctaggagagccaacctcggcttgtgggctggtgccccacagctacctgagacgggcatcgcaggagtctctgccacccactcaggattgggaattgtctttagtgccggctgtggagcaaaaggcagctcacccctgggcaggcggtccccatccccaccagctcgtttttcagcacccccacccacctccacccagcccctggcacctcctctggcagactccccctcctaccacgtcctcctggcctgcattcccaccccctcctgccagcacacagcctggggtccctccctcaggggctgtaagggaaggcccaccccaactcttaccaggagctgctacaggcagagcccagcactgatagggccccgcccaccgggccccgcccaccccaggccacatccccacccatctggaagtgaaggcccagggactcctccaacagacaacggacggacggatgccgctggtgctcaggaagagctagtgccttaggtgggggaaggcaggactcacgactgagagagagaggagggggatatgaccaccctgccccatctgcaggagcctgaagatccagctcaagtgccatcctgccagtggcccccagactgtggggttgggacgcctggcctctgtgtcctagaagggaccctcctgtggtctttgtcttgatttttcttaataaacggtgctatccccgcca

SEQ ID NO: 367539 - DNA, 13756 bp, Homo sapiens
  misc_feature (1383)..(1383): n is a, c, g, or t
  misc_feature (1392)..(1392): n is a, c, g, or t
  misc_feature (5192)..(5194): n is a, c, g, or t
  misc_feature (9022)..(9022): n is a, c, g, or t
  misc_feature (9066)..(9066): n is a, c, g, or t
ggccggcgagcgggcggctgcgggcggcgcggagcgggcggcgcggagcgagcgagcgagagagcggcgcgggccgggccatggggtggcgggcgccgggcgcgctgctgctggcgctgctgctgcacgggcggctgctggcggtgacccatgggctgagggcatacgatggcttgtctctgcctgaggacatagagaccgtcacagcaagccaaatgcgctggacacattcgtacctttctgatgatgaggacatgctggctgacagcatctcaggagacgacctgggcagtggggacctgggcagcggggacttccagatggtttatttccgagccctggtgaatttcactcgctccatcgagtacagccctcagctggaggatgcaggctccagagagtttcgagaggtgtccgaggctgtggtagacacgctggagtcggagtacttgaaaattcccggagaccaggttgtcagtgtggtgttcatcaaggagctggatggctgggtttttgtggagctcgatgtgggctcggaagggaatgcggatggtgctcagattcaggagatgctgctcagggtcatctccagcggctctgtggcctcctacgtcacctctccccagggattccagttccgacgcctgggcacagtgccccagttcccaagagcctgcacggaggccgagtttgcctgccacagctacaatgagtgtgtggccctggagtatcgctgtgaccggcggcccgactgcagggacatgtctgatgagctcaattgtgaggagccagtcctgggtatcagccccacattctctctccttgtggagacgacatctttaccgccccggccagagacaaccatcatgcgacagccaccagtcacccacgctcctcagcccctgcttcccggttccgtcaggcccctgccctgtgggccccaggaggccgcatgccgcaatgggcactgcatccccagagactacctctgcgacggacaggaggactgcgaggacggcagcgatgagctagactgtggccccccgccaccctgtgagcccaacgagttcccctgcgggaatggacattgtgccctcaagctgtggcgctgcgatggtgactttgactgtgaggaccgaactgatgaagccaactgccccaccaagcgtcctgaggaagtgtgcgggcccacacagttccgatgcgtctctaccaacatgtgcatcccagccagcttccactgtgacgaggagagcgactgtcctgaccggagcgacgagtttggctgcatgcccccccaggtggtgacacctccccgggagtccatccaggcttcccggggccagacagtgaccttcacctgcgtggccattggcgtccccnccccctttntcatcaattggaggctcaactggggccacatcccctctcatcccagggtgacagtgaccagcgagggtggccgtggcacactgatcatccgtgatgtgaaggagtcagaccagggtgcctacacctgtgaggccatgaacgcccggggcatggtgtttggcattcctgacggtgtccttgagctcgtcccacaacgaggcccctgccctgacggccacttctacctggagcacagcgccgcctgcctgccctgcttctgctttggcatcaccagcgtgtgccagagcacccgccgcttccgggaccagatcaggctgcgctttgaccaacccgatgacttcaagggtgtgaatgtgacaatgcctgcgcagcccggcacgccacccctctcctccacgcagctgcagatcgacccatccctgcacgagttccagctagtcgacctgtcccgccgcttcctcgtccacgactccttctgggctctgcctgaacagttcctgggcaacaaggtggactcctatggcggctccctgcgttacaacgtgcgctacgagttggcccgtggcatgctggagccagtgcagcggccggacgtggtcctcgtgggtgccgggtaccgcctcctctcccgaggccacacacccacccaacctggtgctctgaaccagcgccaggtccagttctctgaggagcactgggtccatgagtctggccggccggtgcagcgcgcggagctgctgcaggtgctgcagagcctggaggccgtgctcatccagaccgtgtacaacaccaagatggctagcgtgggacttagcgacatcgccatggataccaccgtcacccatgccaccagccatggccgtgcccacagtgtggaggagtgcagatgccccattggctattctggcttgtcctgcgagagctgtgatgcccacttcactcgggtgcctggtgggccctacctgggcacctgctctggttgcagttgcaatggccatgccagctcctgtgaccctgtgtatggccactgcctgaattgccagcacaacacggaggggccacagtgcaacaagtgcaaggctggcttctttggggacgccatgaaggccacggccacttcctgccggccctgcccttgcccatacatcgatgcctcccgcagattctcagacacttgcttcctggacacggatggccaagccacatgtgacgcctgtgccccaggctacactggccgccgctgtgagagctgtgcccccggatacgagggcaaccccatccagcccggcgggaagtgcaggcccgtcaaccaggagattgtgcgctgtgacgagcgtggcagcatggggacctccggggaggcctgccgctgtaagaacaatgtggtggggcgcttgtgcaatgaatgtgctgacggctctttccacctgagtacccgaaaccccgatggctgcctcaagtgcttctgcatgggtgtcagtcgccactgcaccagctcttcatggagccgtgcccagttgcatggggcctctgaggagcctggtcacttcagcctgaccaacgccgcaagcacccacaccaccaacgagggcatcttctcccccacgcccggggaactgggattctcctccttccacagactcttatctggaccctacttctggagcctcccttcacgcttcctgggggacaaggtgacctcctatggaggagagctgcgcttcacagtgacccagaggtcccagccgggctccacacccctgcacgggcagccgttggtggtgctgcaaggtaacaacatcatcctagagcaccatgtggcccaggagcccagccccggccagcccagcaccttcattgtgcctttccgggagcaagcatggcagcggcccgatgggcagccagccacacgggagcacctgctgatggcactggcaggcatcgacaccctcctgatccgagcatcctacgcccagcagcccgctgagagcagggtctctggcatcagcatggacgtggctgtgcccgaggaaaccggccaggaccccgcgctggaagtggaacagtgctcctgcccacccgggtaccgtgggccgtcctgccaggactgtgacacaggctacacacgcacgcccagtggcctctacctgggtacctgtgaacgctgcagctgccatggccactcagaggcctgcgagccagaaacaggtgcctgccagggctgccagcatcacacggagggccctcggtgtgagcagtgccagccaggatactacggggacgcccagcgggggacaccacaggactgccagctgtgcccctgctacggagaccctgctgccggccaggctgcccacacttgttttctggacacagacggccaccccacctgtgatgcgtgctccccaggccacagtgggcgtcactgtgagaggtgcgcccctggctactatggcaaccccagccagggccagccatgccagagagacagccaggtgccagggcccataggctgcaactgtgacccccaaggcagcgtcagcagccagtgtgatgctgctggtcagtgccagtgcaaggcccaggtggaaggcctcacttgcagccactgccggccccaccacttccacctgagtgccagcaacccagacggctgcctgccctgcttctgtatgggcatcacccagcagtgcgccagctctgcctacacacgccacctgatctccacccactttgcccctggggacttccaaggctttgccctggtgaacccacagcgaaacagccgcctgacaggagaattcactgtggaacccgtgcccgagggtgcccagctctcttttggcaactttgcccaactcggccatgagtccttctactggcagctgccggagacataccagggagacaaggtggcggcctacggtgggaagttgcgatacaccctctcctacacagcaggcccacagggcagcccactctctgaccccgatgtgcagatcacgggcaacaacatcatgctagtggcctcccagccagcgctgcagggccctgagaggaggagctacgagatcatgttccgagaggaattctggcgccggcccgatgggcagccggccacacgcgagcacctcctgatggcactggccgacctggatgagctcctgatccgggccacgttctcctccgtgccgctggtggccagcatcagcgcagtcagcctggaggtcgcccagccggggccctcaaacagaccccgcgccctcgaggtggaggagtgccgctgcccgccaggctacatcggtctgtcctgccaggactgtgcccccggctacacgcgcaccgggagtgggctctacctcggccactgcgagctatgtgaatgcaatggccactcagacctgtgccacccagagactggggcctgctcgcaatgccagcacaacgccgcaggggagttctgcgagctttgtgcccctggctactacggagatgccacagccgggacgcctgaggactgccagccctgtgcctgcccactgaccaacccagagaacatgttttcccgcacctgtgagagcctgggagccggcgggtaccgctgcacggcctgcgaacccggctacactggccagtactgtgagcagtgtggcccaggttacgtgggtaaccccagtgtgcaagggggccagtgcctgccagagacaaaccaagccccactggtggtcgaggtccatcctgctcgaagcatagtgccccaaggtggctcccactccctgcggtgtcaggtcagtgggagnnnaccccactacttctattggtcccgtgaggatgggcggcctgtgcccagcggcacccagcagcgacatcaaggctccgagctccacttccccagcgtccagccctcggatgctggggtctacatttgcacctgccgtaatctccaccaatccaataccagccgggcagagctgctggtcactgaggctccaagcaagcccatcacagtgactgtggaggagcagcggagccagagcgtgcgccccggagctgacgtcaccttcatctgcacagccaaaagcaagtccccagcctataccctggtgtggacccgcctgcacaacgggaaactgcccacccgagccatggatttcaatggcatcctgaccattcgcaacgtccagctgagtgatgcaggcacctacgtgtgcaccggctccaacatgtttgccatggaccagggcacagccactctacatgtgcaggcctcgggcaccttgtccgcccccgtggtctccatccatccgccacagctcacagtgcagcccgggcaactggcggagttccgctgcagcgccacagggagccccacgcccaccctcgagtggacagggggccccggcggccagctccctgcgaaggcacaaatccacggcggcatcctgcgcctgccagctgtcgagcccacggatcaggcccagtacttgtgccgagcccacagcagcgctgggcagcaggtggccagggctgtgctccacgtgcatgggggcggtgggcccagagtccaagtgagcccagagaggacccaggtccacgcaggccgcaccgtcaggctgtactgcagggctgcaggcgtgcctagcgccaccatcacctggaggaaggaagggggcagcctcccaccacaggcccggtcagagcgcacagacatcgcgacactgctcatcccagccatcacgactgctgacgccggcttctacctctgcgtggccaccagccctgcaggcactgcccaggcccggatccaagtggttgtcctttcagcctcagatgccagcccaccgccggtcaagattgagtcctcatcgccttctgtgacagaagggcaaacactcgacctcaactgtgtggtggcagggtcagcccatgcccaggtcacctggtacaggcgagggggtagcctgcctccccacacccaggtgcacggctcccgtctgcggctcccccaggtctcaccagctgattctggagaatatgtgtgccgtgtggagaatggatcgggccccaaggaggcctccattactgtgtctgtgctccacggcacccattctggccccagctacaccccagtgcccggcagcacccggcccatccgcatcgagccctcctcctcacacgtggcggaagggcagaccctggatctgaactgcgtggtgcccgggcaggcccacgcccaggtcacgtggcacaagcgtgggggcagcctccctgcccggcaccagacccacggctcgctgctgcggctgcaccaggtgaccccggccgactcaggcgagtatgtgtgccatgtggtgggcacctccggccccctagaggcctcagtcctggtcaccatcgaagcctctgtcatccctggacccatcccacctgtcaggatcgagtcttcatcctccacagtggccgagggccagaccctggatctgagctgcgtggtggcagggcaggcccacgcccaggtcacatggtacaagcgtgggggcagcctccctgcccggcaccaggttcgtggctcccgcctgtacatcttccaggcctcacctgccgatgcgggacagtacgtctgccgggccagcaacggcatggaggcctccatcacggtcacagtaactgggacccagggggccaacttagcctaccctgccggcagcacccagcccatccgcatcgagccctcctcctcgcaagtggcggaagggcagaccctggatctgaactgcgtggtgcccgggcagtcccatgcccaggtcacgtggcacaagcgtgggggcagcctccctgtccggcaccagacccacggctccctgctgagactctaccaagcgtcccccgccgactcgggcgagtacgtgtgccgagtgttgggcagctccgtgcctctagaggcctctgtcctggtcaccattgagcctgcgggctcagtgcctgcacttggggtcacccccacggtccggatcgagtcatcgtcttcgcaagtggccgaggggcagaccctggacctgaactgcctcgttgctggtcaggcccatgcccaggtcacgtggcacaagcgcgggggcagcctcccggcccggcaccaggtgcatggctcgaggctacgcctgctccaggtgaccccagctgattcaggggagtacgtgtgccgtgtggtcggcagctcaggtacccaggaagcctcagtccttgtcaccatccagcagcgccttagtggctcccactcccagggtgtggcgtaccccgtccgcatcgagtcctcctcagcctccctggccaatggacacaccctggacctcaactgcctggttgccagccaggctccccacaccatcacctggtataagcgtggaggcagcttacccagccggcaccagatcgtgggctcccggctgcggatccctcaggtgactccggcagactcgggcgagtacgtgtgtcacgtcagtaacggtgcaggctcccgggagacctcgctcatcgtcaccatccagggcagcggttcctcccacgtgcccagcgtctccccaccgatcaggatcgagtcgtcttcccccacggtggtggaagggcagaccttggatctgaactgcgtggtcgccaggcagccccaggctatcatcacatggtacaagcgtgggggcagccttccctcccgacaccagacccatggctcccacctgcggttgcaccaaatgtctgtggctgactcgggcgagtatgtgtgccgggccaacaacaacatcgatgccctggaggcctccatcgtcatctccgtctcccctagcgccggcagcccctccgcccctggcagctccatgcccatcagaattgagtcatcctcctcacacgtggccgaaggggagaccctggatctgaactgcgtggtccccgggcaggcccatgcccaggtcacttggcacaagcgtgggggcagcctccccagtcaccatcagacccgcggctcacggctgcggctgcaccatgtgtccccggccgactcgggtgaatacgtgtgccgggtgatgggcagctctggccccctggaggcctcagtcctggtcaccatcgaagcctctggctcaagtgctgtccacgtccccgccccaggtggagccccacccatccgcatcgagccctcctcctcccgagtggcagaagggcagaccctggatctgaagtgcgtggtgcccgggcaggcccacgcccaggtcacgtggcacaagcgtggaggaaacctccctgcccggcaccaggtccacggcccactgctgaggctgaaccaggtgtccccggctgactctggcgagtactcgtgccaagtgaccggaagctcaggcaccctggaggcatctgtcctggtcacaattgagccctccagcccaggacccattcctgctccaggactggcccagcccatctacatcgaggcctcctcttcacacgtgactgaagggcagactctggatctgaactgtgtggtgcccgggcaggcccatgcccaggtcacgtggtacaagcgcgggggcagcctccccgcccggcaccagacccatggctcccagctgcggctccaccncgtctcccctgccgactcaggcgagtatgtgtgtcgtgcagccngcggcccaggccctgagcaagaagcctccttcacagtcaccgtcccgcccagtgaggggtcttcctaccgccttaggagcccggtcatctccatcgacccgcccagcagcaccgtgcagcagggccaggatgccagcttcaagtgcctcatccatgacggggcagcccccatcagcctcgagtggaagacccggaaccaggagctggaggacaacgtccacatcagtcccaatggctccatcatcaccatcgtgggcacccggcccagcaaccacggtacctaccgctgcgtggcctccaatgcctacggtgtggcccagagtgtggtgaacctcagtgtgcacgggccccctacagtgtccgtgctccccgagggccccgtgtgggtgaaagtgggaaaggctgtcaccctggagtgtgtcagtgccggggagccccgctcctctgctcgttggacccggatcagcagcacccctgccaagttggagcagcggacatatgggctcatggacagccacgcggtgctgcagatttcatcagctaaaccatcagatgcgggcacttatgtgtgccttgctcagaatgcactaggcacagcacagaagcaggtggaggtgatcgtggacacgggcgccatggccccaggggcccctcaggtccaagctgaagaagctgagctgactgtggaggctggacacacggccaccttgcgctgctcagccacaggcagccccgcgcccaccatccactggtccaagctgcgttccccactgccctggcagcaccggctggaaggtgacacactcatcataccccgggtagcccagcaggactcgggccagtacatctgcaatgccactagccctgctgggcacgctgaggccaccatcatcctgcacgtggagagcccaccatatgccaccacggtcccagagcacgcttcggtgcaggcaggggagacggtgcagctccagtgcctggctcacgggacacccccactcaccttccagtggagccgcgtgggcagcagccttcctgggagggcgaccgccaggaacgagctgctgcactttgagcgtgcagcccctgaggactcaggccgctaccgctgccgggtcaccaacaaggtgggctcagccgaggcctttgcccagctgctcgtccaaggccctcccggctctctccctgccacctccatcccagcagggtccacgcccaccgtgcaggtcacgcctcagctagagaccaagagcattggggccagcgttgagttccactgtgctgtgcccagcgaccggggtacccagctccgttggttcaaggaagggggtcagctgcctccgggtcacagcgtgcaggatggggtgctccgaatccagaacttggaccagagctgccaagggacgtatatatgccaggcccatggaccttgggggaaggcccaggccagtgcccagctggttatccaagccctgccctcggtgctcatcaacatccggacctctgtgcagaccgtggtggttggccacgccgtggagttcgaatgcctggcactgggtgaccccaagcctcaggtgacatggagcaaagttggagggcacctgcggccaggcattgtgcagagcggaggtgtcgtcaggatcgcccacgtagagctggctgatgcgggacagtatcgctgcactgccaccaacgcagctggcaccacacaatcccacgtcctgctgcttgtgcaagccttgccccagatctcaatgccccaagaagtccgtgtgcctgctggttctgcagctgtcttcccctgcatagcctcaggctaccccactcctgacatcagctggagcaagctggatggcagcctgccacctgacagccgcctggagaacaacatgctgatgctgccctcagtccgaccccaggacgcaggtacctacgtctgcaccgccactaaccgccagggcaaggtcaaagcctttgcccacctgcaggtgccagagcgggtggtgccctacttcacgcagaccccctactccttcctaccgctgcccaccatcaaggatgcctacaggaagttcgagatcaagatcaccttccggcccgactcagccgatgggatgctgctgtacaatgggcagaagcgagtcccagggagccccaccaacctggccaaccggcagcccgacttcatctccttcggcctcgtggggggaaggcccgagttccggttcgatgcaggctcaggcatggccaccatccgccatcccacaccactggccctgggccatttccacaccgtgaccctgctgcgcagcctcacccagggctccctgattgtgggtgacctggccccggtcaatgggacctcccagggcaagttccagggcctggatctgaacgaggaactctacctgggtggctatcctgactatggtgccatccccaaggcggggctgagcagcggcttcataggctgtgtccgggagctgcgcatccagggcgaggagatcgtcttccatgacctcaacctcacggcgcacggcatctcccactgccccacctgtcgggaccggccctgccagaatggcggtcagtgccatgactctgagagcagcagctacgtgtgcgtctgcccagctggcttcaccgggagccgctgtgagcactcgcaggccctgcactgccatccagaggcctgtgggcccgacgccacctgtgtgaaccggcctgacggtcgaggctacacctgccgctgccacctgggccgctcggggttgcggtgtgaggaaggtgtgacagtgaccaccccctcgctgtcgggtgctggctcctacctggcactgcccgccctcaccaacacacaccacgagctacgcctggacgtggagttcaagccactcgcccctgacggggtcctgctgttcagcggggggaagagcgggcctgtggaggacttcgtgtccctggcgatggtgggcggccacctggagttccgctatgagttggggtcagggctggccgttctgcggagcgccgagccgctggccctgggccgctggcaccgtgtgtctgcagagcgtctcaacaaggacggcagcctgcgggtgaatggtggacgccctgtgctgcgctcctcgcccggcaagagccagggcctcaacctgcacaccctgctctacctggggggtgtggagccttccgtgccactgtccccggccaccaacatgagcgctcacttccgcggctgtgtgggcgaggtgtcagtgaatggcaaacggctggacctcacctacagtttcctaggcagccagggcatcgggcaatgctatgatagctccccatgtgagcgccagccttgccaacatggtgccacgtgcatgcccgctggcgagtatgagttccagtgcctgtgtcgagatggattcaaaggagacctgtgtgagcacgaggagaacccctgccagctccgtgaaccctgtctgcatgggggcacctgccagggcacccgctgcctctgcctccctggcttctctggcccacgctgccaacaaggctctggacatggcatagcagagtccgactggcatcttgaaggcagcgggggcaatgatgcccctgggcagtacggagcctatttccacgatgatggcttcctcgccttccctggccatgtcttctccaggagcctgcccgaggtgcccgagaccatcgagctggaggttcggaccagcacagccagtggcctcctgctctggcagggtgtggaggtgggagaggccggccaaggcaaggacttcatcagcctcgggcttcaagacgggcaccttgtcttcaggtaccagctgggtagtggggaggcccgcctggtctctgaggaccccatcaatgacggcgagtggcaccgggtgacagcactgcgggagggccgcagaggttccatccaagtcgacggtgaggagctggtcagcggccggtccccaggtcccaacgtggcagtcaacgccaagggcagcgtctacatcggcggagcccctgacgtggccacgctgaccgggggcagattctcctcgggcatcacaggctgtgtcaagaacctggtgctgcactcggcccgacccggcgccccgcccccacagcccctggacctgcagcaccgcgcccaggccggggccaacacacgcccctgcccctcgtaggcacctgcctgccccacacggactcccgggccacgccccagcccgacaatgtcgagtatattattattaatattattatgaatttttgtaagaaaccgaggcgatgccacgctttgctgctaccgccctgggctggactggaggtgggcatgccaccctcacacacacagctgggcaaagccacaaggcacatccccacccatctggaagtgaaggcccagggactcctccaacagacaacggacggacggatgccgctggtgctcaggaagagctagtgccttaggtgggggaaggcaggactcacgactgagagagagaggagggggatatgaccaccctgccccatctgcaggagcctgaagatccagctcaagtgccatcctgccagtggcccccagactgtggggttgggacgcctggcctctgtgtcctagaagggaccctcctgtggtctttgtcttgatttttcttaataaacggtgctatccccgcca

SEQ ID NO: 367540 - DNA, 1775 bp, Homo sapiens
  misc_feature (26)..(26): n is a, c, g, or t
ttaggtagaggccggtgttaatcggncgaggctggttctctggccacgctgccaacaaggctctggacatggcatagcagagtccgactggcatcttgaaggcagcgggggcaatgatgcccctgggcagtacggagcctatttccacgatgatggcttcctcgccttccctggccatgtcttctccaggagcctgcccgaggtgcccgagaccatcgagctggaggttcggaccagcacagccagtggcctcctgctctggcagggtgtggaggtgggagaggccggccaaggcaaggacttcatcagcctcgggcttcaagacgggcaccttgtcttcaggtaccagctgggtagtggggaggcccgcctggtctctgaggaccccatcaatgacggcgagtggcaccgggtgacagcactgcgggagggccgcagaggttccatccaagtcgacggtgaggagctggtcagcggccggtccccaggtcccaacgtggcagtcaacgccaagggcagcgtctacatcggcggagcccctgacgtggccacgctgaccgggggcagattctcctcgggcatcacaggctgtgtcaagaacctggtgctgcactcggcccgacccggcgccccgcccccacagcccctggacctgcagcaccgcgcccaggccggggccaacacacgcccctgcccctcgtaggcacctgcctgccccacacggactcccgggccacgccccagcccgacaatgtcgagtatattattattaatattattatgaatttttgtaagaaaccgaggcgatgccacgctttgctgctaccgccctgggctggactggaggtgggcatgccaccctcacacacacagctgggcaaagccacaaggctggccagcaaggcaggttggatgggagtgggcacctcagaaagtcaccaggacttggggtcaggaacagtggctgggtgggcccagaactgcccccactgtccccctacccaccgatggagcccccagatagagctgggtggcctgtttctgcagcccttgggcagttctcactcctaggagagccaacctcggcttgtgggctggtgccccacagctacctgagacgggcatcgcaggagtctctgccacccactcaggattgggaattgtctttagtgccggctgtggagcaaaaggcagctcacccctgggcaggcggtccccatccccaccagctcgtttttcagcacccccacccacctccacccagcccctggcacctcctctggcagactccccctcctaccacgtcctcctggcctgcattcccaccccctcctgccagcacacagcctggggtccctccctcaggggctgtaagggaaggcccaccccaactcttaccaggagctgctacaggcagagcccagcactgatagggccccgcccaccgggccccgcccaccccaggccacatccccacccatctggaagtgaaggcccagggactcctccaacagacaacggacggacggatgccgctggtgctcaggaagagctagtgccttaggtgggggaaggcaggactcacgactgagagagagaggagggggatatgaccaccctgccccatctgcaggagcctgaagatccagctcaagtgccatcctgccagtggcccccagactgtggggttgggacgcctggcctctgtgtcctagaagggaccctcctgtggtctttgtcttgatttttcttaataaacggtgctatccccgcca

SEQ ID NO: 367541 - DNA, 1695 bp, Homo sapiens
cccagctaggcagactcgggtgggaaggcctccctccataaccccacctggaatgccctcatctcccctactctccagggcccgaggcaggcttgccacctccaggaagccctccatcatgtgtgctcagctcctctagctctcacggctgctccccacctttggcacagccctggcactgccaaaggaaaccattctgtgtacataagcaccccagcctgcctcccctgccaggcagtgagaatgctcagggcagggcctggacccaggcatctcagcagccctgggcttaattgagggcaacaaggcccaggatgggctgggtaaatgcttgacagggacaacaggagggccgcagaggttccatccaagtcgacggtgaggagctggtcagcggccggtccccaggtcccaacgtggcagtcaacgccaagggcagcgtctacatcggcggagcccctgacgtggccacgctgaccgggggcagattctcctcgggcatcacaggctgtgtcaagaacctggtgctgcactcggcccgacccggcgccccgcccccacagcccctggacctgcagcaccgcgcccaggccggggccaacacacgcccctgcccctcgtaggcacctgcctgccccacacggactcccgggccacgccccagcccgacaatgtcgagtatattattattaatattattatgaatttttgtaagaaaccgaggcgatgccacgctttgctgctaccgccctgggctggactggaggtgggcatgccaccctcacacacacagctgggcaaagccacaaggctggccagcaaggcaggttggatgggagtgggcacctcagaaagtcaccaggacttggggtcaggaacagtggctgggtgggcccagaactgcccccactgtccccctacccaccgatggagcccccagatagagctgggtggcctgtttctgcagcccttgggcagttctcactcctaggagagccaacctcggcttgtgggctggtgccccacagctacctgagacgggcatcgcaggagtctctgccacccactcaggattgggaattgtctttagtgccggctgtggagcaaaaggcagctcacccctgggcaggcggtccccatccccaccagctcgtttttcagcacccccacccacctccacccagcccctggcacctcctctggcagactccccctcctaccacgtcctcctggcctgcattcccaccccctcctgccagcacacagcctggggtccctccctcaggggctgtaagggaaggcccaccccaactcttaccaggagctgctacaggcagagcccagcactgatagggccccgcccaccgggccccgcccaccccaggccacatccccacccatctggaagtgaaggcccagggactcctccaacagacaacggacggacggatgccgctggtgctcaggaagagctagtgccttaggtgggggaaggcaggactcacgactgagagagagaggagggggatatgaccaccctgccccatctgcaggagcctgaagatccagctcaagtgccatcctgccagtggcccccagactgtggggttgggacgcctggcctctgtgtcctagaagggaccctcctgtggtctttgtcttgatttttcttaataaacggtgctatccccgcca

SEQ ID NO: 367542 - DNA, 11338 bp, Homo sapiens
  misc_feature (1383)..(1383): n is a, c, g, or t
  misc_feature (1392)..(1392): n is a, c, g, or t
  misc_feature (5192)..(5194): n is a, c, g, or t
  misc_feature (9022)..(9022): n is a, c, g, or t
  misc_feature (9066)..(9066): n is a, c, g, or t
ggccggcgagcgggcggctgcgggcggcgcggagcgggcggcgcggagcgagcgagcgagagagcggcgcgggccgggccatggggtggcgggcgccgggcgcgctgctgctggcgctgctgctgcacgggcggctgctggcggtgacccatgggctgagggcatacgatggcttgtctctgcctgaggacatagagaccgtcacagcaagccaaatgcgctggacacattcgtacctttctgatgatgaggacatgctggctgacagcatctcaggagacgacctgggcagtggggacctgggcagcggggacttccagatggtttatttccgagccctggtgaatttcactcgctccatcgagtacagccctcagctggaggatgcaggctccagagagtttcgagaggtgtccgaggctgtggtagacacgctggagtcggagtacttgaaaattcccggagaccaggttgtcagtgtggtgttcatcaaggagctggatggctgggtttttgtggagctcgatgtgggctcggaagggaatgcggatggtgctcagattcaggagatgctgctcagggtcatctccagcggctctgtggcctcctacgtcacctctccccagggattccagttccgacgcctgggcacagtgccccagttcccaagagcctgcacggaggccgagtttgcctgccacagctacaatgagtgtgtggccctggagtatcgctgtgaccggcggcccgactgcagggacatgtctgatgagctcaattgtgaggagccagtcctgggtatcagccccacattctctctccttgtggagacgacatctttaccgccccggccagagacaaccatcatgcgacagccaccagtcacccacgctcctcagcccctgcttcccggttccgtcaggcccctgccctgtgggccccaggaggccgcatgccgcaatgggcactgcatccccagagactacctctgcgacggacaggaggactgcgaggacggcagcgatgagctagactgtggccccccgccaccctgtgagcccaacgagttcccctgcgggaatggacattgtgccctcaagctgtggcgctgcgatggtgactttgactgtgaggaccgaactgatgaagccaactgccccaccaagcgtcctgaggaagtgtgcgggcccacacagttccgatgcgtctctaccaacatgtgcatcccagccagcttccactgtgacgaggagagcgactgtcctgaccggagcgacgagtttggctgcatgcccccccaggtggtgacacctccccgggagtccatccaggcttcccggggccagacagtgaccttcacctgcgtggccattggcgtccccnccccctttntcatcaattggaggctcaactggggccacatcccctctcatcccagggtgacagtgaccagcgagggtggccgtggcacactgatcatccgtgatgtgaaggagtcagaccagggtgcctacacctgtgaggccatgaacgcccggggcatggtgtttggcattcctgacggtgtccttgagctcgtcccacaacgaggcccctgccctgacggccacttctacctggagcacagcgccgcctgcctgccctgcttctgctttggcatcaccagcgtgtgccagagcacccgccgcttccgggaccagatcaggctgcgctttgaccaacccgatgacttcaagggtgtgaatgtgacaatgcctgcgcagcccggcacgccacccctctcctccacgcagctgcagatcgacccatccctgcacgagttccagctagtcgacctgtcccgccgcttcctcgtccacgactccttctgggctctgcctgaacagttcctgggcaacaaggtggactcctatggcggctccctgcgttacaacgtgcgctacgagttggcccgtggcatgctggagccagtgcagcggccggacgtggtcctcgtgggtgccgggtaccgcctcctctcccgaggccacacacccacccaacctggtgctctgaaccagcgccaggtccagttctctgaggagcactgggtccatgagtctggccggccggtgcagcgcgcggagctgctgcaggtgctgcagagcctggaggccgtgctcatccagaccgtgtacaacaccaagatggctagcgtgggacttagcgacatcgccatggataccaccgtcacccatgccaccagccatggccgtgcccacagtgtggaggagtgcagatgccccattggctattctggcttgtcctgcgagagctgtgatgcccacttcactcgggtgcctggtgggccctacctgggcacctgctctggttgcagttgcaatggccatgccagctcctgtgaccctgtgtatggccactgcctgaattgccagcacaacacggaggggccacagtgcaacaagtgcaaggctggcttctttggggacgccatgaaggccacggccacttcctgccggccctgcccttgcccatacatcgatgcctcccgcagattctcagacacttgcttcctggacacggatggccaagccacatgtgacgcctgtgccccaggctacactggccgccgctgtgagagctgtgcccccggatacgagggcaaccccatccagcccggcgggaagtgcaggcccgtcaaccaggagattgtgcgctgtgacgagcgtggcagcatggggacctccggggaggcctgccgctgtaagaacaatgtggtggggcgcttgtgcaatgaatgtgctgacggctctttccacctgagtacccgaaaccccgatggctgcctcaagtgcttctgcatgggtgtcagtcgccactgcaccagctcttcatggagccgtgcccagttgcatggggcctctgaggagcctggtcacttcagcctgaccaacgccgcaagcacccacaccaccaacgagggcatcttctcccccacgcccggggaactgggattctcctccttccacagactcttatctggaccctacttctggagcctcccttcacgcttcctgggggacaaggtgacctcctatggaggagagctgcgcttcacagtgacccagaggtcccagccgggctccacacccctgcacgggcagccgttggtggtgctgcaaggtaacaacatcatcctagagcaccatgtggcccaggagcccagccccggccagcccagcaccttcattgtgcctttccgggagcaagcatggcagcggcccgatgggcagccagccacacgggagcacctgctgatggcactggcaggcatcgacaccctcctgatccgagcatcctacgcccagcagcccgctgagagcagggtctctggcatcagcatggacgtggctgtgcccgaggaaaccggccaggaccccgcgctggaagtggaacagtgctcctgcccacccgggtaccgtgggccgtcctgccaggactgtgacacaggctacacacgcacgcccagtggcctctacctgggtacctgtgaacgctgcagctgccatggccactcagaggcctgcgagccagaaacaggtgcctgccagggctgccagcatcacacggagggccctcggtgtgagcagtgccagccaggatactacggggacgcccagcgggggacaccacaggactgccagctgtgcccctgctacggagaccctgctgccggccaggctgcccacacttgttttctggacacagacggccaccccacctgtgatgcgtgctccccaggccacagtgggcgtcactgtgagaggtgcgcccctggctactatggcaaccccagccagggccagccatgccagagagacagccaggtgccagggcccataggctgcaactgtgacccccaaggcagcgtcagcagccagtgtgatgctgctggtcagtgccagtgcaaggcccaggtggaaggcctcacttgcagccactgccggccccaccacttccacctgagtgccagcaacccagacggctgcctgccctgcttctgtatgggcatcacccagcagtgcgccagctctgcctacacacgccacctgatctccacccactttgcccctggggacttccaaggctttgccctggtgaacccacagcgaaacagccgcctgacaggagaattcactgtggaacccgtgcccgagggtgcccagctctcttttggcaactttgcccaactcggccatgagtccttctactggcagctgccggagacataccagggagacaaggtggcggcctacggtgggaagttgcgatacaccctctcctacacagcaggcccacagggcagcccactctctgaccccgatgtgcagatcacgggcaacaacatcatgctagtggcctcccagccagcgctgcagggccctgagaggaggagctacgagatcatgttccgagaggaattctggcgccggcccgatgggcagccggccacacgcgagcacctcctgatggcactggccgacctggatgagctcctgatccgggccacgttctcctccgtgccgctggtggccagcatcagcgcagtcagcctggaggtcgcccagccggggccctcaaacagaccccgcgccctcgaggtggaggagtgccgctgcccgccaggctacatcggtctgtcctgccaggactgtgcccccggctacacgcgcaccgggagtgggctctacctcggccactgcgagctatgtgaatgcaatggccactcagacctgtgccacccagagactggggcctgctcgcaatgccagcacaacgccgcaggggagttctgcgagctttgtgcccctggctactacggagatgccacagccgggacgcctgaggactgccagccctgtgcctgcccactgaccaacccagagaacatgttttcccgcacctgtgagagcctgggagccggcgggtaccgctgcacggcctgcgaacccggctacactggccagtactgtgagcagtgtggcccaggttacgtgggtaaccccagtgtgcaagggggccagtgcctgccagagacaaaccaagccccactggtggtcgaggtccatcctgctcgaagcatagtgccccaaggtggctcccactccctgcggtgtcaggtcagtgggagnnnaccccactacttctattggtcccgtgaggatgggcggcctgtgcccagcggcacccagcagcgacatcaaggctccgagctccacttccccagcgtccagccctcggatgctggggtctacatttgcacctgccgtaatctccaccaatccaataccagccgggcagagctgctggtcactgaggctccaagcaagcccatcacagtgactgtggaggagcagcggagccagagcgtgcgccccggagctgacgtcaccttcatctgcacagccaaaagcaagtccccagcctataccctggtgtggacccgcctgcacaacgggaaactgcccacccgagccatggatttcaatggcatcctgaccattcgcaacgtccagctgagtgatgcaggcacctacgtgtgcaccggctccaacatgtttgccatggaccagggcacagccactctacatgtgcaggcctcgggcaccttgtccgcccccgtggtctccatccatccgccacagctcacagtgcagcccgggcaactggcggagttccgctgcagcgccacagggagccccacgcccaccctcgagtggacagggggccccggcggccagctccctgcgaaggcacaaatccacggcggcatcctgcgcctgccagctgtcgagcccacggatcaggcccagtacttgtgccgagcccacagcagcgctgggcagcaggtggccagggctgtgctccacgtgcatgggggcggtgggcccagagtccaagtgagcccagagaggacccaggtccacgcaggccgcaccgtcaggctgtactgcagggctgcaggcgtgcctagcgccaccatcacctggaggaaggaagggggcagcctcccaccacaggcccggtcagagcgcacagacatcgcgacactgctcatcccagccatcacgactgctgacgccggcttctacctctgcgtggccaccagccctgcaggcactgcccaggcccggatccaagtggttgtcctttcagcctcagatgccagcccaccgccggtcaagattgagtcctcatcgccttctgtgacagaagggcaaacactcgacctcaactgtgtggtggcagggtcagcccatgcccaggtcacctggtacaggcgagggggtagcctgcctccccacacccaggtgcacggctcccgtctgcggctcccccaggtctcaccagctgattctggagaatatgtgtgccgtgtggagaatggatcgggccccaaggaggcctccattactgtgtctgtgctccacggcacccattctggccccagctacaccccagtgcccggcagcacccggcccatccgcatcgagccctcctcctcacacgtggcggaagggcagaccctggatctgaactgcgtggtgcccgggcaggcccacgcccaggtcacgtggcacaagcgtgggggcagcctccctgcccggcaccagacccacggctcgctgctgcggctgcaccaggtgaccccggccgactcaggcgagtatgtgtgccatgtggtgggcacctccggccccctagaggcctcagtcctggtcaccatcgaagcctctgtcatccctggacccatcccacctgtcaggatcgagtcttcatcctccacagtggccgagggccagaccctggatctgagctgcgtggtggcagggcaggcccacgcccaggtcacatggtacaagcgtgggggcagcctccctgcccggcaccaggttcgtggctcccgcctgtacatcttccaggcctcacctgccgatgcgggacagtacgtctgccgggccagcaacggcatggaggcctccatcacggtcacagtaactgggacccagggggccaacttagcctaccctgccggcagcacccagcccatccgcatcgagccctcctcctcgcaagtggcggaagggcagaccctggatctgaactgcgtggtgcccgggcagtcccatgcccaggtcacgtggcacaagcgtgggggcagcctccctgtccggcaccagacccacggctccctgctgagactctaccaagcgtcccccgccgactcgggcgagtacgtgtgccgagtgttgggcagctccgtgcctctagaggcctctgtcctggtcaccattgagcctgcgggctcagtgcctgcacttggggtcacccccacggtccggatcgagtcatcgtcttcgcaagtggccgaggggcagaccctggacctgaactgcctcgttgctggtcaggcccatgcccaggtcacgtggcacaagcgcgggggcagcctcccggcccggcaccaggtgcatggctcgaggctacgcctgctccaggtgaccccagctgattcaggggagtacgtgtgccgtgtggtcggcagctcaggtacccaggaagcctcagtccttgtcaccatccagcagcgccttagtggctcccactcccagggtgtggcgtaccccgtccgcatcgagtcctcctcagcctccctggccaatggacacaccctggacctcaactgcctggttgccagccaggctccccacaccatcacctggtataagcgtggaggcagcttacccagccggcaccagatcgtgggctcccggctgcggatccctcaggtgactccggcagactcgggcgagtacgtgtgtcacgtcagtaacggtgcaggctcccgggagacctcgctcatcgtcaccatccagggcagcggttcctcccacgtgcccagcgtctccccaccgatcaggatcgagtcgtcttcccccacggtggtggaagggcagaccttggatctgaactgcgtggtcgccaggcagccccaggctatcatcacatggtacaagcgtgggggcagccttccctcccgacaccagacccatggctcccacctgcggttgcaccaaatgtctgtggctgactcgggcgagtatgtgtgccgggccaacaacaacatcgatgccctggaggcctccatcgtcatctccgtctcccctagcgccggcagcccctccgcccctggcagctccatgcccatcagaattgagtcatcctcctcacacgtggccgaaggggagaccctggatctgaactgcgtggtccccgggcaggcccatgcccaggtcacttggcacaagcgtgggggcagcctccccagtcaccatcagacccgcggctcacggctgcggctgcaccatgtgtccccggccgactcgggtgaatacgtgtgccgggtgatgggcagctctggccccctggaggcctcagtcctggtcaccatcgaagcctctggctcaagtgctgtccacgtccccgccccaggtggagccccacccatccgcatcgagccctcctcctcccgagtggcagaagggcagaccctggatctgaagtgcgtggtgcccgggcaggcccacgcccaggtcacgtggcacaagcgtggaggaaacctccctgcccggcaccaggtccacggcccactgctgaggctgaaccaggtgtccccggctgactctggcgagtactcgtgccaagtgaccggaagctcaggcaccctggaggcatctgtcctggtcacaattgagccctccagcccaggacccattcctgctccaggactggcccagcccatctacatcgaggcctcctcttcacacgtgactgaagggcagactctggatctgaactgtgtggtgcccgggcaggcccatgcccaggtcacgtggtacaagcgcgggggcagcctccccgcccggcaccagacccatggctcccagctgcggctccaccncgtctcccctgccgactcaggcgagtatgtgtgtcgtgcagccngcggcccaggccctgagcaagaagcctccttcacagtcaccgtcccgcccagtgaggggtcttcctaccgccttaggagcccggtcatctccatcgacccgcccagcagcaccgtgcagcagggccaggatgccagcttcaagtgcctcatccatgacggggcagcccccatcagcctcgagtggaagacccggaaccaggagctggaggacaacgtccacatcagtcccaatggctccatcatcaccatcgtgggcacccggcccagcaaccacggtacctaccgctgcgtggcctccaatgcctacggtgtggcccagagtgtggtgaacctcagtgtgcacgggccccctacagtgtccgtgctccccgagggccccgtgtgggtgaaagtgggaaaggctgtcaccctggagtgtgtcagtgccggggagccccgctcctctgctcgttggacccggatcagcagcacccctgccaagttggagcagcggacatatgggctcatggacagccacgcggtgctgcagatttcatcagctaaaccatcagatgcgggcacttatgtgtgccttgctcagaatgcactaggcacagcacagaagcaggtggaggtgatcgtggacacgggcgccatggccccaggggcccctcaggtccaagctgaagaagctgagctgactgtggaggctggacacacggccaccttgcgctgctcagccacaggcagccccgcgcccaccatccactggtccaagctgcgttccccactgccctggcagcaccggctggaaggtgacacactcatcataccccgggtagcccagcaggactcgggccagtacatctgcaatgccactagccctgctgggcacgctgaggccaccatcatcctgcacgtggagagcccaccatatgccaccacggtcccagagcacgcttcggtgcaggcaggggagacggtgcagctccagtgcctggctcacgggacacccccactcaccttccagtggagccgcgtgggcagcagccttcctgggagggcgaccgccaggaacgagctgctgcactttgagcgtgcagcccctgaggactcaggccgctaccgctgccgggtcaccaacaaggtgggctcagccgaggcctttgcccagctgctcgtccaaggccctcccggctctctccctgccacctccatcccagcagggtccacgcccaccgtgcaggtcacgcctcagctagagaccaagagcattggggccagcgttgagttccactgtgctgtgcccagcgaccggggtacccagctccgttggttcaaggaagggggtcagctgcctccgggtcacagcgtgcaggatggggtgctccgaatccagaacttggaccagagctgccaagggacgtatatatgccaggcccatggaccttgggggaaggcccaggccagtgcccagctggttatccaagccctgccctcggtgctcatcaacatccggacctctgtgcagaccgtggtggttggccacgccgtggagttcgaatgcctggcactgggtgaccccaagcctcaggtgacatggagcaaagttggagggcacctgcggccaggcattgtgcagagcggaggtgtcgtcaggatcgcccacgtagagctggctgatgcgggacagtatcgctgcactgccaccaacgcagctggcaccacacaatcccacgtcctgctgcttgtgcaagccttgccccagatctcaatgccccaagaagtccgtgtgcctgctggttctgcagctgtcttcccctgcatagcctcaggctaccccactcctgacatcagctggagcaagctggatggcagcctgccacctgacagccgcctggagaacaacatgctgatgctgccctcagtccgaccccaggacgcaggtacctacgtctgcaccgccactaaccgccagggcaaggtcaaagcctttgcccacctgcaggtgccagagcgggtggtgccctacttcacgcagaccccctactccttcctaccgctgcccaccatcaaggatgcctacaggaagttcgagatcaagatcaccttccggcccgactcagccgatggtgagcaggagggttaatttgcggggtgggctggcctgggttgagggacctcgtggagtaactgccatcatggcaggagccctggctgcccctcagtcctgccccaatccctcagccctccctctccagaagcccccagacctctgggcctccaccctgg

SEQ ID NO: 367543 - DNA, 10460 bp, Homo sapiens
  misc_feature (1383)..(1383): n is a, c, g, or t
  misc_feature (1392)..(1392): n is a, c, g, or t
  misc_feature (5192)..(5194): n is a, c, g, or t
  misc_feature (9022)..(9022): n is a, c, g, or t
  misc_feature (9066)..(9066): n is a, c, g, or t
ggccggcgagcgggcggctgcgggcggcgcggagcgggcggcgcggagcgagcgagcgagagagcggcgcgggccgggccatggggtggcgggcgccgggcgcgctgctgctggcgctgctgctgcacgggcggctgctggcggtgacccatgggctgagggcatacgatggcttgtctctgcctgaggacatagagaccgtcacagcaagccaaatgcgctggacacattcgtacctttctgatgatgaggacatgctggctgacagcatctcaggagacgacctgggcagtggggacctgggcagcggggacttccagatggtttatttccgagccctggtgaatttcactcgctccatcgagtacagccctcagctggaggatgcaggctccagagagtttcgagaggtgtccgaggctgtggtagacacgctggagtcggagtacttgaaaattcccggagaccaggttgtcagtgtggtgttcatcaaggagctggatggctgggtttttgtggagctcgatgtgggctcggaagggaatgcggatggtgctcagattcaggagatgctgctcagggtcatctccagcggctctgtggcctcctacgtcacctctccccagggattccagttccgacgcctgggcacagtgccccagttcccaagagcctgcacggaggccgagtttgcctgccacagctacaatgagtgtgtggccctggagtatcgctgtgaccggcggcccgactgcagggacatgtctgatgagctcaattgtgaggagccagtcctgggtatcagccccacattctctctccttgtggagacgacatctttaccgccccggccagagacaaccatcatgcgacagccaccagtcacccacgctcctcagcccctgcttcccggttccgtcaggcccctgccctgtgggccccaggaggccgcatgccgcaatgggcactgcatccccagagactacctctgcgacggacaggaggactgcgaggacggcagcgatgagctagactgtggccccccgccaccctgtgagcccaacgagttcccctgcgggaatggacattgtgccctcaagctgtggcgctgcgatggtgactttgactgtgaggaccgaactgatgaagccaactgccccaccaagcgtcctgaggaagtgtgcgggcccacacagttccgatgcgtctctaccaacatgtgcatcccagccagcttccactgtgacgaggagagcgactgtcctgaccggagcgacgagtttggctgcatgcccccccaggtggtgacacctccccgggagtccatccaggcttcccggggccagacagtgaccttcacctgcgtggccattggcgtccccnccccctttntcatcaattggaggctcaactggggccacatcccctctcatcccagggtgacagtgaccagcgagggtggccgtggcacactgatcatccgtgatgtgaaggagtcagaccagggtgcctacacctgtgaggccatgaacgcccggggcatggtgtttggcattcctgacggtgtccttgagctcgtcccacaacgaggcccctgccctgacggccacttctacctggagcacagcgccgcctgcctgccctgcttctgctttggcatcaccagcgtgtgccagagcacccgccgcttccgggaccagatcaggctgcgctttgaccaacccgatgacttcaagggtgtgaatgtgacaatgcctgcgcagcccggcacgccacccctctcctccacgcagctgcagatcgacccatccctgcacgagttccagctagtcgacctgtcccgccgcttcctcgtccacgactccttctgggctctgcctgaacagttcctgggcaacaaggtggactcctatggcggctccctgcgttacaacgtgcgctacgagttggcccgtggcatgctggagccagtgcagcggccggacgtggtcctcgtgggtgccgggtaccgcctcctctcccgaggccacacacccacccaacctggtgctctgaaccagcgccaggtccagttctctgaggagcactgggtccatgagtctggccggccggtgcagcgcgcggagctgctgcaggtgctgcagagcctggaggccgtgctcatccagaccgtgtacaacaccaagatggctagcgtgggacttagcgacatcgccatggataccaccgtcacccatgccaccagccatggccgtgcccacagtgtggaggagtgcagatgccccattggctattctggcttgtcctgcgagagctgtgatgcccacttcactcgggtgcctggtgggccctacctgggcacctgctctggttgcagttgcaatggccatgccagctcctgtgaccctgtgtatggccactgcctgaattgccagcacaacacggaggggccacagtgcaacaagtgcaaggctggcttctttggggacgccatgaaggccacggccacttcctgccggccctgcccttgcccatacatcgatgcctcccgcagattctcagacacttgcttcctggacacggatggccaagccacatgtgacgcctgtgccccaggctacactggccgccgctgtgagagctgtgcccccggatacgagggcaaccccatccagcccggcgggaagtgcaggcccgtcaaccaggagattgtgcgctgtgacgagcgtggcagcatggggacctccggggaggcctgccgctgtaagaacaatgtggtggggcgcttgtgcaatgaatgtgctgacggctctttccacctgagtacccgaaaccccgatggctgcctcaagtgcttctgcatgggtgtcagtcgccactgcaccagctcttcatggagccgtgcccagttgcatggggcctctgaggagcctggtcacttcagcctgaccaacgccgcaagcacccacaccaccaacgagggcatcttctcccccacgcccggggaactgggattctcctccttccacagactcttatctggaccctacttctggagcctcccttcacgcttcctgggggacaaggtgacctcctatggaggagagctgcgcttcacagtgacccagaggtcccagccgggctccacacccctgcacgggcagccgttggtggtgctgcaaggtaacaacatcatcctagagcaccatgtggcccaggagcccagccccggccagcccagcaccttcattgtgcctttccgggagcaagcatggcagcggcccgatgggcagccagccacacgggagcacctgctgatggcactggcaggcatcgacaccctcctgatccgagcatcctacgcccagcagcccgctgagagcagggtctctggcatcagcatggacgtggctgtgcccgaggaaaccggccaggaccccgcgctggaagtggaacagtgctcctgcccacccgggtaccgtgggccgtcctgccaggactgtgacacaggctacacacgcacgcccagtggcctctacctgggtacctgtgaacgctgcagctgccatggccactcagaggcctgcgagccagaaacaggtgcctgccagggctgccagcatcacacggagggccctcggtgtgagcagtgccagccaggatactacggggacgcccagcgggggacaccacaggactgccagctgtgcccctgctacggagaccctgctgccggccaggctgcccacacttgttttctggacacagacggccaccccacctgtgatgcgtgctccccaggccacagtgggcgtcactgtgagaggtgcgcccctggctactatggcaaccccagccagggccagccatgccagagagacagccaggtgccagggcccataggctgcaactgtgacccccaaggcagcgtcagcagccagtgtgatgctgctggtcagtgccagtgcaaggcccaggtggaaggcctcacttgcagccactgccggccccaccacttccacctgagtgccagcaacccagacggctgcctgccctgcttctgtatgggcatcacccagcagtgcgccagctctgcctacacacgccacctgatctccacccactttgcccctggggacttccaaggctttgccctggtgaacccacagcgaaacagccgcctgacaggagaattcactgtggaacccgtgcccgagggtgcccagctctcttttggcaactttgcccaactcggccatgagtccttctactggcagctgccggagacataccagggagacaaggtggcggcctacggtgggaagttgcgatacaccctctcctacacagcaggcccacagggcagcccactctctgaccccgatgtgcagatcacgggcaacaacatcatgctagtggcctcccagccagcgctgcagggccctgagaggaggagctacgagatcatgttccgagaggaattctggcgccggcccgatgggcagccggccacacgcgagcacctcctgatggcactggccgacctggatgagctcctgatccgggccacgttctcctccgtgccgctggtggccagcatcagcgcagtcagcctggaggtcgcccagccggggccctcaaacagaccccgcgccctcgaggtggaggagtgccgctgcccgccaggctacatcggtctgtcctgccaggactgtgcccccggctacacgcgcaccgggagtgggctctacctcggccactgcgagctatgtgaatgcaatggccactcagacctgtgccacccagagactggggcctgctcgcaatgccagcacaacgccgcaggggagttctgcgagctttgtgcccctggctactacggagatgccacagccgggacgcctgaggactgccagccctgtgcctgcccactgaccaacccagagaacatgttttcccgcacctgtgagagcctgggagccggcgggtaccgctgcacggcctgcgaacccggctacactggccagtactgtgagcagtgtggcccaggttacgtgggtaaccccagtgtgcaagggggccagtgcctgccagagacaaaccaagccccactggtggtcgaggtccatcctgctcgaagcatagtgccccaaggtggctcccactccctgcggtgtcaggtcagtgggagnnnaccccactacttctattggtcccgtgaggatgggcggcctgtgcccagcggcacccagcagcgacatcaaggctccgagctccacttccccagcgtccagccctcggatgctggggtctacatttgcacctgccgtaatctccaccaatccaataccagccgggcagagctgctggtcactgaggctccaagcaagcccatcacagtgactgtggaggagcagcggagccagagcgtgcgccccggagctgacgtcaccttcatctgcacagccaaaagcaagtccccagcctataccctggtgtggacccgcctgcacaacgggaaactgcccacccgagccatggatttcaatggcatcctgaccattcgcaacgtccagctgagtgatgcaggcacctacgtgtgcaccggctccaacatgtttgccatggaccagggcacagccactctacatgtgcaggcctcgggcaccttgtccgcccccgtggtctccatccatccgccacagctcacagtgcagcccgggcaactggcggagttccgctgcagcgccacagggagccccacgcccaccctcgagtggacagggggccccggcggccagctccctgcgaaggcacaaatccacggcggcatcctgcgcctgccagctgtcgagcccacggatcaggcccagtacttgtgccgagcccacagcagcgctgggcagcaggtggccagggctgtgctccacgtgcatgggggcggtgggcccagagtccaagtgagcccagagaggacccaggtccacgcaggccgcaccgtcaggctgtactgcagggctgcaggcgtgcctagcgccaccatcacctggaggaaggaagggggcagcctcccaccacaggcccggtcagagcgcacagacatcgcgacactgctcatcccagccatcacgactgctgacgccggcttctacctctgcgtggccaccagccctgcaggcactgcccaggcccggatccaagtggttgtcctttcagcctcagatgccagcccaccgccggtcaagattgagtcctcatcgccttctgtgacagaagggcaaacactcgacctcaactgtgtggtggcagggtcagcccatgcccaggtcacctggtacaggcgagggggtagcctgcctccccacacccaggtgcacggctcccgtctgcggctcccccaggtctcaccagctgattctggagaatatgtgtgccgtgtggagaatggatcgggccccaaggaggcctccattactgtgtctgtgctccacggcacccattctggccccagctacaccccagtgcccggcagcacccggcccatccgcatcgagccctcctcctcacacgtggcggaagggcagaccctggatctgaactgcgtggtgcccgggcaggcccacgcccaggtcacgtggcacaagcgtgggggcagcctccctgcccggcaccagacccacggctcgctgctgcggctgcaccaggtgaccccggccgactcaggcgagtatgtgtgccatgtggtgggcacctccggccccctagaggcctcagtcctggtcaccatcgaagcctctgtcatccctggacccatcccacctgtcaggatcgagtcttcatcctccacagtggccgagggccagaccctggatctgagctgcgtggtggcagggcaggcccacgcccaggtcacatggtacaagcgtgggggcagcctccctgcccggcaccaggttcgtggctcccgcctgtacatcttccaggcctcacctgccgatgcgggacagtacgtctgccgggccagcaacggcatggaggcctccatcacggtcacagtaactgggacccagggggccaacttagcctaccctgccggcagcacccagcccatccgcatcgagccctcctcctcgcaagtggcggaagggcagaccctggatctgaactgcgtggtgcccgggcagtcccatgcccaggtcacgtggcacaagcgtgggggcagcctccctgtccggcaccagacccacggctccctgctgagactctaccaagcgtcccccgccgactcgggcgagtacgtgtgccgagtgttgggcagctccgtgcctctagaggcctctgtcctggtcaccattgagcctgcgggctcagtgcctgcacttggggtcacccccacggtccggatcgagtcatcgtcttcgcaagtggccgaggggcagaccctggacctgaactgcctcgttgctggtcaggcccatgcccaggtcacgtggcacaagcgcgggggcagcctcccggcccggcaccaggtgcatggctcgaggctacgcctgctccaggtgaccccagctgattcaggggagtacgtgtgccgtgtggtcggcagctcaggtacccaggaagcctcagtccttgtcaccatccagcagcgccttagtggctcccactcccagggtgtggcgtaccccgtccgcatcgagtcctcctcagcctccctggccaatggacacaccctggacctcaactgcctggttgccagccaggctccccacaccatcacctggtataagcgtggaggcagcttacccagccggcaccagatcgtgggctcccggctgcggatccctcaggtgactccggcagactcgggcgagtacgtgtgtcacgtcagtaacggtgcaggctcccgggagacctcgctcatcgtcaccatccagggcagcggttcctcccacgtgcccagcgtctccccaccgatcaggatcgagtcgtcttcccccacggtggtggaagggcagaccttggatctgaactgcgtggtcgccaggcagccccaggctatcatcacatggtacaagcgtgggggcagccttccctcccgacaccagacccatggctcccacctgcggttgcaccaaatgtctgtggctgactcgggcgagtatgtgtgccgggccaacaacaacatcgatgccctggaggcctccatcgtcatctccgtctcccctagcgccggcagcccctccgcccctggcagctccatgcccatcagaattgagtcatcctcctcacacgtggccgaaggggagaccctggatctgaactgcgtggtccccgggcaggcccatgcccaggtcacttggcacaagcgtgggggcagcctccccagtcaccatcagacccgcggctcacggctgcggctgcaccatgtgtccccggccgactcgggtgaatacgtgtgccgggtgatgggcagctctggccccctggaggcctcagtcctggtcaccatcgaagcctctggctcaagtgctgtccacgtccccgccccaggtggagccccacccatccgcatcgagccctcctcctcccgagtggcagaagggcagaccctggatctgaagtgcgtggtgcccgggcaggcccacgcccaggtcacgtggcacaagcgtggaggaaacctccctgcccggcaccaggtccacggcccactgctgaggctgaaccaggtgtccccggctgactctggcgagtactcgtgccaagtgaccggaagctcaggcaccctggaggcatctgtcctggtcacaattgagccctccagcccaggacccattcctgctccaggactggcccagcccatctacatcgaggcctcctcttcacacgtgactgaagggcagactctggatctgaactgtgtggtgcccgggcaggcccatgcccaggtcacgtggtacaagcgcgggggcagcctccccgcccggcaccagacccatggctcccagctgcggctccaccncgtctcccctgccgactcaggcgagtatgtgtgtcgtgcagccngcggcccaggccctgagcaagaagcctccttcacagtcaccgtcccgcccagtgaggggtcttcctaccgccttaggagcccggtcatctccatcgacccgcccagcagcaccgtgcagcagggccaggatgccagcttcaagtgcctcatccatgacggggcagcccccatcagcctcgagtggaagacccggaaccaggagctggaggacaacgtccacatcagtcccaatggctccatcatcaccatcgtgggcacccggcccagcaaccacggtacctaccgctgcgtggcctccaatgcctacggtgtggcccagagtgtggtgaacctcagtgtgcacgggccccctacagtgtccgtgctccccgagggccccgtgtgggtgaaagtgggaaaggctgtcaccctggagtgtgtcagtgccggggagccccgctcctctgctcgttggacccggatcagcagcacccctgccaagttggagcagcggacatatgggctcatggacagccacgcggtgctgcagatttcatcagctaaaccatcagatgcgggcacttatgtgtgccttgctcagaatgcactaggcacagcacagaagcaggtggaggtgatcgtggacacgggcgccatggccccaggggcccctcaggtccaagctgaagaagctgagctgactgtggaggctggacacacggccaccttgcgctgctcagccacaggcagccccgcgcccaccatccactggtccaagctgcgttccccactgccctggcagcaccggctggaaggtgacacactcatcataccccgggtagcccagcaggactcgggccagtacatctgcaatgccactagccctgctgggcacgctgaggccaccatcatcctgcacgtggagagcccaccatatgccaccacggtcccagagcacgcttcggtgcaggcaggggagacggtgcagctccagtgcctggctcacgggacacccccactcaccttccagtggagccgcgtgggcagcagccttcctgggagggcgaccgccaggaacgagctgctgcactttgagcgtgcagcccctgaggactcaggccgctaccgctgccgggtcaccaacaaggtgggctcagccgaggcctttgcccagctgctcgtccaaggccctcccggctctctccctgccacctccatcccagcagggtccacgcccaccgtgcaggtcacgcctcagctagagaccaagagcattggggccagcgttgagttccactgtgctgtgcccagcgaccggggtacccagctccgttggttcaaggaagggggtcagctgcctccggggagggagtggatgtcgtagagggagagatgtcgtagagggatagtatgt

SEQ ID NO: 367544 - DNA, 10857 bp, Homo sapiens
  misc_feature (1383)..(1383): n is a, c, g, or t
  misc_feature (1392)..(1392): n is a, c, g, or t
  misc_feature (5192)..(5194): n is a, c, g, or t
  misc_feature (9022)..(9022): n is a, c, g, or t
  misc_feature (9066)..(9066): n is a, c, g, or t
ggccggcgagcgggcggctgcgggcggcgcggagcgggcggcgcggagcgagcgagcgagagagcggcgcgggccgggccatggggtggcgggcgccgggcgcgctgctgctggcgctgctgctgcacgggcggctgctggcggtgacccatgggctgagggcatacgatggcttgtctctgcctgaggacatagagaccgtcacagcaagccaaatgcgctggacacattcgtacctttctgatgatgaggacatgctggctgacagcatctcaggagacgacctgggcagtggggacctgggcagcggggacttccagatggtttatttccgagccctggtgaatttcactcgctccatcgagtacagccctcagctggaggatgcaggctccagagagtttcgagaggtgtccgaggctgtggtagacacgctggagtcggagtacttgaaaattcccggagaccaggttgtcagtgtggtgttcatcaaggagctggatggctgggtttttgtggagctcgatgtgggctcggaagggaatgcggatggtgctcagattcaggagatgctgctcagggtcatctccagcggctctgtggcctcctacgtcacctctccccagggattccagttccgacgcctgggcacagtgccccagttcccaagagcctgcacggaggccgagtttgcctgccacagctacaatgagtgtgtggccctggagtatcgctgtgaccggcggcccgactgcagggacatgtctgatgagctcaattgtgaggagccagtcctgggtatcagccccacattctctctccttgtggagacgacatctttaccgccccggccagagacaaccatcatgcgacagccaccagtcacccacgctcctcagcccctgcttcccggttccgtcaggcccctgccctgtgggccccaggaggccgcatgccgcaatgggcactgcatccccagagactacctctgcgacggacaggaggactgcgaggacggcagcgatgagctagactgtggccccccgccaccctgtgagcccaacgagttcccctgcgggaatggacattgtgccctcaagctgtggcgctgcgatggtgactttgactgtgaggaccgaactgatgaagccaactgccccaccaagcgtcctgaggaagtgtgcgggcccacacagttccgatgcgtctctaccaacatgtgcatcccagccagcttccactgtgacgaggagagcgactgtcctgaccggagcgacgagtttggctgcatgcccccccaggtggtgacacctccccgggagtccatccaggcttcccggggccagacagtgaccttcacctgcgtggccattggcgtccccnccccctttntcatcaattggaggctcaactggggccacatcccctctcatcccagggtgacagtgaccagcgagggtggccgtggcacactgatcatccgtgatgtgaaggagtcagaccagggtgcctacacctgtgaggccatgaacgcccggggcatggtgtttggcattcctgacggtgtccttgagctcgtcccacaacgaggcccctgccctgacggccacttctacctggagcacagcgccgcctgcctgccctgcttctgctttggcatcaccagcgtgtgccagagcacccgccgcttccgggaccagatcaggctgcgctttgaccaacccgatgacttcaagggtgtgaatgtgacaatgcctgcgcagcccggcacgccacccctctcctccacgcagctgcagatcgacccatccctgcacgagttccagctagtcgacctgtcccgccgcttcctcgtccacgactccttctgggctctgcctgaacagttcctgggcaacaaggtggactcctatggcggctccctgcgttacaacgtgcgctacgagttggcccgtggcatgctggagccagtgcagcggccggacgtggtcctcgtgggtgccgggtaccgcctcctctcccgaggccacacacccacccaacctggtgctctgaaccagcgccaggtccagttctctgaggagcactgggtccatgagtctggccggccggtgcagcgcgcggagctgctgcaggtgctgcagagcctggaggccgtgctcatccagaccgtgtacaacaccaagatggctagcgtgggacttagcgacatcgccatggataccaccgtcacccatgccaccagccatggccgtgcccacagtgtggaggagtgcagatgccccattggctattctggcttgtcctgcgagagctgtgatgcccacttcactcgggtgcctggtgggccctacctgggcacctgctctggttgcagttgcaatggccatgccagctcctgtgaccctgtgtatggccactgcctgaattgccagcacaacacggaggggccacagtgcaacaagtgcaaggctggcttctttggggacgccatgaaggccacggccacttcctgccggccctgcccttgcccatacatcgatgcctcccgcagattctcagacacttgcttcctggacacggatggccaagccacatgtgacgcctgtgccccaggctacactggccgccgctgtgagagctgtgcccccggatacgagggcaaccccatccagcccggcgggaagtgcaggcccgtcaaccaggagattgtgcgctgtgacgagcgtggcagcatggggacctccggggaggcctgccgctgtaagaacaatgtggtggggcgcttgtgcaatgaatgtgctgacggctctttccacctgagtacccgaaaccccgatggctgcctcaagtgcttctgcatgggtgtcagtcgccactgcaccagctcttcatggagccgtgcccagttgcatggggcctctgaggagcctggtcacttcagcctgaccaacgccgcaagcacccacaccaccaacgagggcatcttctcccccacgcccggggaactgggattctcctccttccacagactcttatctggaccctacttctggagcctcccttcacgcttcctgggggacaaggtgacctcctatggaggagagctgcgcttcacagtgacccagaggtcccagccgggctccacacccctgcacgggcagccgttggtggtgctgcaaggtaacaacatcatcctagagcaccatgtggcccaggagcccagccccggccagcccagcaccttcattgtgcctttccgggagcaagcatggcagcggcccgatgggcagccagccacacgggagcacctgctgatggcactggcaggcatcgacaccctcctgatccgagcatcctacgcccagcagcccgctgagagcagggtctctggcatcagcatggacgtggctgtgcccgaggaaaccggccaggaccccgcgctggaagtggaacagtgctcctgcccacccgggtaccgtgggccgtcctgccaggactgtgacacaggctacacacgcacgcccagtggcctctacctgggtacctgtgaacgctgcagctgccatggccactcagaggcctgcgagccagaaacaggtgcctgccagggctgccagcatcacacggagggccctcggtgtgagcagtgccagccaggatactacggggacgcccagcgggggacaccacaggactgccagctgtgcccctgctacggagaccctgctgccggccaggctgcccacacttgttttctggacacagacggccaccccacctgtgatgcgtgctccccaggccacagtgggcgtcactgtgagaggtgcgcccctggctactatggcaaccccagccagggccagccatgccagagagacagccaggtgccagggcccataggctgcaactgtgacccccaaggcagcgtcagcagccagtgtgatgctgctggtcagtgccagtgcaaggcccaggtggaaggcctcacttgcagccactgccggccccaccacttccacctgagtgccagcaacccagacggctgcctgccctgcttctgtatgggcatcacccagcagtgcgccagctctgcctacacacgccacctgatctccacccactttgcccctggggacttccaaggctttgccctggtgaacccacagcgaaacagccgcctgacaggagaattcactgtggaacccgtgcccgagggtgcccagctctcttttggcaactttgcccaactcggccatgagtccttctactggcagctgccggagacataccagggagacaaggtggcggcctacggtgggaagttgcgatacaccctctcctacacagcaggcccacagggcagcccactctctgaccccgatgtgcagatcacgggcaacaacatcatgctagtggcctcccagccagcgctgcagggccctgagaggaggagctacgagatcatgttccgagaggaattctggcgccggcccgatgggcagccggccacacgcgagcacctcctgatggcactggccgacctggatgagctcctgatccgggccacgttctcctccgtgccgctggtggccagcatcagcgcagtcagcctggaggtcgcccagccggggccctcaaacagaccccgcgccctcgaggtggaggagtgccgctgcccgccaggctacatcggtctgtcctgccaggactgtgcccccggctacacgcgcaccgggagtgggctctacctcggccactgcgagctatgtgaatgcaatggccactcagacctgtgccacccagagactggggcctgctcgcaatgccagcacaacgccgcaggggagttctgcgagctttgtgcccctggctactacggagatgccacagccgggacgcctgaggactgccagccctgtgcctgcccactgaccaacccagagaacatgttttcccgcacctgtgagagcctgggagccggcgggtaccgctgcacggcctgcgaacccggctacactggccagtactgtgagcagtgtggcccaggttacgtgggtaaccccagtgtgcaagggggccagtgcctgccagagacaaaccaagccccactggtggtcgaggtccatcctgctcgaagcatagtgccccaaggtggctcccactccctgcggtgtcaggtcagtgggagnnnaccccactacttctattggtcccgtgaggatgggcggcctgtgcccagcggcacccagcagcgacatcaaggctccgagctccacttccccagcgtccagccctcggatgctggggtctacatttgcacctgccgtaatctccaccaatccaataccagccgggcagagctgctggtcactgaggctccaagcaagcccatcacagtgactgtggaggagcagcggagccagagcgtgcgccccggagctgacgtcaccttcatctgcacagccaaaagcaagtccccagcctataccctggtgtggacccgcctgcacaacgggaaactgcccacccgagccatggatttcaatggcatcctgaccattcgcaacgtccagctgagtgatgcaggcacctacgtgtgcaccggctccaacatgtttgccatggaccagggcacagccactctacatgtgcaggcctcgggcaccttgtccgcccccgtggtctccatccatccgccacagctcacagtgcagcccgggcaactggcggagttccgctgcagcgccacagggagccccacgcccaccctcgagtggacagggggccccggcggccagctccctgcgaaggcacaaatccacggcggcatcctgcgcctgccagctgtcgagcccacggatcaggcccagtacttgtgccgagcccacagcagcgctgggcagcaggtggccagggctgtgctccacgtgcatgggggcggtgggcccagagtccaagtgagcccagagaggacccaggtccacgcaggccgcaccgtcaggctgtactgcagggctgcaggcgtgcctagcgccaccatcacctggaggaaggaagggggcagcctcccaccacaggcccggtcagagcgcacagacatcgcgacactgctcatcccagccatcacgactgctgacgccggcttctacctctgcgtggccaccagccctgcaggcactgcccaggcccggatccaagtggttgtcctttcagcctcagatgccagcccaccgccggtcaagattgagtcctcatcgccttctgtgacagaagggcaaacactcgacctcaactgtgtggtggcagggtcagcccatgcccaggtcacctggtacaggcgagggggtagcctgcctccccacacccaggtgcacggctcccgtctgcggctcccccaggtctcaccagctgattctggagaatatgtgtgccgtgtggagaatggatcgggccccaaggaggcctccattactgtgtctgtgctccacggcacccattctggccccagctacaccccagtgcccggcagcacccggcccatccgcatcgagccctcctcctcacacgtggcggaagggcagaccctggatctgaactgcgtggtgcccgggcaggcccacgcccaggtcacgtggcacaagcgtgggggcagcctccctgcccggcaccagacccacggctcgctgctgcggctgcaccaggtgaccccggccgactcaggcgagtatgtgtgccatgtggtgggcacctccggccccctagaggcctcagtcctggtcaccatcgaagcctctgtcatccctggacccatcccacctgtcaggatcgagtcttcatcctccacagtggccgagggccagaccctggatctgagctgcgtggtggcagggcaggcccacgcccaggtcacatggtacaagcgtgggggcagcctccctgcccggcaccaggttcgtggctcccgcctgtacatcttccaggcctcacctgccgatgcgggacagtacgtctgccgggccagcaacggcatggaggcctccatcacggtcacagtaactgggacccagggggccaacttagcctaccctgccggcagcacccagcccatccgcatcgagccctcctcctcgcaagtggcggaagggcagaccctggatctgaactgcgtggtgcccgggcagtcccatgcccaggtcacgtggcacaagcgtgggggcagcctccctgtccggcaccagacccacggctccctgctgagactctaccaagcgtcccccgccgactcgggcgagtacgtgtgccgagtgttgggcagctccgtgcctctagaggcctctgtcctggtcaccattgagcctgcgggctcagtgcctgcacttggggtcacccccacggtccggatcgagtcatcgtcttcgcaagtggccgaggggcagaccctggacctgaactgcctcgttgctggtcaggcccatgcccaggtcacgtggcacaagcgcgggggcagcctcccggcccggcaccaggtgcatggctcgaggctacgcctgctccaggtgaccccagctgattcaggggagtacgtgtgccgtgtggtcggcagctcaggtacccaggaagcctcagtccttgtcaccatccagcagcgccttagtggctcccactcccagggtgtggcgtaccccgtccgcatcgagtcctcctcagcctccctggccaatggacacaccctggacctcaactgcctggttgccagccaggctccccacaccatcacctggtataagcgtggaggcagcttacccagccggcaccagatcgtgggctcccggctgcggatccctcaggtgactccggcagactcgggcgagtacgtgtgtcacgtcagtaacggtgcaggctcccgggagacctcgctcatcgtcaccatccagggcagcggttcctcccacgtgcccagcgtctccccaccgatcaggatcgagtcgtcttcccccacggtggtggaagggcagaccttggatctgaactgcgtggtcgccaggcagccccaggctatcatcacatggtacaagcgtgggggcagccttccctcccgacaccagacccatggctcccacctgcggttgcaccaaatgtctgtggctgactcgggcgagtatgtgtgccgggccaacaacaacatcgatgccctggaggcctccatcgtcatctccgtctcccctagcgccggcagcccctccgcccctggcagctccatgcccatcagaattgagtcatcctcctcacacgtggccgaaggggagaccctggatctgaactgcgtggtccccgggcaggcccatgcccaggtcacttggcacaagcgtgggggcagcctccccagtcaccatcagacccgcggctcacggctgcggctgcaccatgtgtccccggccgactcgggtgaatacgtgtgccgggtgatgggcagctctggccccctggaggcctcagtcctggtcaccatcgaagcctctggctcaagtgctgtccacgtccccgccccaggtggagccccacccatccgcatcgagccctcctcctcccgagtggcagaagggcagaccctggatctgaagtgcgtggtgcccgggcaggcccacgcccaggtcacgtggcacaagcgtggaggaaacctccctgcccggcaccaggtccacggcccactgctgaggctgaaccaggtgtccccggctgactctggcgagtactcgtgccaagtgaccggaagctcaggcaccctggaggcatctgtcctggtcacaattgagccctccagcccaggacccattcctgctccaggactggcccagcccatctacatcgaggcctcctcttcacacgtgactgaagggcagactctggatctgaactgtgtggtgcccgggcaggcccatgcccaggtcacgtggtacaagcgcgggggcagcctccccgcccggcaccagacccatggctcccagctgcggctccaccncgtctcccctgccgactcaggcgagtatgtgtgtcgtgcagccngcggcccaggccctgagcaagaagcctccttcacagtcaccgtcccgcccagtgaggggtcttcctaccgccttaggagcccggtcatctccatcgacccgcccagcagcaccgtgcagcagggccaggatgccagcttcaagtgcctcatccatgacggggcagcccccatcagcctcgagtggaagacccggaaccaggagctggaggacaacgtccacatcagtcccaatggctccatcatcaccatcgtgggcacccggcccagcaaccacggtacctaccgctgcgtggcctccaatgcctacggtgtggcccagagtgtggtgaacctcagtgtgcacgggccccctacagtgtccgtgctccccgagggccccgtgtgggtgaaagtgggaaaggctgtcaccctggagtgtgtcagtgccggggagccccgctcctctgctcgttggacccggatcagcagcacccctgccaagttggagcagcggacatatgggctcatggacagccacgcggtgctgcagatttcatcagctaaaccatcagatgcgggcacttatgtgtgccttgctcagaatgcactaggcacagcacagaagcaggtggaggtgatcgtggacacgggcgccatggccccaggggcccctcaggtccaagctgaagaagctgagctgactgtggaggctggacacacggccaccttgcgctgctcagccacaggcagccccgcgcccaccatccactggtccaagctgcgttccccactgccctggcagcaccggctggaaggtgacacactcatcataccccgggtagcccagcaggactcgggccagtacatctgcaatgccactagccctgctgggcacgctgaggccaccatcatcctgcacgtggagagcccaccatatgccaccacggtcccagagcacgcttcggtgcaggcaggggagacggtgcagctccagtgcctggctcacgggacacccccactcaccttccagtggagccgcgtgggcagcagccttcctgggagggcgaccgccaggaacgagctgctgcactttgagcgtgcagcccctgaggactcaggccgctaccgctgccgggtcaccaacaaggtgggctcagccgaggcctttgcccagctgctcgtccaagaatccagaacttggaccagagctgccaagggacgtatatatgccaggcccatggaccttgggggaaggcccaggccagtgcccagctggttatccaaggtaggagggtggcttcaggcctctgctaagagcagggaacagagatgagaaaggcagagaggcacaaggcccagaccctgttccctaggaatccccctaaatgtgtcagaataaagagaattattccattttgccttgcttgtgtctagcatagagtaaaaggggcttgatacatatttcaagggagggaagaaggatatggatggagtgtgtgagtgctcagatgaaccgatgaagattgaatcagtgtgaaccgggcatggtggaacgcacctgtagtcccacctactcaggaggctaagctgggagcattgcttgagcgcatgaattctaggctgtggtgagccgtgatcacacctgtgaatacaaccaagaccctttgtctaaaaaaaaaagaagtggacacgtgagtgagtaaatgcataagacctgacaagtgagtgtgtttgtgagtgaatgcatgaaaaagtgaatgaggagtgaatgaatgctggagcttcagtgctcacctttccttgggcagtct

SEQ ID NO: 367545 - DNA, 5224 bp, Homo sapiens
  misc_feature (1383)..(1383): n is a, c, g, or t
  misc_feature (1392)..(1392): n is a, c, g, or t
ggccggcgagcgggcggctgcgggcggcgcggagcgggcggcgcggagcgagcgagcgagagagcggcgcgggccgggccatggggtggcgggcgccgggcgcgctgctgctggcgctgctgctgcacgggcggctgctggcggtgacccatgggctgagggcatacgatggcttgtctctgcctgaggacatagagaccgtcacagcaagccaaatgcgctggacacattcgtacctttctgatgatgaggacatgctggctgacagcatctcaggagacgacctgggcagtggggacctgggcagcggggacttccagatggtttatttccgagccctggtgaatttcactcgctccatcgagtacagccctcagctggaggatgcaggctccagagagtttcgagaggtgtccgaggctgtggtagacacgctggagtcggagtacttgaaaattcccggagaccaggttgtcagtgtggtgttcatcaaggagctggatggctgggtttttgtggagctcgatgtgggctcggaagggaatgcggatggtgctcagattcaggagatgctgctcagggtcatctccagcggctctgtggcctcctacgtcacctctccccagggattccagttccgacgcctgggcacagtgccccagttcccaagagcctgcacggaggccgagtttgcctgccacagctacaatgagtgtgtggccctggagtatcgctgtgaccggcggcccgactgcagggacatgtctgatgagctcaattgtgaggagccagtcctgggtatcagccccacattctctctccttgtggagacgacatctttaccgccccggccagagacaaccatcatgcgacagccaccagtcacccacgctcctcagcccctgcttcccggttccgtcaggcccctgccctgtgggccccaggaggccgcatgccgcaatgggcactgcatccccagagactacctctgcgacggacaggaggactgcgaggacggcagcgatgagctagactgtggccccccgccaccctgtgagcccaacgagttcccctgcgggaatggacattgtgccctcaagctgtggcgctgcgatggtgactttgactgtgaggaccgaactgatgaagccaactgccccaccaagcgtcctgaggaagtgtgcgggcccacacagttccgatgcgtctctaccaacatgtgcatcccagccagcttccactgtgacgaggagagcgactgtcctgaccggagcgacgagtttggctgcatgcccccccaggtggtgacacctccccgggagtccatccaggcttcccggggccagacagtgaccttcacctgcgtggccattggcgtccccnccccctttntcatcaattggaggctcaactggggccacatcccctctcatcccagggtgacagtgaccagcgagggtggccgtggcacactgatcatccgtgatgtgaaggagtcagaccagggtgcctacacctgtgaggccatgaacgcccggggcatggtgtttggcattcctgacggtgtccttgagctcgtcccacaacgaggcccctgccctgacggccacttctacctggagcacagcgccgcctgcctgccctgcttctgctttggcatcaccagcgtgtgccagagcacccgccgcttccgggaccagatcaggctgcgctttgaccaacccgatgacttcaagggtgtgaatgtgacaatgcctgcgcagcccggcacgccacccctctcctccacgcagctgcagatcgacccatccctgcacgagttccagctagtcgacctgtcccgccgcttcctcgtccacgactccttctgggctctgcctgaacagttcctgggcaacaaggtggactcctatggcggctccctgcgttacaacgtgcgctacgagttggcccgtggcatgctggagccagtgcagcggccggacgtggtcctcgtgggtgccgggtaccgcctcctctcccgaggccacacacccacccaacctggtgctctgaaccagcgccaggtccagttctctgaggagcactgggtccatgagtctggccggccggtgcagcgcgcggagctgctgcaggtgctgcagagcctggaggccgtgctcatccagaccgtgtacaacaccaagatggctagcgtgggacttagcgacatcgccatggataccaccgtcacccatgccaccagccatggccgtgcccacagtgtggaggagtgcagatgccccattggctattctggcttgtcctgcgagagctgtgatgcccacttcactcgggtgcctggtgggccctacctgggcacctgctctggttgcagttgcaatggccatgccagctcctgtgaccctgtgtatggccactgcctgaattgccagcacaacacggaggggccacagtgcaacaagtgcaaggctggcttctttggggacgccatgaaggccacggccacttcctgccggccctgcccttgcccatacatcgatgcctcccgcagattctcagacacttgcttcctggacacggatggccaagccacatgtgacgcctgtgccccaggctacactggccgccgctgtgagagctgtgcccccggatacgagggcaaccccatccagcccggcgggaagtgcaggcccgtcaaccaggagattgtgcgctgtgacgagcgtggcagcatggggacctccggggaggcctgccgctgtaagaacaatgtggtggggcgcttgtgcaatgaatgtgctgacggctctttccacctgagtacccgaaaccccgatggctgcctcaagtgcttctgcatgggtgtcagtcgccactgcaccagctcttcatggagccgtgcccagttgcatggggcctctgaggagcctggtcacttcagcctgaccaacgccgcaagcacccacaccaccaacgagggcatcttctcccccacgcccggggaactgggattctcctccttccacagactcttatctggaccctacttctggagcctcccttcacgcttcctgggggacaaggtgacctcctatggaggagagctgcgcttcacagtgacccagaggtcccagccgggctccacacccctgcacgggcagccgttggtggtgctgcaaggtaacaacatcatcctagagcaccatgtggcccaggagcccagccccggccagcccagcaccttcattgtgcctttccgggagcaagcatggcagcggcccgatgggcagccagccacacgggagcacctgctgatggcactggcaggcatcgacaccctcctgatccgagcatcctacgcccagcagcccgctgagagcagggtctctggcatcagcatggacgtggctgtgcccgaggaaaccggccaggaccccgcgctggaagtggaacagtgctcctgcccacccgggtaccgtgggccgtcctgccaggactgtgacacaggctacacacgcacgcccagtggcctctacctgggtacctgtgaacgctgcagctgccatggccactcagaggcctgcgagccagaaacaggtgcctgccagggctgccagcatcacacggagggccctcggtgtgagcagtgccagccaggatactacggggacgcccagcgggggacaccacaggactgccagctgtgcccctgctacggagaccctgctgccggccaggctgcccacacttgttttctggacacagacggccaccccacctgtgatgcgtgctccccaggccacagtgggcgtcactgtgagaggtgcgcccctggctactatggcaaccccagccagggccagccatgccagagagacagccaggtgccagggcccataggctgcaactgtgacccccaaggcagcgtcagcagccagtgtgatgctgctggtcagtgccagtgcaaggcccaggtggaaggcctcacttgcagccactgccggccccaccacttccacctgagtgccagcaacccagacggctgcctgccctgcttctgtatgggcatcacccagcagtgcgccagctctgcctacacacgccacctgatctccacccactttgcccctggggacttccaaggctttgccctggtgaacccacagcgaaacagccgcctgacaggagaattcactgtggaacccgtgcccgagggtgcccagctctcttttggcaactttgcccaactcggccatgagtccttctactggcagctgccggagacataccagggagacaaggtgggccccagccaagcaccagggtcagccgtgactcagacatgagttcacctctgcgccgtctctcagcaggcaggcacctgccacctgcatggccatatcgtggttaggcacgtggcttttgcagtcccatagacattggtctgaaccccagctctgccgcttgccagccagacaccatttgataaacctcaacttcatggtggctgaggggattggagatcgtgcctggcacataataagtgctcagctgttcatgacttttagctttcatgcagttattctacaaacagatctgggagaggccgggaaatataaagacaagtgagacacagtttcagtgtcattcacgtgcccgctccgacttcactcatccacactgctggctctgtgcttgtgttggacacagtaattctcatgataggtcatgtgtgttgagctctcactatgtgctaggcagcatcctttacaaatcacaaatcacaactgtgtgagacaggtcctgctactgccccatttcataaataaggcaagaggggcttggtaacttacccaaagccccgcagctgggaggtgggaatgccgggatccaaacccaggtcagaggctgcccttcaaatgctctgccaaaggccagagcccacacctgtaattccagcactttggaaggctgaggcgggaggaccacttgagctcaggagtttgagaccagcctgggcaatgtgacgaaaccccgtctctacaaaaagtacaaaaaattagctgggcgtgttggtgcatgcctgtagtcccagctatttagggaggctgaggtgggaggatcgctggtacccaggatggggaggttgcagtgagccataattgcaccattgcactccagcctgggtgacagagtaagaccctgtctcaaaaaaaaaaaa

SEQ ID NO: 367546 - DNA, 2638 bp, Homo sapiens
  misc_feature (1383)..(1383): n is a, c, g, or t
  misc_feature (1392)..(1392): n is a, c, g, or t
ggccggcgagcgggcggctgcgggcggcgcggagcgggcggcgcggagcgagcgagcgagagagcggcgcgggccgggccatggggtggcgggcgccgggcgcgctgctgctggcgctgctgctgcacgggcggctgctggcggtgacccatgggctgagggcatacgatggcttgtctctgcctgaggacatagagaccgtcacagcaagccaaatgcgctggacacattcgtacctttctgatgatgaggacatgctggctgacagcatctcaggagacgacctgggcagtggggacctgggcagcggggacttccagatggtttatttccgagccctggtgaatttcactcgctccatcgagtacagccctcagctggaggatgcaggctccagagagtttcgagaggtgtccgaggctgtggtagacacgctggagtcggagtacttgaaaattcccggagaccaggttgtcagtgtggtgttcatcaaggagctggatggctgggtttttgtggagctcgatgtgggctcggaagggaatgcggatggtgctcagattcaggagatgctgctcagggtcatctccagcggctctgtggcctcctacgtcacctctccccagggattccagttccgacgcctgggcacagtgccccagttcccaagagcctgcacggaggccgagtttgcctgccacagctacaatgagtgtgtggccctggagtatcgctgtgaccggcggcccgactgcagggacatgtctgatgagctcaattgtgaggagccagtcctgggtatcagccccacattctctctccttgtggagacgacatctttaccgccccggccagagacaaccatcatgcgacagccaccagtcacccacgctcctcagcccctgcttcccggttccgtcaggcccctgccctgtgggccccaggaggccgcatgccgcaatgggcactgcatccccagagactacctctgcgacggacaggaggactgcgaggacggcagcgatgagctagactgtggccccccgccaccctgtgagcccaacgagttcccctgcgggaatggacattgtgccctcaagctgtggcgctgcgatggtgactttgactgtgaggaccgaactgatgaagccaactgccccaccaagcgtcctgaggaagtgtgcgggcccacacagttccgatgcgtctctaccaacatgtgcatcccagccagcttccactgtgacgaggagagcgactgtcctgaccggagcgacgagtttggctgcatgcccccccaggtggtgacacctccccgggagtccatccaggcttcccggggccagacagtgaccttcacctgcgtggccattggcgtccccnccccctttntcatcaattggaggctcaactggggccacatcccctctcatcccagggtgacagtgaccagcgagggtggccgtggcacactgatcatccgtgatgtgaaggagtcagaccagggtgcctacacctgtgaggccatgaacgcccggggcatggtgtttggcattcctgacggtgtccttgagctcgtcccacaacgaggcccctgccctgacggccacttctacctggagcacagcgccgcctgcctgccctgcttctgctttggcatcaccagcgtgtgccagagcacccgccgcttccgggaccagatcaggctgcgctttgaccaacccgatgacttcaagggtgtgaatgtgacaatgcctgcgcagcccggcacgccacccctctcctccacgcagctgcagatcgacccatccctgcacgagttccagctagtcgacctgtcccgccgcttcctcgtccacgactccttctgggctctgcctgaacagttcctgggcaacaaggtggactcctatggcggctccctgcgttacaacgtgcgctacgagttggcccgtggcatgctggagccagtgcagcggccggacgtggtcctcgtgggtgccgggtaccgcctcctctcccgaggccacacacccacccaacctggtgctctgaaccagcgccaggtccagttctctgaggagcactgggtccatgagtctggccggccggtgcagcgcgcggagctgctgcaggtgctgcagagcctggaggccgtgctcatccagaccgtgtacaacaccaagatggctagcgtgggacttagcgacatcgccatggataccaccgtcacccatgccaccagccatggccgtgcccacagtgtggaggagtgcagatgccccattggctattctggcttgtcctgcgagagctgtgatgcccacttcactcgggtgcctggtgggccctacctgggcacctgctctggttgcagttgcaatggccatgccagctcctgtgaccctgtgtatggccactgcctgaattgccagcacaacacggaggggccacagtgcaacaagtgcaaggctggcttctttggggacgccatgaaggccacggccacttcctgccggccctgcccttgcccatacatcgatgcctcccgcagattctcagacacttgcttcctggacacggatagcattcaacgcctccgagcctatcaacgccctcgggcattcaaagcctccgg

SEQ ID NO: 367547 - DNA, 1005 bp, Homo sapiens
ggccggcgagcgggcggctgcgggcggcgcggagcgggcggcgcggagcgagcgagcgagagagcggcgcgggccgggccatggggtggcgggcgccgggcgcgctgctgctggcgctgctgctgcacgggcggctgctggcggtgacccatgggctgagggcatacgatggcttgtctctgcctgaggacatagagaccgtcacagcaagccaaatgcgctggacacattcgtacctttctgatgatgaggacatgctggctgacagcatctcaggagacgacctgggcagtggggacctgggcagcggggacttccagatggtttatttccgagccctggtgaatttcactcgctccatcgagtacagccctcagctggaggatgcaggctccagagagtttcgagaggtgtccgaggctgtggtagacacgctggagtcggagtacttgaaaattcccggagaccaggttgtcagtgtggtgttcatcaaggagctggatggctgggtttttgtggagctcgatgtgggctcggaagggaatgcggatggtgctcagattcaggagatgctgctcagggtcatctccagcggctctgtggcctcctacgtcacctctccccagggattccagttccgacgcctgggcacaggtgagcctatcctggtgtctgggatcgcctcctccagactcgtggggtcccctttcagtgtctctgccataggctcccaacttgggcttgcacaccactagaaacagggagctcactactcctgagtctgccccatcgatctttacacaatcttggcttggtagagcacagactgtttcctctagcacatacccgttagacccgagttctgctccttccttctagacctctgcacattgacaataggtaatcaggcctttatttatcctgtacttccaagtccaaaacacattagtacttaataataatgagcaactgtttactgagcactgactgcctttatttccagcc

SEQ ID NO: 367548 - DNA, 348 bp, Homo sapiens
ggcgtgagccaccacgcccagcccaattgcaaagcattctatcagttgttttcaactccctgatgtcttattattttttctttatagaatccagaacttggaccagagctgccaagggacgtatatatgccaggcccatggaccttgggggaaggcccaggccagtgcccagctggttatccaaggtaggagggtggcttcaggcctctgctaagagcagggaacagagatgagaaaggcagagaggcacaaggcccagaccctgttccctaggaatccccctaaatgtgtcagaataaagagaattattccattttgccttgcttgtgtctagcatagagtaaaagg

SEQ ID NO: 367549 - DNA, 459 bp, Homo sapiens
gacctcaacctcacggcgcacggcatctcccactgccccacctgtcgggaccggccctgccaggtgaccccacaccccacacaccacctggctgccgtggcctccacccctagccatggctggcccctgtggggattatggggggtactgaatgttctcggccttacttctgggggctgctttgcagaatggcggtcagtgccatgactctgagagcagcagctacgtgtgcgtctgcccagctggcttcaccgggagccgctgtgagcactcgcaggccctgcactgccatccaggtacgcaccccgaccgccagtccgtgtcgccccagggcctgcctcttccctttgctgcctccccatatccaccaccatctcaaccactggggcacttccacaccccccactctcacctgagcactctccactcctcccatgtacccatcccccatctctgcta

SEQ ID NO: 367550 - DNA, 396 bp, Homo sapiens
ccttctgagaggcagtggttaaatcctggccttactgcctgctcagtgtcacttggtgtgagatacacttcactttcagggcctcagctgcctcatctgtgaaatggggtagtccaccctcctcagccccttgtgtgagagttgaatgaggctatgcatgtggaactcttagcacagtgccaggcatgcagtggcactgaggacacatgagttcacatgcctgttcttcccctcccctctcccctggtcctgaaggaggatcgggggagaggaaggagccactgcgttcctgactagaaatctgcccccacactcagggctgcccacacttgttttctggacacagacggccaccccacctgtgatgcgtgctccccaggccacagtgggcgtcac

SEQ ID NO: 367551 - DNA, 347 bp, Homo sapiens
cagatctgaagcgtctcagtgtccccaggatgtggcacaggcttggccaagagcaaacgctcaatgttggaaggtgggcctgaggcacagatgggaggtgggcccctggagccgtgggccaaggccagggccctcagtgctagtgcatttgcagctggatggcagcctgccacctgacagccgcctggagaacaacatgctgatgctgccctcagtccgaccccaggacgcaggtacctacgtctgcaccgccactaaccgccagggcaaggtcaaagcctttgcccacctgcaggtgccaggtaagacaccacccctaagaattggcagtgccctgcccactccct

SEQ ID NO: 367552 - DNA, 420 bp, Homo sapiens
atgcattgaccatgcgagctcctgcgaccctgttgtatggccgctagcccgaattgccgcgcgcagctcgaacgtgcctcaggacagcccgtgcacgcctgtattgtgtggagtcgccatgaaggccacggccacttcctgccggccctgcccttgcccatacatcgatgcctcccgcagattctcagacacttgcttcctggacacggatggccaagccacatgtgacgcctgtgccccaggctacactggccgccgctgtgagagctgtgcccccggatacgagggcaaccccatccagcccggcgggaagtgcaggcccgtcaaccaggagattgtgcgctgtgacgagcgtggcagcatggggacctccggggaggcctgccgctgtaaggcaacaagactgaaactccgtctcaa

SEQ ID NO: 367553 - DNA, 14328 bp, Homo sapiens
  misc_feature (1383)..(1383): n is a, c, g, or t
  misc_feature (1392)..(1392): n is a, c, g, or t
  misc_feature (5192)..(5194): n is a, c, g, or t
  misc_feature (9022)..(9022): n is a, c, g, or t
  misc_feature (9066)..(9066): n is a, c, g, or t
ggccggcgagcgggcggctgcgggcggcgcggagcgggcggcgcggagcgagcgagcgagagagcggcgcgggccgggccatggggtggcgggcgccgggcgcgctgctgctggcgctgctgctgcacgggcggctgctggcggtgacccatgggctgagggcatacgatggcttgtctctgcctgaggacatagagaccgtcacagcaagccaaatgcgctggacacattcgtacctttctgatgatgaggacatgctggctgacagcatctcaggagacgacctgggcagtggggacctgggcagcggggacttccagatggtttatttccgagccctggtgaatttcactcgctccatcgagtacagccctcagctggaggatgcaggctccagagagtttcgagaggtgtccgaggctgtggtagacacgctggagtcggagtacttgaaaattcccggagaccaggttgtcagtgtggtgttcatcaaggagctggatggctgggtttttgtggagctcgatgtgggctcggaagggaatgcggatggtgctcagattcaggagatgctgctcagggtcatctccagcggctctgtggcctcctacgtcacctctccccagggattccagttccgacgcctgggcacagtgccccagttcccaagagcctgcacggaggccgagtttgcctgccacagctacaatgagtgtgtggccctggagtatcgctgtgaccggcggcccgactgcagggacatgtctgatgagctcaattgtgaggagccagtcctgggtatcagccccacattctctctccttgtggagacgacatctttaccgccccggccagagacaaccatcatgcgacagccaccagtcacccacgctcctcagcccctgcttcccggttccgtcaggcccctgccctgtgggccccaggaggccgcatgccgcaatgggcactgcatccccagagactacctctgcgacggacaggaggactgcgaggacggcagcgatgagctagactgtggccccccgccaccctgtgagcccaacgagttcccctgcgggaatggacattgtgccctcaagctgtggcgctgcgatggtgactttgactgtgaggaccgaactgatgaagccaactgccccaccaagcgtcctgaggaagtgtgcgggcccacacagttccgatgcgtctctaccaacatgtgcatcccagccagcttccactgtgacgaggagagcgactgtcctgaccggagcgacgagtttggctgcatgcccccccaggtggtgacacctccccgggagtccatccaggcttcccggggccagacagtgaccttcacctgcgtggccattggcgtccccnccccctttntcatcaattggaggctcaactggggccacatcccctctcatcccagggtgacagtgaccagcgagggtggccgtggcacactgatcatccgtgatgtgaaggagtcagaccagggtgcctacacctgtgaggccatgaacgcccggggcatggtgtttggcattcctgacggtgtccttgagctcgtcccacaacgaggcccctgccctgacggccacttctacctggagcacagcgccgcctgcctgccctgcttctgctttggcatcaccagcgtgtgccagagcacccgccgcttccgggaccagatcaggctgcgctttgaccaacccgatgacttcaagggtgtgaatgtgacaatgcctgcgcagcccggcacgccacccctctcctccacgcagctgcagatcgacccatccctgcacgagttccagctagtcgacctgtcccgccgcttcctcgtccacgactccttctgggctctgcctgaacagttcctgggcaacaaggtggactcctatggcggctccctgcgttacaacgtgcgctacgagttggcccgtggcatgctggagccagtgcagcggccggacgtggtcctcgtgggtgccgggtaccgcctcctctcccgaggccacacacccacccaacctggtgctctgaaccagcgccaggtccagttctctgaggagcactgggtccatgagtctggccggccggtgcagcgcgcggagctgctgcaggtgctgcagagcctggaggccgtgctcatccagaccgtgtacaacaccaagatggctagcgtgggacttagcgacatcgccatggataccaccgtcacccatgccaccagccatggccgtgcccacagtgtggaggagtgcagatgccccattggctattctggcttgtcctgcgagagctgtgatgcccacttcactcgggtgcctggtgggccctacctgggcacctgctctggttgcagttgcaatggccatgccagctcctgtgaccctgtgtatggccactgcctgaattgccagcacaacacggaggggccacagtgcaacaagtgcaaggctggcttctttggggacgccatgaaggccacggccacttcctgccggccctgcccttgcccatacatcgatgcctcccgcagattctcagacacttgcttcctggacacggatggccaagccacatgtgacgcctgtgccccaggctacactggccgccgctgtgagagctgtgcccccggatacgagggcaaccccatccagcccggcgggaagtgcaggcccgtcaaccaggagattgtgcgctgtgacgagcgtggcagcatggggacctccggggaggcctgccgctgtaagaacaatgtggtggggcgcttgtgcaatgaatgtgctgacggctctttccacctgagtacccgaaaccccgatggctgcctcaagtgcttctgcatgggtgtcagtcgccactgcaccagctcttcatggagccgtgcccagttgcatggggcctctgaggagcctggtcacttcagcctgaccaacgccgcaagcacccacaccaccaacgagggcatcttctcccccacgcccggggaactgggattctcctccttccacagactcttatctggaccctacttctggagcctcccttcacgcttcctgggggacaaggtgacctcctatggaggagagctgcgcttcacagtgacccagaggtcccagccgggctccacacccctgcacgggcagccgttggtggtgctgcaaggtaacaacatcatcctagagcaccatgtggcccaggagcccagccccggccagcccagcaccttcattgtgcctttccgggagcaagcatggcagcggcccgatgggcagccagccacacgggagcacctgctgatggcactggcaggcatcgacaccctcctgatccgagcatcctacgcccagcagcccgctgagagcagggtctctggcatcagcatggacgtggctgtgcccgaggaaaccggccaggaccccgcgctggaagtggaacagtgctcctgcccacccgggtaccgtgggccgtcctgccaggactgtgacacaggctacacacgcacgcccagtggcctctacctgggtacctgtgaacgctgcagctgccatggccactcagaggcctgcgagccagaaacaggtgcctgccagggctgccagcatcacacggagggccctcggtgtgagcagtgccagccaggatactacggggacgcccagcgggggacaccacaggactgccagctgtgcccctgctacggagaccctgctgccggccaggctgcccacacttgttttctggacacagacggccaccccacctgtgatgcgtgctccccaggccacagtgggcgtcactgtgagaggtgcgcccctggctactatggcaaccccagccagggccagccatgccagagagacagccaggtgccagggcccataggctgcaactgtgacccccaaggcagcgtcagcagccagtgtgatgctgctggtcagtgccagtgcaaggcccaggtggaaggcctcacttgcagccactgccggccccaccacttccacctgagtgccagcaacccagacggctgcctgccctgcttctgtatgggcatcacccagcagtgcgccagctctgcctacacacgccacctgatctccacccactttgcccctggggacttccaaggctttgccctggtgaacccacagcgaaacagccgcctgacaggagaattcactgtggaacccgtgcccgagggtgcccagctctcttttggcaactttgcccaactcggccatgagtccttctactggcagctgccggagacataccagggagacaaggtggcggcctacggtgggaagttgcgatacaccctctcctacacagcaggcccacagggcagcccactctctgaccccgatgtgcagatcacgggcaacaacatcatgctagtggcctcccagccagcgctgcagggccctgagaggaggagctacgagatcatgttccgagaggaattctggcgccggcccgatgggcagccggccacacgcgagcacctcctgatggcactggccgacctggatgagctcctgatccgggccacgttctcctccgtgccgctggtggccagcatcagcgcagtcagcctggaggtcgcccagccggggccctcaaacagaccccgcgccctcgaggtggaggagtgccgctgcccgccaggctacatcggtctgtcctgccaggactgtgcccccggctacacgcgcaccgggagtgggctctacctcggccactgcgagctatgtgaatgcaatggccactcagacctgtgccacccagagactggggcctgctcgcaatgccagcacaacgccgcaggggagttctgcgagctttgtgcccctggctactacggagatgccacagccgggacgcctgaggactgccagccctgtgcctgcccactgaccaacccagagaacatgttttcccgcacctgtgagagcctgggagccggcgggtaccgctgcacggcctgcgaacccggctacactggccagtactgtgagcagtgtggcccaggttacgtgggtaaccccagtgtgcaagggggccagtgcctgccagagacaaaccaagccccactggtggtcgaggtccatcctgctcgaagcatagtgccccaaggtggctcccactccctgcggtgtcaggtcagtgggagnnnaccccactacttctattggtcccgtgaggatgggcggcctgtgcccagcggcacccagcagcgacatcaaggctccgagctccacttccccagcgtccagccctcggatgctggggtctacatttgcacctgccgtaatctccaccaatccaataccagccgggcagagctgctggtcactgaggctccaagcaagcccatcacagtgactgtggaggagcagcggagccagagcgtgcgccccggagctgacgtcaccttcatctgcacagccaaaagcaagtccccagcctataccctggtgtggacccgcctgcacaacgggaaactgcccacccgagccatggatttcaatggcatcctgaccattcgcaacgtccagctgagtgatgcaggcacctacgtgtgcaccggctccaacatgtttgccatggaccagggcacagccactctacatgtgcaggcctcgggcaccttgtccgcccccgtggtctccatccatccgccacagctcacagtgcagcccgggcaactggcggagttccgctgcagcgccacagggagccccacgcccaccctcgagtggacagggggccccggcggccagctccctgcgaaggcacaaatccacggcggcatcctgcgcctgccagctgtcgagcccacggatcaggcccagtacttgtgccgagcccacagcagcgctgggcagcaggtggccagggctgtgctccacgtgcatgggggcggtgggcccagagtccaagtgagcccagagaggacccaggtccacgcaggccgcaccgtcaggctgtactgcagggctgcaggcgtgcctagcgccaccatcacctggaggaaggaagggggcagcctcccaccacaggcccggtcagagcgcacagacatcgcgacactgctcatcccagccatcacgactgctgacgccggcttctacctctgcgtggccaccagccctgcaggcactgcccaggcccggatccaagtggttgtcctttcagcctcagatgccagcccaccgccggtcaagattgagtcctcatcgccttctgtgacagaagggcaaacactcgacctcaactgtgtggtggcagggtcagcccatgcccaggtcacctggtacaggcgagggggtagcctgcctccccacacccaggtgcacggctcccgtctgcggctcccccaggtctcaccagctgattctggagaatatgtgtgccgtgtggagaatggatcgggccccaaggaggcctccattactgtgtctgtgctccacggcacccattctggccccagctacaccccagtgcccggcagcacccggcccatccgcatcgagccctcctcctcacacgtggcggaagggcagaccctggatctgaactgcgtggtgcccgggcaggcccacgcccaggtcacgtggcacaagcgtgggggcagcctccctgcccggcaccagacccacggctcgctgctgcggctgcaccaggtgaccccggccgactcaggcgagtatgtgtgccatgtggtgggcacctccggccccctagaggcctcagtcctggtcaccatcgaagcctctgtcatccctggacccatcccacctgtcaggatcgagtcttcatcctccacagtggccgagggccagaccctggatctgagctgcgtggtggcagggcaggcccacgcccaggtcacatggtacaagcgtgggggcagcctccctgcccggcaccaggttcgtggctcccgcctgtacatcttccaggcctcacctgccgatgcgggacagtacgtctgccgggccagcaacggcatggaggcctccatcacggtcacagtaactgggacccagggggccaacttagcctaccctgccggcagcacccagcccatccgcatcgagccctcctcctcgcaagtggcggaagggcagaccctggatctgaactgcgtggtgcccgggcagtcccatgcccaggtcacgtggcacaagcgtgggggcagcctccctgtccggcaccagacccacggctccctgctgagactctaccaagcgtcccccgccgactcgggcgagtacgtgtgccgagtgttgggcagctccgtgcctctagaggcctctgtcctggtcaccattgagcctgcgggctcagtgcctgcacttggggtcacccccacggtccggatcgagtcatcgtcttcgcaagtggccgaggggcagaccctggacctgaactgcctcgttgctggtcaggcccatgcccaggtcacgtggcacaagcgcgggggcagcctcccggcccggcaccaggtgcatggctcgaggctacgcctgctccaggtgaccccagctgattcaggggagtacgtgtgccgtgtggtcggcagctcaggtacccaggaagcctcagtccttgtcaccatccagcagcgccttagtggctcccactcccagggtgtggcgtaccccgtccgcatcgagtcctcctcagcctccctggccaatggacacaccctggacctcaactgcctggttgccagccaggctccccacaccatcacctggtataagcgtggaggcagcttacccagccggcaccagatcgtgggctcccggctgcggatccctcaggtgactccggcagactcgggcgagtacgtgtgtcacgtcagtaacggtgcaggctcccgggagacctcgctcatcgtcaccatccagggcagcggttcctcccacgtgcccagcgtctccccaccgatcaggatcgagtcgtcttcccccacggtggtggaagggcagaccttggatctgaactgcgtggtcgccaggcagccccaggctatcatcacatggtacaagcgtgggggcagccttccctcccgacaccagacccatggctcccacctgcggttgcaccaaatgtctgtggctgactcgggcgagtatgtgtgccgggccaacaacaacatcgatgccctggaggcctccatcgtcatctccgtctcccctagcgccggcagcccctccgcccctggcagctccatgcccatcagaattgagtcatcctcctcacacgtggccgaaggggagaccctggatctgaactgcgtggtccccgggcaggcccatgcccaggtcacttggcacaagcgtgggggcagcctccccagtcaccatcagacccgcggctcacggctgcggctgcaccatgtgtccccggccgactcgggtgaatacgtgtgccgggtgatgggcagctctggccccctggaggcctcagtcctggtcaccatcgaagcctctggctcaagtgctgtccacgtccccgccccaggtggagccccacccatccgcatcgagccctcctcctcccgagtggcagaagggcagaccctggatctgaagtgcgtggtgcccgggcaggcccacgcccaggtcacgtggcacaagcgtggaggaaacctccctgcccggcaccaggtccacggcccactgctgaggctgaaccaggtgtccccggctgactctggcgagtactcgtgccaagtgaccggaagctcaggcaccctggaggcatctgtcctggtcacaattgagccctccagcccaggacccattcctgctccaggactggcccagcccatctacatcgaggcctcctcttcacacgtgactgaagggcagactctggatctgaactgtgtggtgcccgggcaggcccatgcccaggtcacgtggtacaagcgcgggggcagcctccccgcccggcaccagacccatggctcccagctgcggctccaccncgtctcccctgccgactcaggcgagtatgtgtgtcgtgcagccngcggcccaggccctgagcaagaagcctccttcacagtcaccgtcccgcccagtgaggggtcttcctaccgccttaggagcccggtcatctccatcgacccgcccagcagcaccgtgcagcagggccaggatgccagcttcaagtgcctcatccatgacggggcagcccccatcagcctcgagtggaagacccggaaccaggagctggaggacaacgtccacatcagtcccaatggctccatcatcaccatcgtgggcacccggcccagcaaccacggtacctaccgctgcgtggcctccaatgcctacggtgtggcccagagtgtggtgaacctcagtgtgcacgggccccctacagtgtccgtgctccccgagggccccgtgtgggtgaaagtgggaaaggctgtcaccctggagtgtgtcagtgccggggagccccgctcctctgctcgttggacccggatcagcagcacccctgccaagttggagcagcggacatatgggctcatggacagccacgcggtgctgcagatttcatcagctaaaccatcagatgcgggcacttatgtgtgccttgctcagaatgcactaggcacagcacagaagcaggtggaggtgatcgtggacacgggcgccatggccccaggggcccctcaggtccaagctgaagaagctgagctgactgtggaggctggacacacggccaccttgcgctgctcagccacaggcagccccgcgcccaccatccactggtccaagctgcgttccccactgccctggcagcaccggctggaaggtgacacactcatcataccccgggtagcccagcaggactcgggccagtacatctgcaatgccactagccctgctgggcacgctgaggccaccatcatcctgcacgtggagagcccaccatatgccaccacggtcccagagcacgcttcggtgcaggcaggggagacggtgcagctccagtgcctggctcacgggacacccccactcaccttccagtggagccgcgtgggcagcagccttcctgggagggcgaccgccaggaacgagctgctgcactttgagcgtgcagcccctgaggactcaggccgctaccgctgccgggtcaccaacaaggtgggctcagccgaggcctttgcccagctgctcgtccaaggccctcccggctctctccctgccacctccatcccagcagggtccacgcccaccgtgcaggtcacgcctcagctagagaccaagagcattggggccagcgttgagttccactgtgctgtgcccagcgaccggggtacccagctccgttggttcaaggaagggggtcagctgcctccgggtcacagcgtgcaggatggggtgctccgaatccagaacttggaccagagctgccaagggacgtatatatgccaggcccatggaccttgggggaaggcccaggccagtgcccagctggttatccaagccctgccctcggtgctcatcaacatccggacctctgtgcagaccgtggtggttggccacgccgtggagttcgaatgcctggcactgggtgaccccaagcctcaggtgacatggagcaaagttggagggcacctgcggccaggcattgtgcagagcggaggtgtcgtcaggatcgcccacgtagagctggctgatgcgggacagtatcgctgcactgccaccaacgcagctggcaccacacaatcccacgtcctgctgcttgtgcaagccttgccccagatctcaatgccccaagaagtccgtgtgcctgctggttctgcagctgtcttcccctgcatagcctcaggctaccccactcctgacatcagctggagcaagctggatggcagcctgccacctgacagccgcctggagaacaacatgctgatgctgccctcagtccgaccccaggacgcaggtacctacgtctgcaccgccactaaccgccagggcaaggtcaaagcctttgcccacctgcaggtgccagagcgggtggtgccctacttcacgcagaccccctactccttcctaccgctgcccaccatcaaggatgcctacaggaagttcgagatcaagatcaccttccggcccgactcagccgatgggatgctgctgtacaatgggcagaagcgagtcccagggagccccaccaacctggccaaccggcagcccgacttcatctccttcggcctcgtggggggaaggcccgagttccggttcgatgcaggctcaggcatggccaccatccgccatcccacaccactggccctgggccatttccacaccgtgaccctgctgcgcagcctcacccagggctccctgattgtgggtgacctggccccggtcaatgggacctcccagggcaagttccagggcctggatctgaacgaggaactctacctgggtggctatcctgactatggtgccatccccaaggcggggctgagcagcggcttcataggctgtgtccgggagctgcgcatccagggcgaggagatcgtcttccatgacctcaacctcacggcgcacggcatctcccactgccccacctgtcgggaccggccctgccagaatggcggtcagtgccatgactctgagagcagcagctacgtgtgcgtctgcccagctggcttcaccgggagccgctgtgagcactcgcaggccctgcactgccatccagaggcctgtgggcccgacgccacctgtgtgaaccggcctgacggtcgaggctacacctgccgctgccacctgggccgctcggggttgcggtgtgaggaaggtgtgacagtgaccaccccctcgctgtcgggtgctggctcctacctggcactgcccgccctcaccaacacacaccacgagctacgcctggacgtggagttcaagccactcgcccctgacggggtcctgctgttcagcggggggaagagcgggcctgtggaggacttcgtgtccctggcgatggtgggcggccacctggagttccgctatgagttggggtcagggctggccgttctgcggagcgccgagccgctggccctgggccgctggcaccgtgtgtctgcagagcgtctcaacaaggacggcagcctgcgggtgaatggtggacgccctgtgctgcgctcctcgcccggcaagagccagggcctcaacctgcacaccctgctctacctggggggtgtggagccttccgtgccactgtccccggccaccaacatgagcgctcacttccgcggctgtgtgggcgaggtgtcagtgaatggcaaacggctggacctcacctacagtttcctaggcagccagggcatcgggcaatgctatgatagctccccatgtgagcgccagccttgccaacatggtgccacgtgcatgcccgctggcgagtatgagttccagtgcctgtgtcgagatggattcaaaggagacctgtgtgagcacgaggagaacccctgccagctccgtgaaccctgtctgcatgggggcacctgccagggcacccgctgcctctgcctccctggcttctctggcccacgctgccaacaaggctctggacatggcatagcagagtccgactggcatcttgaaggcagcgggggcaatgatgcccctgggcagtacggagcctatttccacgatgatggcttcctcgccttccctggccatgtcttctccaggagcctgcccgaggtgcccgagaccatcgagctggaggttcggaccagcacagccagtggcctcctgctctggcagggtgtggaggtgggagaggccggccaaggcaaggacttcatcagcctcgggcttcaagacgggcaccttgtcttcaggtaccagctgggtagtggggaggcccgcctggtctctgaggaccccatcaatgacggcgagtggcaccgggtgacagcactgcgggagggccgcagaggttccatccaagtcgacggtgaggagctggtcagcggccggtccccaggtcccaacgtggcagtcaacgccaagggcagcgtctacatcggcggagcccctgacgtggccacgctgaccgggggcagattctcctcgggcatcacaggctgtgtcaagaacctggtgctgcactcggcccgacccggcgccccgcccccacagcccctggacctgcagcaccgcgcccaggccggggccaacacacgcccctgcccctcgtaggcacctgcctgccccacacggactcccgggccacgccccagcccgacaatgtcgagtatattattattaatattattatgaatttttgtaagaaaccgaggcgatgccacgctttgctgctaccgccctgggctggactggaggtgggcatgccaccctcacacacacagctgggcaaagccacaaggctggccagcaaggcaggttggatgggagtgggcacctcagaaagtcaccaggacttggggtcaggaacagtggctgggtgggcccagaactgcccccactgtccccctacccaccgatggagcccccagatagagctgggtggcctgtttctgcagcccttgggcagttctcactcctaggagagccaacctcggcttgtgggctggtgccccacagctacctgagacgggcatcgcaggagtctctgccacccactcaggattgggaattgtctttagtgccggctgtggagcaaaaggcagctcacccctgggcaggcggtccccatccccaccagctcgtttttcagcacccccacccacctccacccagcccctggcacctcctctggcagactccccctcctaccacgtcctcctggcctgcattcccaccccctcctgccagcacacagcctggggtccctccctcaggggctgtaagggaaggcccaccccaactcttaccaggagctgctacaggcagagcccagcactgatagggccccgcccaccgggccccgcccaccccaggccacatccccacccatctggaagtgaaggcccagggactcctccaacagacaacggacggacggatgccgctggtgctcaggaagagctagtgccttaggtgggggaaggcaggactcacgactgagagagagaggagggggatatgaccaccctgccccatctgcaggagcctgaagatccagctcaagtgccatcctgccagtggcccccagactgtggggttgggacgcctggcctctgtgtcctagaagggaccctcctgtgttcatctctgttttctaatacgcaccggttgttttttttcg

SEQ ID NO: 367554 - DNA, 11611 bp, Homo sapiens
  misc_feature (43)..(43): n is a, c, g, or t
  misc_feature (2472)..(2474): n is a, c, g, or t
  misc_feature (6302)..(6302): n is a, c, g, or t
  misc_feature (6346)..(6346): n is a, c, g, or t
ccgtgttatgagaagtggagatggcgactcgtagaggctgcgntgtagaacaatgtggtggggcgcttgtgcaatgaatgtgctgacggctctttccacctgagtacccgaaaccccgatggctgcctcaagtgcttctgcatgggtgtcagtcgccactgcaccagctcttcatggagccgtgcccagttgcatggggcctctgaggagcctggtcacttcagcctgaccaacgccgcaagcacccacaccaccaacgagggcatcttctcccccacgcccggggaactgggattctcctccttccacagactcttatctggaccctacttctggagcctcccttcacgcttcctgggggacaaggtgacctcctatggaggagagctgcgcttcacagtgacccagaggtcccagccgggctccacacccctgcacgggcagccgttggtggtgctgcaaggtaacaacatcatcctagagcaccatgtggcccaggagcccagccccggccagcccagcaccttcattgtgcctttccgggagcaagcatggcagcggcccgatgggcagccagccacacgggagcacctgctgatggcactggcaggcatcgacaccctcctgatccgagcatcctacgcccagcagcccgctgagagcagggtctctggcatcagcatggacgtggctgtgcccgaggaaaccggccaggaccccgcgctggaagtggaacagtgctcctgcccacccgggtaccgtgggccgtcctgccaggactgtgacacaggctacacacgcacgcccagtggcctctacctgggtacctgtgaacgctgcagctgccatggccactcagaggcctgcgagccagaaacaggtgcctgccagggctgccagcatcacacggagggccctcggtgtgagcagtgccagccaggatactacggggacgcccagcgggggacaccacaggactgccagctgtgcccctgctacggagaccctgctgccggccaggctgcccacacttgttttctggacacagacggccaccccacctgtgatgcgtgctccccaggccacagtgggcgtcactgtgagaggtgcgcccctggctactatggcaaccccagccagggccagccatgccagagagacagccaggtgccagggcccataggctgcaactgtgacccccaaggcagcgtcagcagccagtgtgatgctgctggtcagtgccagtgcaaggcccaggtggaaggcctcacttgcagccactgccggccccaccacttccacctgagtgccagcaacccagacggctgcctgccctgcttctgtatgggcatcacccagcagtgcgccagctctgcctacacacgccacctgatctccacccactttgcccctggggacttccaaggctttgccctggtgaacccacagcgaaacagccgcctgacaggagaattcactgtggaacccgtgcccgagggtgcccagctctcttttggcaactttgcccaactcggccatgagtccttctactggcagctgccggagacataccagggagacaaggtggcggcctacggtgggaagttgcgatacaccctctcctacacagcaggcccacagggcagcccactctctgaccccgatgtgcagatcacgggcaacaacatcatgctagtggcctcccagccagcgctgcagggccctgagaggaggagctacgagatcatgttccgagaggaattctggcgccggcccgatgggcagccggccacacgcgagcacctcctgatggcactggccgacctggatgagctcctgatccgggccacgttctcctccgtgccgctggtggccagcatcagcgcagtcagcctggaggtcgcccagccggggccctcaaacagaccccgcgccctcgaggtggaggagtgccgctgcccgccaggctacatcggtctgtcctgccaggactgtgcccccggctacacgcgcaccgggagtgggctctacctcggccactgcgagctatgtgaatgcaatggccactcagacctgtgccacccagagactggggcctgctcgcaatgccagcacaacgccgcaggggagttctgcgagctttgtgcccctggctactacggagatgccacagccgggacgcctgaggactgccagccctgtgcctgcccactgaccaacccagagaacatgttttcccgcacctgtgagagcctgggagccggcgggtaccgctgcacggcctgcgaacccggctacactggccagtactgtgagcagtgtggcccaggttacgtgggtaaccccagtgtgcaagggggccagtgcctgccagagacaaaccaagccccactggtggtcgaggtccatcctgctcgaagcatagtgccccaaggtggctcccactccctgcggtgtcaggtcagtgggagnnnaccccactacttctattggtcccgtgaggatgggcggcctgtgcccagcggcacccagcagcgacatcaaggctccgagctccacttccccagcgtccagccctcggatgctggggtctacatttgcacctgccgtaatctccaccaatccaataccagccgggcagagctgctggtcactgaggctccaagcaagcccatcacagtgactgtggaggagcagcggagccagagcgtgcgccccggagctgacgtcaccttcatctgcacagccaaaagcaagtccccagcctataccctggtgtggacccgcctgcacaacgggaaactgcccacccgagccatggatttcaatggcatcctgaccattcgcaacgtccagctgagtgatgcaggcacctacgtgtgcaccggctccaacatgtttgccatggaccagggcacagccactctacatgtgcaggcctcgggcaccttgtccgcccccgtggtctccatccatccgccacagctcacagtgcagcccgggcaactggcggagttccgctgcagcgccacagggagccccacgcccaccctcgagtggacagggggccccggcggccagctccctgcgaaggcacaaatccacggcggcatcctgcgcctgccagctgtcgagcccacggatcaggcccagtacttgtgccgagcccacagcagcgctgggcagcaggtggccagggctgtgctccacgtgcatgggggcggtgggcccagagtccaagtgagcccagagaggacccaggtccacgcaggccgcaccgtcaggctgtactgcagggctgcaggcgtgcctagcgccaccatcacctggaggaaggaagggggcagcctcccaccacaggcccggtcagagcgcacagacatcgcgacactgctcatcccagccatcacgactgctgacgccggcttctacctctgcgtggccaccagccctgcaggcactgcccaggcccggatccaagtggttgtcctttcagcctcagatgccagcccaccgccggtcaagattgagtcctcatcgccttctgtgacagaagggcaaacactcgacctcaactgtgtggtggcagggtcagcccatgcccaggtcacctggtacaggcgagggggtagcctgcctccccacacccaggtgcacggctcccgtctgcggctcccccaggtctcaccagctgattctggagaatatgtgtgccgtgtggagaatggatcgggccccaaggaggcctccattactgtgtctgtgctccacggcacccattctggccccagctacaccccagtgcccggcagcacccggcccatccgcatcgagccctcctcctcacacgtggcggaagggcagaccctggatctgaactgcgtggtgcccgggcaggcccacgcccaggtcacgtggcacaagcgtgggggcagcctccctgcccggcaccagacccacggctcgctgctgcggctgcaccaggtgaccccggccgactcaggcgagtatgtgtgccatgtggtgggcacctccggccccctagaggcctcagtcctggtcaccatcgaagcctctgtcatccctggacccatcccacctgtcaggatcgagtcttcatcctccacagtggccgagggccagaccctggatctgagctgcgtggtggcagggcaggcccacgcccaggtcacatggtacaagcgtgggggcagcctccctgcccggcaccaggttcgtggctcccgcctgtacatcttccaggcctcacctgccgatgcgggacagtacgtctgccgggccagcaacggcatggaggcctccatcacggtcacagtaactgggacccagggggccaacttagcctaccctgccggcagcacccagcccatccgcatcgagccctcctcctcgcaagtggcggaagggcagaccctggatctgaactgcgtggtgcccgggcagtcccatgcccaggtcacgtggcacaagcgtgggggcagcctccctgtccggcaccagacccacggctccctgctgagactctaccaagcgtcccccgccgactcgggcgagtacgtgtgccgagtgttgggcagctccgtgcctctagaggcctctgtcctggtcaccattgagcctgcgggctcagtgcctgcacttggggtcacccccacggtccggatcgagtcatcgtcttcgcaagtggccgaggggcagaccctggacctgaactgcctcgttgctggtcaggcccatgcccaggtcacgtggcacaagcgcgggggcagcctcccggcccggcaccaggtgcatggctcgaggctacgcctgctccaggtgaccccagctgattcaggggagtacgtgtgccgtgtggtcggcagctcaggtacccaggaagcctcagtccttgtcaccatccagcagcgccttagtggctcccactcccagggtgtggcgtaccccgtccgcatcgagtcctcctcagcctccctggccaatggacacaccctggacctcaactgcctggttgccagccaggctccccacaccatcacctggtataagcgtggaggcagcttacccagccggcaccagatcgtgggctcccggctgcggatccctcaggtgactccggcagactcgggcgagtacgtgtgtcacgtcagtaacggtgcaggctcccgggagacctcgctcatcgtcaccatccagggcagcggttcctcccacgtgcccagcgtctccccaccgatcaggatcgagtcgtcttcccccacggtggtggaagggcagaccttggatctgaactgcgtggtcgccaggcagccccaggctatcatcacatggtacaagcgtgggggcagccttccctcccgacaccagacccatggctcccacctgcggttgcaccaaatgtctgtggctgactcgggcgagtatgtgtgccgggccaacaacaacatcgatgccctggaggcctccatcgtcatctccgtctcccctagcgccggcagcccctccgcccctggcagctccatgcccatcagaattgagtcatcctcctcacacgtggccgaaggggagaccctggatctgaactgcgtggtccccgggcaggcccatgcccaggtcacttggcacaagcgtgggggcagcctccccagtcaccatcagacccgcggctcacggctgcggctgcaccatgtgtccccggccgactcgggtgaatacgtgtgccgggtgatgggcagctctggccccctggaggcctcagtcctggtcaccatcgaagcctctggctcaagtgctgtccacgtccccgccccaggtggagccccacccatccgcatcgagccctcctcctcccgagtggcagaagggcagaccctggatctgaagtgcgtggtgcccgggcaggcccacgcccaggtcacgtggcacaagcgtggaggaaacctccctgcccggcaccaggtccacggcccactgctgaggctgaaccaggtgtccccggctgactctggcgagtactcgtgccaagtgaccggaagctcaggcaccctggaggcatctgtcctggtcacaattgagccctccagcccaggacccattcctgctccaggactggcccagcccatctacatcgaggcctcctcttcacacgtgactgaagggcagactctggatctgaactgtgtggtgcccgggcaggcccatgcccaggtcacgtggtacaagcgcgggggcagcctccccgcccggcaccagacccatggctcccagctgcggctccaccncgtctcccctgccgactcaggcgagtatgtgtgtcgtgcagccngcggcccaggccctgagcaagaagcctccttcacagtcaccgtcccgcccagtgaggggtcttcctaccgccttaggagcccggtcatctccatcgacccgcccagcagcaccgtgcagcagggccaggatgccagcttcaagtgcctcatccatgacggggcagcccccatcagcctcgagtggaagacccggaaccaggagctggaggacaacgtccacatcagtcccaatggctccatcatcaccatcgtgggcacccggcccagcaaccacggtacctaccgctgcgtggcctccaatgcctacggtgtggcccagagtgtggtgaacctcagtgtgcacgggccccctacagtgtccgtgctccccgagggccccgtgtgggtgaaagtgggaaaggctgtcaccctggagtgtgtcagtgccggggagccccgctcctctgctcgttggacccggatcagcagcacccctgccaagttggagcagcggacatatgggctcatggacagccacgcggtgctgcagatttcatcagctaaaccatcagatgcgggcacttatgtgtgccttgctcagaatgcactaggcacagcacagaagcaggtggaggtgatcgtggacacgggcgccatggccccaggggcccctcaggtccaagctgaagaagctgagctgactgtggaggctggacacacggccaccttgcgctgctcagccacaggcagccccgcgcccaccatccactggtccaagctgcgttccccactgccctggcagcaccggctggaaggtgacacactcatcataccccgggtagcccagcaggactcgggccagtacatctgcaatgccactagccctgctgggcacgctgaggccaccatcatcctgcacgtggagagcccaccatatgccaccacggtcccagagcacgcttcggtgcaggcaggggagacggtgcagctccagtgcctggctcacgggacacccccactcaccttccagtggagccgcgtgggcagcagccttcctgggagggcgaccgccaggaacgagctgctgcactttgagcgtgcagcccctgaggactcaggccgctaccgctgccgggtcaccaacaaggtgggctcagccgaggcctttgcccagctgctcgtccaaggccctcccggctctctccctgccacctccatcccagcagggtccacgcccaccgtgcaggtcacgcctcagctagagaccaagagcattggggccagcgttgagttccactgtgctgtgcccagcgaccggggtacccagctccgttggttcaaggaagggggtcagctgcctccgggtcacagcgtgcaggatggggtgctccgaatccagaacttggaccagagctgccaagggacgtatatatgccaggcccatggaccttgggggaaggcccaggccagtgcccagctggttatccaagccctgccctcggtgctcatcaacatccggacctctgtgcagaccgtggtggttggccacgccgtggagttcgaatgcctggcactgggtgaccccaagcctcaggtgacatggagcaaagttggagggcacctgcggccaggcattgtgcagagcggaggtgtcgtcaggatcgcccacgtagagctggctgatgcgggacagtatcgctgcactgccaccaacgcagctggcaccacacaatcccacgtcctgctgcttgtgcaagccttgccccagatctcaatgccccaagaagtccgtgtgcctgctggttctgcagctgtcttcccctgcatagcctcaggctaccccactcctgacatcagctggagcaagctggatggcagcctgccacctgacagccgcctggagaacaacatgctgatgctgccctcagtccgaccccaggacgcaggtacctacgtctgcaccgccactaaccgccagggcaaggtcaaagcctttgcccacctgcaggtgccagagcgggtggtgccctacttcacgcagaccccctactccttcctaccgctgcccaccatcaaggatgcctacaggaagttcgagatcaagatcaccttccggcccgactcagccgatgggatgctgctgtacaatgggcagaagcgagtcccagggagccccaccaacctggccaaccggcagcccgacttcatctccttcggcctcgtggggggaaggcccgagttccggttcgatgcaggctcaggcatggccaccatccgccatcccacaccactggccctgggccatttccacaccgtgaccctgctgcgcagcctcacccagggctccctgattgtgggtgacctggccccggtcaatgggacctcccagggcaagttccagggcctggatctgaacgaggaactctacctgggtggctatcctgactatggtgccatccccaaggcggggctgagcagcggcttcataggctgtgtccgggagctgcgcatccagggcgaggagatcgtcttccatgacctcaacctcacggcgcacggcatctcccactgccccacctgtcgggaccggccctgccagaatggcggtcagtgccatgactctgagagcagcagctacgtgtgcgtctgcccagctggcttcaccgggagccgctgtgagcactcgcaggccctgcactgccatccagaggcctgtgggcccgacgccacctgtgtgaaccggcctgacggtcgaggctacacctgccgctgccacctgggccgctcggggttgcggtgtgaggaaggtgtgacagtgaccaccccctcgctgtcgggtgctggctcctacctggcactgcccgccctcaccaacacacaccacgagctacgcctggacgtggagttcaagccactcgcccctgacggggtcctgctgttcagcggggggaagagcgggcctgtggaggacttcgtgtccctggcgatggtgggcggccacctggagttccgctatgagttggggtcagggctggccgttctgcggagcgccgagccgctggccctgggccgctggcaccgtgtgtctgcagagcgtctcaacaaggacggcagcctgcgggtgaatggtggacgccctgtgctgcgctcctcgcccggcaagagccagggcctcaacctgcacaccctgctctacctggggggtgtggagccttccgtgccactgtccccggccaccaacatgagcgctcacttccgcggctgtgtgggcgaggtgtcagtgaatggcaaacggctggacctcacctacagtttcctaggcagccagggcatcgggcaatgctatgatagctccccatgtgagcgccagccttgccaacatggtgccacgtgcatgcccgctggcgagtatgagttccagtgcctgtgtcgagatggattcaaaggagacctgtgtgagcacgaggagaacccctgccagctccgtgaaccctgtctgcatgggggcacctgccagggcacccgctgcctctgcctccctggcttctctggcccacgctgccaacaaggctctggacatggcatagcagagtccgactggcatcttgaaggcagcgggggcaatgatgcccctgggcagtacggagcctatttccacgatgatggcttcctcgccttccctggccatgtcttctccaggagcctgcccgaggtgcccgagaccatcgagctggaggttcggaccagcacagccagtggcctcctgctctggcagggtgtggaggtgggagaggccggccaaggcaaggacttcatcagcctcgggcttcaagacgggcaccttgtcttcaggtaccagctgggtagtggggaggcccgcctggtctctgaggaccccatcaatgacggcgagtggcaccgggtgacagcactgcgggagggccgcagaggttccatccaagtcgacggtgaggagctggtcagcggccggtccccaggtcccaacgtggcagtcaacgccaagggcagcgtctacatcggcggagcccctgacgtggccacgctgaccgggggcagattctcctcgggcatcacaggctgtgtcaagaacctggtgctgcactcggcccgacccggcgccccgcccccacagcccctggacctgcagcaccgcgcccaggccggggccaacacacgcccctgcccctcgtaggcacctgcctgccccacacggactcccgggccacgccccagcccgacaatgtcgagtatattattattaatattattatgaatttttgtaagaaaccgaggcgatgccacgctttgctgctaccgccctgggctggactggaggtgggcatgccaccctcacacacacagctgggcaaagccacaaggctggccagcaaggcaggttggatgggagtgggcacctcagaaagtcaccaggacttggggtcaggaacagtggctgggtgggcccagaactgcccccactgtccccctacccaccgatggagcccccagatagagctgggtggcctgtttctgcagcccttgggcagttctcactcctaggagagccaacctcggcttgtgggctggtgccccacagctacctgagacgggcatcgcaggagtctctgccacccactcaggattgggaattgtctttagtgccggctgtggagcaaaaggcagctcacccctgggcaggcggtccccatccccaccagctcgtttttcagcacccccacccacctccacccagcccctggcacctcctctggcagactccccctcctaccacgtcctcctggcctgcattcccaccccctcctgccagcacacagcctggggtccctccctcaggggctgtaagggaaggcccaccccaactcttaccaggagctgctacaggcagagcccagcactgatagggccccgcccaccgggccccgcccaccccaggccacatccccacccatctggaagtgaaggcccagggactcctccaacagacaacggacggacggatgccgctggtgctcaggaagagctagtgccttaggtgggggaaggcaggactcacgactgagagagagaggagggggatatgaccaccctgccccatctgcaggagcctgaagatccagctcaagtgccatcctgccagtggcccccagactgtggggttgggacgcctggcctctgtgtcctagaagggaccctcctgtggtctttgtcttgatttttcttaataaacggtgctatccccgcca
